(19) United States
(12) Patent Application Publication
(10) Pub. No.: US 2007/0048818 A1
(43) Pub. Date: Mar. 1, 2007

(54) Human secreted proteins

(75) Inventors: Craig A. Rosen, Laytonsville, MD (US); Steven M. Ruben, Brookeville, MD (US); George A. Komatsoulis, Silver Spring, MD (US)

Correspondence Address: HUMAN GENOME SCIENCES INC;INTELLECTUAL PROPERTY DEPT., 14200 SHADY GROVE ROAD, ROCKVILLE, MD, 20850, US

(73) Assignee: Human Genome Sciences, Inc., Rockville, MD (US)

(21) Appl. No.: 10/868,184

(22) Filed: Jun. 16, 2004

Related U.S. Application Data
(62) Division of application No. 09/950,083, filed on Sep. 12, 2001, now abandoned.
(63) Continuation-in-part of application No. 09/833,245, filed on Apr. 12, 2001.
(63) Continuation-in-part of application No. PCT/US01/11988, filed on Apr. 12, 2001.
(63) Continuation-in-part of application No. PCT/US00/06043, filed on Mar. 9, 2000.
Application No. 09/950,083 is a continuation-in-part of application No. PCT/US00/06012, filed on Mar. 9, 2000.
Application No. 09/950,083 is a continuation-in-part of application No. PCT/US00/06058, filed on Mar. 9, 2000.
Application No. 09/950,083 is a continuation-in-part of application No. PCT/US00/06044, filed on Mar. 9, 2000.
Application No. 09/950,083 is a continuation-in-part of application No. PCT/US00/06059, filed on Mar. 9, 2000.
Application No. 09/950,083 is a continuation-in-part of application No. PCT/US00/06042, filed on Mar. 9, 2000.
Application No. 09/950,083 is a continuation-in-part of application No. PCT/US00/06014, filed on Mar. 9, 2000.
Application No. 09/950,083 is a continuation-in-part of application No. PCT/US00/06013, filed on Mar. 9, 2000.
Application No. 09/950,083 is a continuation-in-part of application No. PCT/US00/06049, filed on Mar. 9, 2000.
Application No. 09/950,083 is a continuation-in-part of application No. PCT/US00/06057, filed on Mar. 9, 2000.
Application No. 09/950,083 is a continuation-in-part of application No. PCT/US00/06824, filed on Mar. 16, 2000.
Application No. 09/950,083 is a continuation-in-part of application No. PCT/US00/06765, filed on Mar. 16, 2000.
Application No. 09/950,083 is a continuation-in-part of application No. PCT/US00/06792, filed on Mar. 16, 2000.
Application No. 09/950,083 is a continuation-in-part of application No. PCT/US00/06830, filed on Mar. 16, 2000.
Application No. 09/950,083 is a continuation-in-part of application No. PCT/US00/06782, filed on Mar. 16, 2000.
Application No. 09/950,083 is a continuation-in-part of application No. PCT/US00/06822, filed on Mar. 16, 2000.
Application No. 09/950,083 is a continuation-in-part of application No. PCT/US00/06791, filed on Mar. 16, 2000.
Application No. 09/950,083 is a continuation-in-part of application No. PCT/US00/06828, filed on Mar. 16, 2000.
Application No. 09/950,083 is a continuation-in-part of application No. PCT/US00/06823, filed on Mar. 16, 2000.
Application No. 09/950,083 is a continuation-in-part of application No. PCT/US00/06781, filed on Mar. 16, 2000.
Application No. 09/950,083 is a continuation-in-part of application No. PCT/US00/07505, filed on Mar. 22, 2000.
Application No. 09/950,083 is a continuation-in-part of application No. PCT/US00/07440, filed on Mar. 22, 2000.
Application No. 09/950,083 is a continuation-in-part of application No. PCT/US00/07506, filed on Mar. 22, 2000.
Application No. 09/950,083 is a continuation-in-part of application No. PCT/US00/07507, filed on Mar. 22, 2000.
Application No. 09/950,083 is a continuation-in-part of application No. PCT/US00/07535, filed on Mar. 22, 2000.
Application No. 09/950,083 is a continuation-in-part of application No. PCT/US00/07525, filed on Mar. 22, 2000.
Application No. 09/950,083 is a continuation-in-part of application No. PCT/US00/07534, filed on Mar. 22, 2000.
Application No. 09/950,083 is a continuation-in-part of application No. PCT/US00/07483, filed on Mar. 22, 2000.
Application No. 09/950,083 is a continuation-in-part of application No. PCT/US00/07526, filed on Mar. 22, 2000.
Application No. 09/950,083 is a continuation-in-part of application No. PCT/US00/07527, filed on Mar. 22, 2000.
Application No. 09/950,083 is a continuation-in-part of application No. PCT/US00/07661, filed on Mar. 23, 2000.
Application No. 09/950,083 is a continuation-in-part of application No. PCT/US00/07579, filed on Mar. 23, 2000.
Application No. 09/950,083 is a continuation-in-part of application No. PCT/US00/07723, filed on Mar. 23, 2000.
Application No. 09/950,083 is a continuation-in-part of application No. PCT/US00/07724, filed on Mar. 23, 2000.
Application No. 09/950,083 is a continuation-in-part of application No. PCT/US00/14929, filed on Jun. 1, 2000.
Application No. 09/950,083 is a continuation-in-part of application No. PCT/US00/07722, filed on Mar. 23, 2000.
Application No. 09/950,083 is a continuation-in-part of application No. PCT/US00/07578, filed on Mar. 23, 2000.
Application No. 09/950,083 is a continuation-in-part of application No. PCT/US00/07726, filed on Mar. 23, 2000.
Application No. 09/950,083 is a continuation-in-part of application No. PCT/US00/07677, filed on Mar. 23, 2000.
Application No. 09/950,083 is a continuation-in-part of application No. PCT/US00/07725, filed on Mar. 23, 2000.
Application No. 09/950,083 is a continuation-in-part of application No. PCT/US00/09070, filed on Apr. 6, 2000.
Application No. 09/950,083 is a continuation-in-part of application No. PCT/US00/08982, filed on Apr. 6, 2000.
Application No. 09/950,083 is a continuation-in-part of application No. PCT/US00/08983, filed on Apr. 6, 2000.
Application No. 09/950,083 is a continuation-in-part of application No. PCT/US00/09067, filed on Apr. 6, 2000.
Application No. 09/950,083 is a continuation-in-part of application No. PCT/US00/09066, filed on Apr. 6, 2000.
Application No. 09/950,083 is a continuation-in-part of application No. PCT/US00/09068, filed on Apr. 6, 2000.
Application No. 09/950,083 is a continuation-in-part of application No. PCT/US00/08981, filed on Apr. 6, 2000.
Application No. 09/950,083 is a continuation-in-part of application No. PCT/US00/08980, filed on Apr. 6, 2000.
Application No. 09/950,083 is a continuation-in-part of application No. PCT/US00/09071, filed on Apr. 6, 2000.
Application No. 09/950,083 is a continuation-in-part of application No. PCT/US00/09069, filed on Apr. 6, 2000.
Application No. 09/950,083 is a continuation-in-part of application No. PCT/US00/15136, filed on Jun. 1, 2000.
Application No. 09/950,083 is a continuation-in-part of application No. PCT/US00/14926, filed on Jun. 1, 2000.
Application No. 09/950,083 is a continuation-in-part of application No. PCT/US00/14963, filed on Jun. 1, 2000.
Application No. 09/950,083 is a continuation-in-part of application No. PCT/US00/15135, filed on Jun. 1, 2000.
Application No. 09/950,083 is a continuation-in-part of application No. PCT/US00/14934, filed on Jun. 1, 2000.
Application No. 09/950,083 is a continuation-in-part of application No. PCT/US00/14933, filed on Jun. 1, 2000.
Application No. 09/950,083 is a continuation-in-part of application No. PCT/US00/15137, filed on Jun. 1, 2000.
Application No. 09/950,083 is a continuation-in-part of application No. PCT/US00/14928, filed on Jun. 1, 2000.
Application No. 09/950,083 is a continuation-in-part of application No. PCT/US00/14973, filed on Jun. 1, 2000.
Application No. 09/950,083 is a continuation-in-part of application No. PCT/US00/14964, filed on Jun. 1, 2000.
Application No. 09/950,083 is a continuation-in-part of application No. PCT/US00/26376, filed on Sep. 26, 2000.
Application No. 09/950,083 is a continuation-in-part of application No. PCT/US00/26371, filed on Sep. 26, 2000.
Application No. 09/950,083 is a continuation-in-part of application No. PCT/US00/26324, filed on Sep. 26, 2000.
Application No. 09/950,083 is a continuation-in-part of application No. PCT/US00/26323, filed on Sep. 26, 2000.
Application No. 09/950,083 is a continuation-in-part of application No. PCT/US00/26337, filed on Sep. 26, 2000.
Application No. 09/950,083 is a continuation-in-part of application No. PCT/US01/13318, filed on Apr. 26, 2001.
(60) Provisional application No. 60/278,650, filed on Mar. 27, 2001.
(60) Provisional application No. 60/167,061, filed on Nov. 23, 1999.
(60) Provisional application No. 60/124,146, filed on Mar. 12, 1999.
(60) Provisional application No. 60/166,989, filed on Nov. 23, 1999.
(60) Provisional application No. 60/124,093, filed on Mar. 12, 1999.
(60) Provisional application No. 60/168,654, filed on Dec. 3, 1999.
(60) Provisional application No. 60/124,145, filed on Mar. 12, 1999.
(60) Provisional application No. 60/168,661, filed on Dec. 3, 1999.
(60) Provisional application No. 60/124,099, filed on Mar. 12, 1999.
(60) Provisional application No. 60/168,622, filed on Dec. 3, 1999.
(60) Provisional application No. 60/124,096, filed on Mar. 12, 1999.
(60) Provisional application No. 60/168,663, filed on Dec. 3, 1999.
(60) Provisional application No. 60/124,143, filed on Mar. 12, 1999.
(60) Provisional application No. 60/168,665, filed on Dec. 3, 1999.
(60) Provisional application No. 60/138,598, filed on Jun. 11, 1999.
(60) Provisional application No. 60/124,095, filed on Mar. 12, 1999.
(60) Provisional application No. 60/168,662, filed on Dec. 3, 1999.
(60) Provisional application No. 60/138,626, filed on Jun. 11, 1999.
(60) Provisional application No. 60/125,360, filed on Mar. 19, 1999.
(60) Provisional application No. 60/168,667, filed on Dec. 3, 1999.
(60) Provisional application No. 60/138,574, filed on Jun. 11, 1999.
(60) Provisional application No. 60/124,144, filed on Mar. 12, 1999.
(60) Provisional application No. 60/168,666, filed on Dec. 3, 1999.
(60) Provisional application No. 60/138,597, filed on Jun. 11, 1999.
(60) Provisional application No. 60/124,142, filed on Mar. 12, 1999.
(60) Provisional application No. 60/168,664, filed on Dec. 3, 1999.
(60) Provisional application No. 60/125,359, filed on Mar. 19, 1999.
(60) Provisional application No. 60/169,906, filed on Dec. 10, 1999.
(60) Provisional application No. 60/126,051, filed on Mar. 23, 1999.
(60) Provisional application No. 60/169,980, filed on Dec. 10, 1999.
(60) Provisional application No. 60/125,362, filed on Mar. 19, 1999.
(60) Provisional application No. 60/169,910, filed on Dec. 10, 1999.
(60) Provisional application No. 60/125,361, filed on Mar. 19, 1999.
(60) Provisional application No. 60/169,936, filed on Dec. 10, 1999.
(60) Provisional application No. 60/125,812, filed on Mar. 23, 1999.
(60) Provisional application No. 60/169,916, filed on Dec. 10, 1999.
(60) Provisional application No. 60/126,054, filed on Mar. 23, 1999.
(60) Provisional application No. 60/169,946, filed on Dec. 10, 1999.
(60) Provisional application No. 60/125,815, filed on Mar. 23, 1999.
(60) Provisional application No. 60/169,616, filed on Dec. 8, 1999.
(60) Provisional application No. 60/125,358, filed on Mar. 19, 1999.
(60) Provisional application No. 60/169,623, filed on Dec. 8, 1999.
(60) Provisional application No. 60/125,364, filed on Mar. 19, 1999.
(60) Provisional application No. 60/169,617, filed on Dec. 8, 1999.
(60) Provisional application No. 60/125,363, filed on Mar. 19, 1999.
(60) Provisional application No. 60/172,410, filed on Dec. 17, 1999.
(60) Provisional application No. 60/126,502, filed on Mar. 26, 1999.
(60) Provisional application No. 60/172,409, filed on Dec. 17, 1999.
(60) Provisional application No. 60/126,503, filed on Mar. 26, 1999.
(60) Provisional application No. 60/172,412, filed on Dec. 17, 1999.
(60) Provisional application No. 60/126,505, filed on Mar. 26, 1999.
(60) Provisional application No. 60/172,408, filed on Dec. 17, 1999.
(60) Provisional application No. 60/126,594, filed on Mar. 26, 1999.
(60) Provisional application No. 60/172,413, filed on Dec. 17, 1999.
(60) Provisional application No. 60/126,511, filed on Mar. 26, 1999.
(60) Provisional application No. 60/171,549, filed on Dec. 22, 1999.
(60) Provisional application No. 60/126,595, filed on Mar. 26, 1999.
(60) Provisional application No. 60/171,504, filed on Dec. 22, 1999.
(60) Provisional application No. 60/126,598, filed on Mar. 26, 1999.
(60) Provisional application No. 60/171,552, filed on Dec. 22, 1999.
(60) Provisional application No. 60/126,596, filed on Mar. 26, 1999.
(60) Provisional application No. 60/171,550, filed on Dec. 22, 1999.
(60) Provisional application No. 60/126,600, filed on Mar. 26, 1999.
(60) Provisional application No. 60/171,551, filed on Dec. 22, 1999.
(60) Provisional application No. 60/126,501, filed on Mar. 26, 1999.
(60) Provisional application No. 60/174,847, filed on Jan. 7, 2000.
(60) Provisional application No. 60/126,504, filed on Mar. 26, 1999.
(60) Provisional application No. 60/174,853, filed on Jan. 7, 2000.
(60) Provisional application No. 60/126,509, filed on Mar. 26, 1999.
(60) Provisional application No. 60/174,852, filed on Jan. 7, 2000.
(60) Provisional application No. 60/126,506, filed on Mar. 26, 1999.
(60) Provisional application No. 60/174,850, filed on Jan. 7, 2000.
(60) Provisional application No. 60/126,510, filed on Mar. 26, 1999.
(60) Provisional application No. 60/174,851, filed on Jan. 7, 2000.
(60) Provisional application No. 60/138,573, filed on Jun. 11, 1999.
(60) Provisional application No. 60/126,508, filed on Mar. 26, 1999.
(60) Provisional application No. 60/174,871, filed on Jan. 7, 2000.
(60) Provisional application No. 60/174,872, filed on Jan. 7, 2000.
(60) Provisional application No. 60/174,872, filed on Jan. 7, 2000.
(60) Provisional application No. 60/126,507, filed on Mar. 26, 1999.
(60) Provisional application No. 60/174,877, filed on Jan. 7, 2000.
(60) Provisional application No. 60/126,597, filed on Mar. 26, 1999.
(60) Provisional application No. 60/176,064, filed on Jan. 14, 2000.
(60) Provisional application No. 60/154,373, filed on Sep. 17, 1999.
(60) Provisional application No. 60/126,601, filed on Mar. 26, 1999.
(60) Provisional application No. 60/176,063, filed on Jan. 14, 2000.
(60) Provisional application No. 60/126,602, filed on Mar. 26, 1999.
(60) Provisional application No. 60/176,052, filed on Jan. 14, 2000.
(60) Provisional application No. 60/128,695, filed on Apr. 9, 1999.
(60) Provisional application No. 60/176,069, filed on Jan. 14, 2000.
(60) Provisional application No. 60/128,696, filed on Apr. 9, 1999.
(60) Provisional application No. 60/176,068, filed on Jan. 14, 2000.
(60) Provisional application No. 60/128,703, filed on Apr. 9, 1999.
(60) Provisional application No. 60/176,929, filed on Jan. 20, 2000.
(60) Provisional application No. 60/128,697, filed on Apr. 9, 1999.
(60) Provisional application No. 60/176,926, filed on Jan. 20, 2000.
(60) Provisional application No. 60/128,698, filed on Apr. 9, 1999.
(60) Provisional application No. 60/177,050, filed on Jan. 20, 2000.
(60) Provisional application No. 60/128,699, filed on Apr. 9, 1999.
(60) Provisional application No. 60/177,166, filed on Jan. 20, 2000.
(60) Provisional application No. 60/128,701, filed on Apr. 9, 1999.
(60) Provisional application No. 60/176,930, filed on Jan. 20, 2000.
(60) Provisional application No. 60/128,700, filed on Apr. 9, 1999.
(60) Provisional application No. 60/176,931, filed on Jan. 20, 2000.
(60) Provisional application No. 60/128,694, filed on Apr. 9, 1999.
(60) Provisional application No. 60/177,049, filed on Jan. 20, 2000.
(60) Provisional application No. 60/128,702, filed on Apr. 9, 1999.
(60) Provisional application No. 60/138,629, filed on Jun. 11, 1999.
(60) Provisional application No. 60/138,628, filed on Jun. 11, 1999.
(60) Provisional application No. 60/138,631, filed on Jun. 11, 1999.
(60) Provisional application No. 60/138,632, filed on Jun. 11, 1999.
(60) Provisional application No. 60/138,599, filed on Jun. 11, 1999.
(60) Provisional application No. 60/138,572, filed on Jun. 11, 1999.
(60) Provisional application No. 60/138,625, filed on Jun. 11, 1999.
(60) Provisional application No. 60/138,633, filed on Jun. 11, 1999.
(60) Provisional application No. 60/138,630, filed on Jun. 11, 1999.
(60) Provisional application No. 60/138,627, filed on Jun. 11, 1999.
(60) Provisional application No. 60/155,808, filed on Sep. 27, 1999.
(60) Provisional application No. 60/155,804, filed on Sep. 27, 1999.
(60) Provisional application No. 60/155,807, filed on Sep. 27, 1999.
(60) Provisional application No. 60/155,805, filed on Sep. 27, 1999.
(60) Provisional application No. 60/155,806, filed on Sep. 27, 1999.
(60) Provisional application No. 60/212,142, filed on Jun. 16, 2000.
(60) Provisional application No. 60/201,194, filed on May 2, 2000.

(51) Int. Cl. C07K 14/47; C07H 21/04; C12P 21/06

(52) U.S. Cl. 435/69.1; 435/320.1; 435/325; 530/350; 536/23.5

(57) ABSTRACT

The present invention relates to novel human secreted proteins and isolated nucleic acids containing the coding regions of the genes encoding such proteins. Also provided are vectors, host cells, antibodies, and recombinant methods for producing human secreted proteins. The invention further relates to diagnostic and therapeutic methods useful for diagnosing and treating diseases, disorders, and/or conditions related to these novel human secreted proteins.

[0001] This application is a division of U.S. patent application Ser. No. 09/950,083, filed Sep. 12, 2001, which is a continuation-in-part of, and claims benefit under 35 U.S.C. § 119(e) based on copending U.S. Provisional Application No. 60/278,650 filed on Mar. 27, 2001; Ser. No. 09/950,083 is also a continuation-in-part of, and claims benefit under 35 U.S.C. § 120 of copending U.S. Utility application Ser. No. 09/833,245, filed on Apr. 12, 2001, and PCT International Application Serial No. US01/11988, filed on Apr. 12, 2001; Ser. No. 09/950,083 is also a continuation-in-part of, and claims benefit under 35 U.S.C. § 120 of copending PCT International Application Serial No. US00/06043, filed on Mar. 9, 2000, which claims benefit under 35 U.S.C. § 119(e) based on U.S. Provisional Application No. 60/167,061, filed on Nov. 23, 1999, and U.S. Provisional Application No. 60/124,146, filed on Mar. 12, 1999; Ser. No. 09/950,083 is also a continuation-in-part of, and claims benefit under 35 U.S.C. § 120 of copending PCT International Application Serial No. US00/06012, filed on Mar. 9, 2000, which claims benefit under 35 U.S.C. § 119(e) based on U.S. Provisional Application No. 60/166,989, filed on Nov. 23, 1999, and U.S. Provisional Application No. 60/124,093, filed on Mar. 12, 1999; Ser. No. 09/950,083 is also a continuation-in-part of, and claims benefit under 35 U.S.C. § 120 of copending PCT International Application Serial No. US00/06058, filed on Mar. 9, 2000, which claims benefit under 35 U.S.C. § 119(e) based on U.S. Provisional Application No. 60/168,654, filed on Dec. 3, 1999, and U.S. Provisional Application No. 60/124,145, filed on Mar. 12, 1999; Ser. No. 09/950,083 is also a continuation-in-part of, and claims benefit under 35 U.S.C. § 120 of copending PCT International Application Serial No. US00/06044, filed on Mar. 9, 2000, which claims benefit under 35 U.S.C. § 119(e) based on U.S. Provisional Application No. 60/168,661, filed on Dec. 3, 1999, and U.S. Provisional Application No. 60/124,099, filed on Mar. 12, 1999; Ser. No. 09/950,083 is also a continuation-in-part of, and claims benefit under 35 U.S.C. § 120 of copending PCT International Application Serial No. US00/06059, filed on Mar. 9, 2000, which claims benefit under 35 U.S.C. § 119(e) based on U.S. Provisional Application No. 60/168,622, filed on Dec. 3, 1999, and U.S. Provisional Application No. 60/124,096, filed on Mar. 12, 1999; Ser. No. 09/950,083 is also a continuation-in-part of, and claims benefit under 35 U.S.C. § 120 of copending PCT International Application Serial No. US00/06042, filed on Mar. 9, 2000, which claims benefit under 35 U.S.C. § 119(e) based on U.S. Provisional Application No. 60/168,663, filed on Dec. 3, 1999, and U.S. Provisional Application No. 60/124,143, filed on Mar. 12, 1999; Ser. No. 09/950,083 is also a continuation-in-part of, and claims benefit under 35 U.S.C. § 120 of copending PCT International Application Serial No. US00/06014, filed on Mar. 9, 2000, which claims benefit under 35 U.S.C. § 119(e) based on U.S. Provisional Application No. 60/168,665, filed on Dec. 3, 1999, and U.S. Provisional Application No. 60/138,598, filed on Jun. 11, 1999, and U.S. Provisional Application No. 60/124,095, filed on Mar. 12, 1999; Ser. No. 09/950,083 is also a continuation-in-part of, and claims benefit under 35 U.S.C. § 120 of copending PCT International Application Serial No. US00/06013, filed on Mar. 9, 2000, which claims benefit under 35 U.S.C. § 119(e) based on U.S. Provisional Application No. 60/168,662, filed on Dec. 3, 1999, and U.S. Provisional Application No. 60/138,626, filed on Jun. 11, 1999, and U.S. Provisional Application No. 60/125,360, filed on Mar. 19, 1999; Ser. No. 09/950,083 is also a continuation-in-part of, and claims benefit under 35 U.S.C. § 120 of copending PCT International Application Serial No. US00/06049, filed on Mar. 9, 2000, which claims benefit under 35 U.S.C. § 119(e) based on U.S. Provisional Application No. 60/168,667, filed on Dec. 3, 1999, and U.S. Provisional Application No. 60/138,574, filed on Jun. 11, 1999, and U.S. Provisional Application No. 60/124,144, filed on Mar. 12, 1999; Ser. No. 09/950,083 is also a continuation-in-part of, and claims benefit under 35 U.S.C. § 120 of copending PCT International Application Serial No. US00/06057, filed on Mar. 9, 2000, which claims benefit under 35 U.S.C. § 119(e) based on U.S. Provisional Application No. 60/168,666, filed on Dec. 3, 1999, and U.S. Provisional Application No. 60/138,597, filed on Jun. 11, 1999, and U.S. Provisional Application No. 60/124,142, filed on Mar. 12, 1999; Ser. No. 09/950,083 is also a continuation-in-part of, and claims benefit under 35 U.S.C. § 120 of copending PCT International Application Serial No. US00/06824, filed on Mar. 16, 2000, which claims benefit under 35 U.S.C. § 119(e) based on U.S. Provisional Application No. 60/168,664, filed on Dec. 3, 1999, and U.S. Provisional Application No. 60/125,359, filed on Mar. 19, 1999; Ser. No. 09/950,083 is also a continuation-in-part of, and claims benefit under 35 U.S.C. § 120 of copending PCT International Application Serial No. US00/06765, filed on Mar. 16, 2000, which claims benefit under 35 U.S.C. § 119(e) based on U.S. Provisional Application No. 60/169,906, filed on Dec. 10, 1999, and U.S. Provisional Application No. 60/126,051, filed on Mar. 23, 1999; Ser. No. 09/950,083 is also a continuation-in-part of, and claims benefit under 35 U.S.C. § 120 of copending PCT International Application Serial No. US00/06792, filed on Mar. 16, 2000, which claims benefit under 35 U.S.C. § 119(e) based on U.S. Provisional Application No. 60/169,980, filed on Dec. 10, 1999, and U.S. Provisional Application No. 60/125,362, filed on Mar. 19, 1999; Ser. No. 09/950,083 is also a continuation-in-part of, and claims benefit under 35 U.S.C. § 120 of copending PCT International Application Serial No. US00/06830, filed on Mar. 16, 2000, which claims benefit under 35 U.S.C. § 119(e) based on U.S. Provisional Application No. 60/169,910, filed on Dec. 10, 1999, and U.S. Provisional Application No. 60/125,361, filed on Mar. 19, 1999; Ser. No. 09/950,083 is also a continuation-in-part of, and claims benefit under 35 U.S.C. § 120 of copending PCT International Application Serial No. US00/06782, filed on Mar. 16, 2000, which claims benefit under 35 U.S.C. § 119(e) based on U.S. Provisional Application No. 60/169,936, filed on Dec. 10, 1999, and U.S. Provisional Application No. 60/125,812, filed on Mar. 23, 1999; Ser. No. 09/950,083 is also a continuation-in-part of, and claims benefit under 35 U.S.C. § 120 of copending PCT International Application Serial No. US00/06822, filed on Mar. 16, 2000, which claims benefit under 35 U.S.C. § 119(e) based on U.S. Provisional Application No. 60/169,916, filed on Dec. 10, 1999, and U.S. Provisional Application No. 60/126,054, filed on Mar. 23, 1999; Ser. No. 09/950,083 is also a continuation-in-part of, and claims benefit under 35 U.S.C. § 120 of copending PCT International Application Serial No. US00/06791, filed on Mar. 16, 2000, which claims benefit under 35 U.S.C. § 119(e) based on U.S. Provisional Application No. 60/169,946, filed on Dec. 10, 1999, and U.S. Provisional Application No. 60/125,815, filed on Mar. 23, 1999; Ser. No. 09/950,083 is also a continuation-in-part of, and claims benefit under 35 U.S.C. § 120 of copending PCT International Application Serial No. US00/06828, filed on Mar. 16, 2000, which claims benefit under 35 U.S.C. § 119(e) based on U.S. Provisional Application No. 60/169,616, filed on Dec. 8, 1999, and U.S. Provisional Application No. 60/125,358, filed on Mar. 19, 1999; Ser. No. 09/950,083 is also a continuation-in-part of, and claims benefit under 35 U.S.C. § 120 of copending PCT International Application Serial No. US00/06823, filed on Mar. 16, 2000, which claims benefit under 35 U.S.C. § 119(e) based on U.S. Provisional Application No. 60/169,623, filed on Dec. 8, 1999, and U.S. Provisional Application No. 60/125,364, filed on Mar. 19, 1999; Ser. No. 09/950,083 is also a continuation-in-part of, and claims benefit under 35 U.S.C. § 120 of copending PCT International Application Serial No. US00/06781, filed on Mar. 16, 2000, which claims benefit under 35 U.S.C. § 119(e) based on U.S. Provisional Application No. 60/169,617, filed on Dec. 8, 1999, and U.S. Provisional Application No. 60/125,363, filed on Mar. 19, 1999; Ser. No. 09/950,083 is also a continuation-in-part of, and claims benefit under 35 U.S.C. § 120 of copending PCT International Application Serial No. US00/07505, filed on Mar. 22, 2000, which claims benefit under 35 U.S.C. § 119(e) based on U.S. Provisional Application No. 60/172,410, filed on Dec. 17, 1999, and U.S. Provisional Application No. 60/126,502, filed on Mar. 26, 1999; Ser. No. 09/950,083 is also a continuation-in-part of, and claims benefit under 35 U.S.C. § 120 of copending PCT International Application Serial No. US00/07440, filed on Mar. 22, 2000, which claims benefit under 35 U.S.C. § 119(e) based on U.S. Provisional Application No. 60/172,409, filed on Dec. 17, 1999, and U.S. Provisional Application No. 60/126,503, filed on Mar. 26, 1999; Ser. No. 09/950,083 is also a continuation-in-part of, and claims benefit under 35 U.S.C. § 120 of copending PCT International Application Serial No. US00/07506, filed on Mar. 22, 2000, which claims benefit under 35 U.S.C. § 119(e) based on U.S. Provisional Application No. 60/172,412, filed on Dec. 17, 1999, and U.S. Provisional Application No. 60/126,505, filed on Mar. 26, 1999; Ser. No. 09/950,083 is also a continuation-in-part of, and claims benefit under 35 U.S.C. § 120 of copending PCT International Application Serial No. US00/07507, filed on Mar. 22, 2000, which claims benefit under 35 U.S.C. § 119(e) based on U.S. Provisional Application No. 60/172,408, filed on Dec. 17, 1999, and U.S. Provisional Application No. 60/126,594, filed on Mar. 26, 1999; Ser. No. 09/950,083 is also a continuation-in-part of, and claims benefit under 35 U.S.C. § 120 of copending PCT International Application Serial No. US00/07535, filed on Mar. 22, 2000, which claims benefit under 35 U.S.C. § 119(e) based on U.S. Provisional Application No. 60/172,413, filed on Dec. 17, 1999, and U.S. Provisional Application No. 60/126,511, filed on Mar. 26, 1999; Ser. No. 09/950,083 is also a continuation-in-part of, and claims benefit under 35 U.S.C. § 120 of copending PCT International Application Serial No. US00/07525, filed on Mar. 22, 2000, which claims benefit under 35 U.S.C. § 119(e) based on U.S. Provisional Application No. 60/171,549, filed on Dec. 22, 1999, and U.S. Provisional Application No. 60/126,595, filed on Mar. 26, 1999; Ser. No. 09/950,083 is also a continuation-in-part of, and claims benefit under 35 U.S.C. § 120 of copending PCT International Application Serial No. US00/07534, filed on Mar. 22, 2000, which claims benefit under 35 U.S.C. § 119(e) based on U.S. Provisional Application No. 60/171,504, filed on Dec. 22, 1999, and U.S. Provisional Application No. 60/126,598, filed on Mar. 26, 1999; Ser. No. 09/950,083 is also a continuation-in-part of, and claims benefit under 35 U.S.C. § 120 of copending PCT International Application Serial No. US00/07483, filed on Mar. 22, 2000, which claims benefit under 35 U.S.C. § 119(e) based on U.S. Provisional Application No. 60/171,552, filed on Dec. 22, 1999, and U.S. Provisional Application No. 60/126,596, filed on Mar. 26, 1999; Ser. No. 09/950,083 is also a continuation-in-part of, and claims benefit under 35 U.S.C. § 120 of copending PCT International Application Serial No. US00/07526, filed on Mar. 22, 2000, which claims benefit under 35 U.S.C. § 119(e) based on U.S. Provisional Application No. 60/171,550, filed on Dec. 22, 1999, and U.S. Provisional Application No. 60/126,600, filed on Mar. 26, 1999; Ser. No. 09/950,083 is also a continuation-in-part of, and claims benefit under 35 U.S.C. § 120 of copending PCT International Application Serial No. US00/07527, filed on Mar. 22, 2000, which claims benefit under 35 U.S.C. § 119(e) based on U.S. Provisional Application No. 60/171,551, filed on Dec. 22, 1999, and U.S. Provisional Application No. 60/126,501, filed on Mar. 26, 1999; Ser. No. 09/950,083 is also a continuation-in-part of, and claims benefit under 35 U.S.C. § 120 of copending PCT International Application Serial No. US00/07661, filed on Mar. 23, 2000, which claims benefit under 35 U.S.C. § 119(e) based on U.S. Provisional Application No. 60/174,847, filed on Jan. 7, 2000, and U.S. Provisional Application No. 60/126,504, filed on Mar. 26, 1999; Ser. No. 09/950,083 is also a continuation-in-part of, and claims benefit under 35 U.S.C. § 120 of copending PCT International Application Serial No. US00/07579, filed on Mar. 23, 2000, which claims benefit under 35 U.S.C. § 119(e) based on U.S. Provisional Application No. 60/174,853, filed on Jan. 7, 2000, and U.S. Provisional Application No. 60/126,509, filed on Mar. 26, 1999; Ser. No. 09/950,083 is also a continuation-in-part of, and claims benefit under 35 U.S.C. § 120 of copending PCT International Application Serial No. US00/07723, filed on Mar. 23, 2000, which claims benefit under 35 U.S.C. § 119(e) based on U.S. Provisional Application No. 60/242,710, filed on Oct. 25, 2000, and U.S. Provisional Application No. 60/174,852, filed on Jan. 7, 2000, and U.S. Provisional Application No. 60/126,506, filed on Mar. 26, 1999; Ser. No. 09/950,083 is also a continuation-in-part of, and claims benefit under 35 U.S.C. § 120 of copending PCT International Application Serial No. US00/07724, filed on Mar. 23, 2000, which claims benefit under 35 U.S.C. § 119(e) based on U.S. Provisional Application No. 60/174,850, filed on Jan. 7, 2000, and U.S. Provisional Application No. 60/126,510, filed on Mar. 26, 1999; Ser. No. 09/950,083 is also a continuation-in-part of, and claims benefit under 35 U.S.C. § 120 of copending PCT International Application Serial No. US00/14929, filed on Jun. 1, 2000, which claims benefit under 35 U.S.C. § 119(e) based on U.S. Provisional Application No. 60/174,851, filed on Jan. 7, 2000, and U.S. Provisional Application No. 60/138,573, filed on Jun. 11, 1999; Ser. No. 09/950,083 is also a continuation-in-part of, and claims benefit under 35 U.S.C. § 120 of copending PCT International Application Serial No. US00/07722, filed on Mar. 23, 2000, which claims benefit under 35 U.S.C. § 119(e) based on U.S. Provisional Application No. 60/174,871, filed on Jan. 7, 2000, and U.S. Provisional Application No. 60/126,508, filed on Mar. 26, 1999; Ser. No. 09/950,083 is also a continuation-in-part of, and claims benefit under 35 U.S.C. § 120 of copending PCT International Application Serial No. US00/07578, filed on Mar. 23, 2000, which claims benefit under 35 U.S.C. § 119(e) based on U.S. Provisional Application No. 60/174,872, filed on Jan. 7, 2000, and U.S. Provisional Application No. 60/126,507, filed on Mar. 26, 1999; Ser. No. 09/950,083 is also a continuation-in-part of, and claims benefit under 35 U.S.C. § 120 of copending PCT International Application Serial No. US00/07726, filed on Mar. 23, 2000, which claims benefit under 35 U.S.C. § 119(e) based on U.S. Provisional Application No. 60/174,877, filed on Jan. 7, 2000, and U.S. Provisional Application No. 60/126,597, filed on Mar. 26, 1999; Ser. No. 09/950,083 is also a continuation-in-part of, and claims benefit under 35 U.S.C. § 120 of copending PCT International Application Serial No. US00/07677, filed on Mar. 23, 2000, which claims benefit under 35 U.S.C. § 119(e) based on U.S. Provisional Application No. 60/176,064, filed on Jan. 14, 2000, and U.S. Provisional Application No. 60/154,373, filed on Sep. 17, 1999, and U.S. Provisional Application No. 60/126,601, filed on Mar. 26, 1999; Ser. No. 09/950,083 is also a continuation-in-part of, and claims benefit under 35 U.S.C. § 120 of copending PCT International Application Serial No. US00/07725, filed on Mar. 23, 2000, which claims benefit under 35 U.S.C. § 119(e) based on U.S. Provisional Application No. 60/176,063, filed on Jan. 14, 2000, and U.S. Provisional Application No. 60/126,602, filed on Mar. 26, 1999; Ser. No. 09/950,083 is also a continuation-in-part of, and claims benefit under 35 U.S.C. § 120 of copending PCT International Application Serial No. US00/09070, filed on Apr. 6, 2000, which claims benefit under 35 U.S.C. § 119(e) based on U.S. Provisional Application No. 60/176,052, filed on Jan. 14, 2000, and U.S. Provisional Application No. 60/128,695, filed on Apr. 9, 1999; Ser. No. 09/950,083 is also a continuation-in-part of, and claims benefit under 35 U.S.C. § 120 of copending PCT International Application Serial No. US00/08982, filed on Apr. 6, 2000, which claims benefit under 35 U.S.C. § 119(e) based on U.S. Provisional Application No. 60/176,069, filed on Jan. 14, 2000, and U.S. Provisional Application No. 60/128,696, filed on Apr. 9, 1999; Ser. No. 09/950,083 is also a continuation-in-part of, and claims benefit under 35 U.S.C. § 120 of copending PCT International Application Serial No. US00/08983, filed on Apr. 6, 2000, which claims benefit under 35 U.S.C. § 119(e) based on U.S. Provisional Application No. 60/176,068, filed on Jan. 14, 2000, and U.S. Provisional Application No. 60/128,703, filed on Apr. 9, 1999; Ser. No. 09/950,083 is also a continuation-in-part of, and claims benefit under 35 U.S.C. § 120 of copending PCT International Application Serial No. US00/09067, filed on Apr. 6, 2000, which claims benefit under 35 U.S.C. § 119(e) based on U.S. Provisional Application No. 60/176,929, filed on Jan. 20, 2000, and U.S. Provisional Application No. 60/128,697, filed on Apr. 9, 1999; Ser. No. 09/950,083 is also a continuation-in-part of, and claims benefit under 35 U.S.C. § 120 of copending PCT International Application Serial No. US00/09066, filed on Apr. 6, 2000, which claims benefit under 35 U.S.C. § 119(e) based on U.S. Provisional Application No. 60/176,926, filed on Jan. 20, 2000 and U.S. Provisional Application No. 60/128,698, filed on Apr. 9, 1999; Ser. No. 09/950,083 is also a continuation-in-part of, and claims benefit under 35 U.S.C. § 120 of copending PCT International Application Serial No. US00/09068, filed on Apr. 6, 2000, which claims benefit under 35 U.S.C. § 119(e) based on U.S. Provisional Application No. 60/177,050, filed on Jan. 20, 2000, and U.S. Provisional Application No. 60/128,699, filed on Apr. 9, 1999; Ser. No. 09/950,083 is also a continuation-in-part of, and claims benefit under 35 U.S.C. § 120 of copending PCT International Application Serial No. US00/08981, filed on Apr. 6, 2000, which claims benefit under 35 U.S.C. § 119(e) based on U.S. Provisional Application No. 60/177,166, filed on Jan. 20, 2000, and U.S. Provisional Application No. 60/128,701, filed on Apr. 9, 1999; Ser. No. 09/950,083 is also a continuation-in-part of, and claims benefit under 35 U.S.C. § 120 of copending PCT International Application Serial No. US00/08980, filed on Apr. 6, 2000, which claims benefit under 35 U.S.C. § 119(e) based on U.S. Provisional Application No. 60/176,930, filed on Jan. 20, 2000, and U.S. Provisional Application No. 60/128,700, filed on Apr. 9, 1999; Ser. No. 09/950,083 is also a continuation-in-part of, and claims benefit under 35 U.S.C. § 120 of copending PCT International Application Serial No. US00/09071, filed on Apr. 6, 2000, which claims benefit under 35 U.S.C. § 119(e) based on U.S. Provisional Application No. 60/176,931, filed on Jan. 20, 2000, and U.S. Provisional Application No. 60/128,694, filed on Apr. 9, 1999; Ser. No. 09/950,083 is also a continuation-in-part of, and claims benefit under 35 U.S.C. § 120 of copending PCT International Application Serial No. US00/09069, filed on Apr. 6, 2000, which claims benefit under 35 U.S.C. § 119(e) based on U.S. Provisional Application No. 60/177,049, filed on Jan. 20, 2000, and U.S. Provisional Application No. 60/128,702, filed on Apr. 9, 1999; Ser. No. 09/950,083 is also a continuation-in-part of, and claims benefit under 35 U.S.C. § 120 of copending PCT International Application Serial No. US00/15136, filed on Jun. 1, 2000, which claims benefit under 35 U.S.C. § 119(e) based on U.S. Provisional Application No. 60/138,629, filed on Jun. 11, 1999; Ser. No. 09/950,083 is also a continuation-in-part of, and claims benefit under 35 U.S.C. § 120 of copending PCT International Application Serial No. US00/14926, filed on Jun. 1, 2000, which claims benefit under 35 U.S.C. § 119(e) based on U.S. Provisional Application No. 60/138,628, filed on Jun. 11, 1999; Ser. No. 09/950,083 is also a continuation-in-part of, and claims benefit under 35 U.S.C. § 120 of copending PCT International Application Serial No. US00/14963, filed on Jun. 1, 2000, which claims benefit under 35 U.S.C. § 119(e) based on U.S. Provisional Application No. 60/138,631, filed on Jun. 11, 1999; Ser. No. 09/950,083 is also a continuation-in-part of, and claims benefit under 35 U.S.C. § 120 of copending PCT International Application Serial No. US00/15135, filed on Jun. 1, 2000, which claims benefit under 35 U.S.C. § 119(e) based on U.S. Provisional Application No. 60/138,632, filed on Jun. 11, 1999; Ser. No. 09/950,083 is also a continuation-in-part of, and claims benefit under 35 U.S.C. § 120 of copending PCT International Application Serial No. US00/14934, filed on Jun. 1, 2000, which claims benefit under 35 U.S.C. § 119(e) based on U.S. Provisional Application No. 60/138,599, filed on Jun. 11, 1999; Ser. No. 09/950,083 is also a continuation-in-part of, and claims benefit under 35 U.S.C. § 120 of copending PCT International Application Serial No. US00/14933, filed on Jun. 1, 2000, which claims benefit under 35 U.S.C. § 119(e) based on U.S. Provisional Application No. 60/138,572, filed on Jun. 11, 1999; Ser. No. 09/950,083 is also a continuation-in-part of, and claims benefit under 35 U.S.C. § 120 of copending PCT International Application Serial No. US00/15137, filed on Jun. 1, 2000, which claims benefit under 35 U.S.C. § 119(e) based on U.S. Provisional Application No. 60/138,625, filed on Jun. 11, 1999; Ser. No. 09/950,083 is also a continuation-in-part of, and claims benefit under 35 U.S.C. § 120 of copending PCT International Application Serial No. US00/14928, filed on Jun. 1, 2000, which claims benefit under 35 U.S.C. § 119(e) based on U.S. Provisional Application No. 60/138,633, filed on Jun. 11, 1999; Ser. No. 09/950,083 is also a continuation-in-part of, and claims benefit under 35 U.S.C. § 120 of copending PCT International Application Serial No. US00/14973, filed on Jun. 1, 2000, which claims benefit under 35 U.S.C. § 119(e) based on U.S. Provisional Application No. 60/138,630, filed on Jun. 11, 1999; Ser. No. 09/950,083 is also a continuation-in-part of, and claims benefit under 35 U.S.C. § 120 of copending PCT International Application Serial No. US00/14964, filed on Jun. 1, 2000, which claims benefit under 35 U.S.C. § 119(e) based on U.S. Provisional Application No. 60/138,627, filed on Jun. 11, 1999; Ser. No. 09/950,083 is also a continuation-in-part of, and claims benefit under 35 U.S.C. § 120 of copending PCT International Application Serial No. US00/26376, filed on Sep. 26, 2000, which claims benefit under 35 U.S.C. § 119(e) based on U.S. Provisional Application No. 60/155,808, filed on Sep. 27, 1999; Ser. No. 09/950,083 is also a continuation-in-part of, and claims benefit under 35 U.S.C. § 120 of copending PCT International Application Serial No. US00/26371, filed on Sep. 26, 2000, which claims benefit under 35 U.S.C. § 119(e) based on U.S. Provisional Application No. 60/155,804, filed on Sep. 27, 1999; Ser. No. 09/950,083 is also a continuation-in-part of, and claims benefit under 35 U.S.C. § 120 of copending PCT International Application Serial No. US00/26324, filed on Sep. 26, 2000, which claims benefit under 35 U.S.C. § 119(e) based on U.S. Provisional Application No. 60/155,807, filed on Sep. 27, 1999; Ser. No. 09/950,083 is also a continuation-in-part of, and claims benefit under 35 U.S.C. § 120 of copending PCT International Application Serial No. US00/26323, filed on Sep. 26, 2000, which claims benefit under 35 U.S.C. § 119(e) based on U.S. Provisional Application No. 60/155,805, filed on Sep. 27, 1999; Ser. No. 09/950,083 is also a continuation-in-part of, and claims benefit under 35 U.S.C. § 120 of copending PCT International Application Serial No. US00/26337, filed on Sep. 26, 2000, which claims benefit under 35 U.S.C. § 119(e) based on U.S. Provisional Application No. 60/155,806, filed on Sep. 27, 1999; Ser. No. 09/950,083 is also a continuation-in-part of, and claims benefit under 35 U.S.C. § 120 of copending PCT International Application Serial No. US01/13318, filed on Apr. 27, 2001, which claims benefit under 35 U.S.C. § 119(e) based on U.S. Provisional Application No. 60/212,142, filed on Jun. 16, 2000, and U.S. Provisional Application No. 60/201,194, filed on May 2, 2000. Each of the above referenced PCT applications were published in the English language. Each of the above referenced priority applications are hereby incorporated by reference in their entireties.

### FIELD OF THE INVENTION

[0002] The present invention relates to novel proteins. More specifically, isolated nucleic acid molecules are provided encoding novel polypeptides. Novel polypeptides and antibodies that bind to these polypeptides are provided. Also provided are vectors, host cells, and recombinant and synthetic methods for producing human polynucleotides and/or polypeptides, and antibodies. The invention further relates to diagnostic and therapeutic methods useful for diagnosing, treating, preventing and/or prognosing disorders related to these novel polypeptides. The invention further relates to screening methods for identifying agonists and antagonists of polynucleotides and polypeptides of the invention. The present invention further relates to methods and/or compositions for inhibiting or enhancing the production and function of the polypeptides of the present invention.

### BACKGROUND OF THE INVENTION

[0003] Unlike bacterium, which exist as a single compartment surrounded by a membrane, human cells and other eukaryotes are subdivided by membranes into many functionally distinct compartments. Each membrane-bounded compartment, or organelle, contains different proteins essential for the function of the organelle. The cell uses “sorting signals,” which are amino acid motifs located within the protein, to target proteins to particular cellular organelles.

[0004] One type of sorting signal, called a signal sequence, a signal peptide, or a leader sequence, directs a class of proteins to an organelle called the endoplasmic reticulum (ER). The ER separates the membrane-bounded proteins from all other types of proteins. Once localized to the ER, both groups of proteins can be further directed to another organelle called the Golgi apparatus. Here, the Golgi distributes the proteins to vesicles, including secretory vesicles, the cell membrane, lysosomes, and the other organelles.

[0005] Proteins targeted to the ER by a signal sequence can be released into the extracellular space as a secreted protein. For example, vesicles containing secreted proteins can fuse with the cell membrane and release their contents into the extracellular space—a process called exocytosis. Exocytosis can occur constitutively or after receipt of a triggering signal. In the latter case, the proteins are stored in secretory vesicles (or secretory granules) until exocytosis is triggered. Similarly, proteins residing on the cell membrane can also be secreted into the extracellular space by proteolytic cleavage of a “linker” holding the protein to the membrane.

[0006] Thus there exists a clear need for identifying and using novel secreted polynucleotides and polypeptides. Identification and sequencing of human genes is a major goal of modern scientific research. For example, by identifying genes and determining their sequences, scientists have been able to make large quantities of valuable human “gene products.” These include human insulin, interferon, Factor VIII, tumor necrosis factor, human growth hormone, tissue plasminogen activator, and numerous other compounds. Additionally, knowledge of gene sequences can provide the key to treatment or cure of genetic diseases (such as muscular dystrophy and cystic fibrosis).

### SUMMARY OF THE INVENTION

[0007] The present invention relates to novel secreted proteins. More specifically, isolated nucleic acid molecules are provided encoding novel secreted polypeptides. Novel polypeptides and antibodies that bind to these polypeptides are provided. Also provided are vectors, host cells, and recombinant and synthetic methods for producing human polynucleotides and/or polypeptides, and antibodies. The invention further relates to diagnostic and therapeutic methods useful for diagnosing, treating, preventing and/or prognosing disorders related to these novel polypeptides. The invention further relates to screening methods for identifying agonists and antagonists of polynucleotides and polypeptides of the invention. The present invention further relates to methods and/or compositions for inhibiting or enhancing the production and function of the polypeptides of the present invention.

### DETAILED DESCRIPTION

Polynucleotides and Polypeptides

Description of Table 1A

[0008] Table 1A summarizes information concerning certain polypnucleotides and polypeptides of the invention. The first column provides the gene number in the application for each clone identifier. The second column provides a unique clone identifier, “Clone ID NO:Z”, for a cDNA clone related to each contig sequence disclosed in Table 1A. Third column, the cDNA Clones identified in the second column were deposited as indicated in the third column (i.e. by ATCC Deposit Number and deposit date). Some of the deposits contain multiple different clones corresponding to the same gene. In the fourth column, “Vector” refers to the type of vector contained in the corresponding cDNA Clone identified in the second column. In the fifth column, the nucleotide sequence identified as “NT SEQ ID NO:X” was assembled from partially homologous (“overlapping”) sequences obtained from the corresponding cDNA clone identified in the second column and, in some cases, from additional related cDNA clones. The overlapping sequences were assembled into a single contiguous sequence of high redundancy (usually three to five overlapping sequences at each nucleotide position), resulting in a final sequence identified as SEQ ID NO:X. In the sixth column, “Total NT Seq.” refers to the total number of nucleotides in the contig sequence identified as SEQ ID NO:X.” The deposited clone may contain all or most of these sequences, reflected by the nucleotide position indicated as “5′ NT of Clone Seq.” (seventh column) and the “3′ NT of Clone Seq.” (eighth column) of SEQ ID NO:X. In the ninth column, the nucleotide position of SEQ ID NO:X of the putative start codon (methionine) is identified as “5′ NT of Start Codon.” Similarly, in column ten, the nucleotide position of SEQ ID NO:X of the predicted signal sequence is identified as “5′ NT of First AA of Signal Pep.” In the eleventh column, the translated amino acid sequence, beginning with the methionine, is identified as “AA SEQ ID NO:Y,” although other reading frames can also be routinely translated using known molecular biology techniques. The polypeptides produced by these alternative open reading frames are specifically contemplated by the present invention.

[0009] In the twelfth and thirteenth columns of Table 1A, the first and last amino acid position of SEQ ID NO:Y of the predicted signal peptide is identified as “First AA of Sig Pep” and “Last AA of Sig Pep.” In the fourteenth column, the predicted first amino acid position of SEQ ID NO:Y of the secreted portion is identified as “Predicted First AA of Secreted Portion”. The amino acid position of SEQ ID NO:Y of the last amino acid encoded by the open reading frame is identified in the fifteenth column as “Last AA of ORF”.

[0010] SEQ ID NO:X (where X may be any of the polynucleotide sequences disclosed in the sequence listing) and the translated SEQ ID NO:Y (where Y may be any of the polypeptide sequences disclosed in the sequence listing) are sufficiently accurate and otherwise suitable for a variety of uses well known in the art and described further below. For instance, SEQ ID NO:X is useful for designing nucleic acid hybridization probes that will detect nucleic acid sequences contained in SEQ ID NO:X or the cDNA contained in the deposited clone. These probes will also hybridize to nucleic acid molecules in biological samples, thereby enabling a variety of forensic and diagnostic methods of the invention. Similarly, polypeptides identified from SEQ ID NO:Y may be used, for example, to generate antibodies which bind specifically to proteins containing the polypeptides and the secreted proteins encoded by the cDNA clones identified in Table 1A and/or elsewhere herein

[0011] Nevertheless, DNA sequences generated by sequencing reactions can contain sequencing errors. The errors exist as misidentified nucleotides, or as insertions or deletions of nucleotides in the generated DNA sequence. The erroneously inserted or deleted nucleotides cause frame shifts in the reading frames of the predicted amino acid sequence. In these cases, the predicted amino acid sequence diverges from the actual amino acid sequence, even though the generated DNA sequence may be greater than 99.9% identical to the actual DNA sequence (for example, one base insertion or deletion in an open reading frame of over 1000 bases).

[0012] Accordingly, for those applications requiring precision in the nucleotide sequence or the amino acid sequence, the present invention provides not only the generated nucleotide sequence identified as SEQ ID NO:X, and the predicted translated amino acid sequence identified as SEQ ID NO:Y, but also a sample of plasmid DNA containing a human cDNA of the invention deposited with the ATCC, as set forth in Table 1A. The nucleotide sequence of each deposited plasmid can readily be determined by sequencing the deposited plasmid in accordance with known methods

[0013] The predicted amino acid sequence can then be verified from such deposits. Moreover, the amino acid sequence of the protein encoded by a particular plasmid can also be directly determined by peptide sequencing or by expressing the protein in a suitable host cell containing the deposited human cDNA, collecting the protein, and determining its sequence.

[0014] Also provided in Table 1A is the name of the vector which contains the cDNA plasmid. Each vector is routinely used in the art. The following additional information is provided for convenience.

[0015] Vectors Lambda Zap (U.S. Pat. Nos. 5,128,256 and 5,286,636), Uni-Zap XR (U.S. Pat. Nos. 5,128,256 and 5,286,636), Zap Express (U.S. Pat. Nos. 5,128,256 and 5,286,636), pBluescript (pBS) (Short, J. M. et al., Nucleic Acids Res. 16:7583-7600 (1988); Alting-Mees, M. A. and Short, J. M., Nucleic Acids Res. 17:9494 (1989)) and pBK (Alting-Mees, M. A. et al., Strategies 5:58-61 (1992)) are commercially available from Stratagene Cloning Systems, Inc., 11011 N. Torrey Pines Road, La Jolla, Calif., 92037. pBS contains an ampicillin resistance gene and pBK contains a neomycin resistance gene. Phagemid pBS may be excised from the Lambda Zap and Uni-Zap XR vectors, and phagemid pBK may be excised from the Zap Express vector. Both phagemids may be transformed into E. coli strain XL-1 Blue, also available from Stratagene

[0016] Vectors pSport1, pCMVSport 1.0, pCMVSport 2.0 and pCMVSport 3.0, were obtained from Life Technologies, Inc., P.O. Box 6009, Gaithersburg, Md. 20897. All Sport vectors contain an ampicillin resistance gene and may be transformed into E. coli strain DH10B, also available from Life Technologies. See, for instance, Gruber, C. E., et al., Focus 15:59 (1993). Vector lafmid BA (Bento Soares, Columbia University, New York, N.Y.) contains an ampicillin resistance gene and can be transformed into E. coli strain XL-1 Blue. Vector pCR®2.1, which is available from Invitrogen, 1600 Faraday Avenue, Carlsbad, Calif. 92008, contains an ampicillin resistance gene and may be transformed into E. coli strain DH10B, available from Life Technologies. See, for instance, Clark, J. M., Nuc. Acids Res. 16:9677-9686 (1988) and Mead, D. et al., Bio/Technology 9: (1991).

[0017] The present invention also relates to the genes corresponding to SEQ ID NO:X, SEQ ID NO:Y, and/or a deposited cDNA (cDNA Clone ID). The corresponding gene can be isolated in accordance with known methods using the sequence information disclosed herein. Such methods include, but are not limited to, preparing probes or primers from the disclosed sequence and identifying or amplifying the corresponding gene from appropriate sources of genomic material.

[0018] Also provided in the present invention are allelic variants, orthologs, and/or species homologs. Procedures known in the art can be used to obtain full-length genes, allelic variants, splice variants, full-length coding portions, orthologs, and/or species homologs of genes corresponding to SEQ ID NO:X and SEQ ID NO:Y using information from the sequences disclosed herein or the clones deposited with the ATCC. For example, allelic variants and/or species homologs may be isolated and identified by making suitable probes or primers from the sequences provided herein and screening a suitable nucleic acid source for allelic variants and/or the desired homologue.

[0019] The present invention provides a polynucleotide comprising, or alternatively consisting of, the nucleic acid sequence of SEQ ID NO:X and/or a cDNA contained in ATCC Deposit No. Z. The present invention also provides a polypeptide comprising, or alternatively, consisting of, the polypeptide sequence of SEQ ID NO:Y, a polypeptide encoded by SEQ ID NO:X, and/or a polypeptide encoded by a cDNA contained in ATCC deposit No. Z. Polynucleotides encoding a polypeptide comprising, or alternatively consisting of the polypeptide sequence of SEQ ID NO:Y, a polypeptide encoded by SEQ ID NO:X and/or a polypeptide encoded by the cDNA contained in ATCC Deposit No. Z, are also encompassed by the invention. The present invention further encompasses a polynucleotide comprising, or alternatively consisting of the complement of the nucleic acid sequence of SEQ ID NO:X, and/or the complement of the coding strand of the cDNA contained in ATCC Deposit No. Z.

Description of Table 1B

[0020] Table 1B summarizes some of the polynucleotides encompassed by the invention (including cDNA clones related to the sequences (Clone ID NO:Z), contig sequences (contig identifier (Contig ID:) and contig nucleotide sequence identifier (SEQ ID NO:X)) and further summarizes certain characteristics of these polynucleotides and the polypeptides encoded thereby. The first column provides the gene number in the application for each clone identifier. The second column provides a unique clone identifier, “Clone ID NO:Z”, for a cDNA clone related to each contig sequence disclosed in Table 1A and/or 1B. The third column provides a unique contig identifier, “Contig ID:” for each of the contig sequences disclosed in Table 1B. The fourth column provides the sequence identifier, “SEQ ID NO:X”, for each of the contig sequences disclosed in Table 1A and/or 1B. The fifth column, “ORF (From-To)”, provides the location (i.e., nucleotide position numbers) within the polynucleotide sequence of SEQ ID NO:X that delineate the preferred open reading frame (ORF) that encodes the amino acid sequence shown in the sequence listing and referenced in Table 1B as SEQ ID NO:Y (column 6). Column 7 lists residues comprising predicted epitopes contained in the polypeptides encoded by each of the preferred ORFs (SEQ ID NO:Y). Identification of potential immunogenic regions was performed according to the method of Jameson and Wolf (CABIOS, 4; 181-186 (1988)); specifically, the Genetics Computer Group (GCG) implementation of this algorithm, embodied in the program PEPTIDESTRUCTURE (Wisconsin Package v10.0, Genetics Computer Group (GCG), Madison, Wis.). This method returns a measure of the probability that a given residue is found on the surface of the protein. Regions where the antigenic index score is greater than 0.9 over at least 6 amino acids are indicated in Table 1B as “Predicted Epitopes”. In particular embodiments, polypeptides of the invention comprise, or alternatively consist of, one, two, three, four, five or more of the predicted epitopes described in Table 1B. It will be appreciated that depending on the analytical criteria used to predict antigenic determinants, the exact address of the determinant may vary slightly. Column 8, “Tissue Distribution” shows the expression profile of tissue, cells, and/or cell line libraries which express the polynucleotides of the invention. The first number in column 8 (preceding the colon), represents the tissue/cell source identifier code corresponding to the key provided in Table 4. Expression of these polynucleotides was not observed in the other tissues and/or cell libraries tested. For those identifier codes in which the first two letters are not “AR”, the second number in column 8 (following the colon), represents the number of times a sequence corresponding to the reference polynucleotide sequence (e.g., SEQ ID NO:X) was identified in the tissue/cell source. Those tissue/cell source identifier codes in which the first two letters are “AR” designate information generated using DNA array technology. Utilizing this technology, cDNAs were amplified by PCR and then transferred, in duplicate, onto the array. Gene expression was assayed through hybridization of first strand cDNA probes to the DNA array. cDNA probes were generated from total RNA extracted from a variety of different tissues and cell lines. Probe synthesis was performed in the presence of ³³P dCTP, using oligo(dT) to prime reverse transcription. After hybridization, high stringency washing conditions were employed to remove non-specific hybrids from the array. The remaining signal, emanating from each gene target, was measured using a Phosphorimager. Gene expression was reported as Phosphor Stimulating Luminescence (PSL) which reflects the level of phosphor signal generated from the probe hybridized to each of the gene targets represented on the array. A local background signal subtraction was performed before the total signal generated from each array was used to normalize gene expression between the different hybridizations. The value presented after “[array code]:” represents the mean of the duplicate values, following background subtraction and probe normalization. One of skill in the art could routinely use this information to identify normal and/or diseased tissue(s) which show a predominant expression pattern of the corresponding polynucleotide of the invention or to identify polynucleotides which show predominant and/or specific tissue and/or cell expression. Column 9 provides the chromosomal location of polynucleotides corresponding to SEQ ID NO:X. Chromosomal location was determined by finding exact matches to EST and cDNA sequences contained in the NCBI (National Center for Biotechnology Information) UniGene database. Given a presumptive chromosomal location, disease locus association was determined by comparison with the Morbid Map, derived from Online Mendelian Inheritance in Man (Online Mendelian Inheritance in Man, OMIM™. McKusick-Nathans Institute for Genetic Medicine, Johns Hopkins University (Baltimore, Md.) and National Center for Biotechnology Information, National Library of Medicine (Bethesda, Md.) 2000. World Wide Web URL: http://www.ncbi.nlm.nih.gov/omim/). If the putative chromosomal location of the Query overlaps with the chromosomal location of a Morbid Map entry, an OMIM identification number is disclosed in column 10 labeled “OMIM Disease Reference(s)”. A key to the OMIM reference identification numbers is provided in Table 5.

Description of Table 1C

[0021] Table 1C summarizes additional polynucleotides encompassed by the invention (including cDNA clones related to the sequences (Clone ID NO:Z), contig sequences (contig identifier (Contig ID:) contig nucleotide sequence identifiers (SEQ ID NO:X)), and genomic sequences (SEQ ID NO:B). The first column provides a unique clone identifier, “Clone ID NO:Z”, for a cDNA clone related to each contig sequence. The second column provides the sequence identifier, “SEQ ID NO:X”, for each contig sequence. The third column provides a unique contig identifier, “Contig ID:” for each contig sequence. The fourth column, provides a BAC identifier “BAC ID NO:A” for the BAC clone referenced in the corresponding row of the table. The fifth column provides the nucleotide sequence identifier, “SEQ ID NO:B” for a fragment of the BAC clone identified in column four of the corresponding row of the table. The sixth column, “Exon From-To”, provides the location (i.e., nucleotide position numbers) within the polynucleotide sequence of SEQ ID NO:B which delineate certain polynucleotides of the invention that are also exemplary members of polynucleotide sequences that encode polypeptides of the invention (e.g., polypeptides containing amino acid sequences encoded by the polynucleotide sequences delineated in column six, and fragments and variants thereof).

Description of Table 1D

[0022] Table 1D: In preferred embodiments, the present invention encompasses a method of treating a disease or disorder listed in the “FEATURES OF PROTEIN” sections (below) and also as listed in the “Preferred Indications” column of Table 1D (below); comprising administering to a patient in which such treatment, prevention, or amelioration is desired a protein, nucleic acid, or antibody of the invention (or fragment or variant thereof) represented by Table 1A and Table 1D (in the same row as the disease or disorder to be treated is listed in the “Preferred Indications” column of Table 1D) in an amount effective to treat, prevent, or ameliorate the disease or disorder.

[0023] As indicated in Table 1D, the polynucleotides, polypeptides, agonists, or antagonists of the present invention (including antibodies) can be used in assays to test for one or more biological activities. If these polynucleotides and polypeptides do exhibit activity in a particular assay, it is likely that these molecules may be involved in the diseases associated with the biological activity. Thus, the polynucleotides or polypeptides, or agonists or antagonists thereof (including antibodies) could be used to treat the associated disease.

[0024] The present invention encompasses methods of preventing, treating, diagnosing, or ameliorating a disease or disorder. In preferred embodiments, the present invention encompasses a method of treating a disease or disorder listed in the “Preferred Indications” column of Table 1D; comprising administering to a patient in which such treatment, prevention, or amelioration is desired a protein, nucleic acid, or antibody of the invention (or fragment or variant thereof) in an amount effective to treat, prevent, diagnose, or ameliorate the disease or disorder. The first and seccond columns of Table 1D show the “Gene No.” and “cDNA Clone ID No.”, respectively, indicating certain nucleic acids and proteins (or antibodies against the same) of the invention (including polynucleotide, polypeptide, and antibody fragments or variants thereof) that may be used in preventing, treating, diagnosing, or ameliorating the disease(s) or disorder(s) indicated in the corresponding row in Column 3 of Table 1D.

[0025] In another embodiment, the present invention also encompasses methods of preventing, treating, diagnosing, or ameliorating a disease or disorder listed in the “Preferred Indications” column of Table 1D; comprising administering to a patient combinations of the proteins, nucleic acids, or antibodies of the invention (or fragments or variants thereof), sharing similar indications as shown in the corresponding rows in Column 3 of Table 1D.

[0026] The “Preferred Indication” column describes diseases, disorders, and/or conditions that may be treated, prevented, diagnosed, or ameliorated by a protein, nucleic acid, or antibody of the invention (or fragment or variant thereof).

[0027] The recitation of “Cancer” in the “Preferred Indication” column indicates that the corresponding nucleic acid and protein, or antibody against the same, of the invention (or fragment or variant thereof) may be used for example, to diagnose, treat, prevent, and/or ameliorate diseases and/or disorders relating to neoplastic diseases (e.g., leukemias, cancers, and/or as described below under “Hyperproliferative Disorders”).

[0028] In specific embodiments, a protein, nucleic acid, or antibody of the invention (or fragment or variant thereof) having a “Cancer” recitation in the “Preferred Indication” column of Table 1D may be used for example, to diagnose, treat, prevent, and/or ameliorate a neoplasm located in a tissue selected from the group consisting of: colon, abdomen, bone, breast, digestive system, liver, pancreas, prostate, peritoneum, lung, blood (e.g., leukemia), endocrine glands (adrenal, parathyroid, pituitary, testicles, ovary, thymus, thyroid), uterus, eye, head and neck, nervous (central and peripheral), lymphatic system, pelvic, skin, soft tissue, spleen, thoracic, and urogenital.

[0029] In specific embodiments, a protein, nucleic acid, or antibody of the invention (or fragment or variant thereof) having a “Cancer” recitation in the “Preferred Indication” column of Table 1D, may be used for example, to diagnose, treat, prevent, and/or ameliorate a pre-neoplastic condition, selected from the group consisting of: hyperplasia (e.g., endometrial hyperplasia and/or as described in the section entitled “Hyperproliferative Disorders”), metaplasia (e.g., connective tissue metaplasia, atypical metaplasia, and/or as described in the section entitled “Hyperproliferative Disorders”), and/or dysplasia (e.g., cervical dysplasia, and bronchopulmonary dysplasia).

[0030] In another specific embodiment, a protein, nucleic acid, or antibody of the invention (or fragment or variant thereof) having a “Cancer” recitation in the “Preferred Indication” column of Table 1D, may be used for example, to diagnose, treat, prevent, and/or ameliorate a benign dysproliferative disorder selected from the group consisting of: benign tumors, fibrocystic conditions, tissue hypertrophy, and/or as described in the section entitled “Hyperproliferative Disorders”.

[0031] The recitation of “Immune/Hematopoietic” in the “Preferred Indication” column indicates that the corresponding nucleic acid and protein, or antibody against the same, of the invention (or fragment or variant thereof), may be used for example, to diagnose, treat, prevent, and/or ameliorate diseases and/or disorders relating to neoplastic diseases (e.g., as described below under “Hyperproliferative Disorders”), blood disorders (e.g., as described below under “Immune Activity” “Cardiovascular Disorders” and/or “Blood-Related Disorders”), and infections (e.g., as described below under “Infectious Disease”).

[0032] In specific embodiments, a protein, nucleic acid, or antibody of the invention (or fragment or variant thereof) having the “Immune/Hematopoietic” recitation in the “Preferred Indication” column of Table 1D, may be used for example, to diagnose, treat, prevent, and/or ameliorate a disease or disorder selected from the group consisting of: anemia, pancytopenia, leukopenia, thrombocytopenia, leukemias, Hodgkin's disease, non-Hodgkin's lymphoma, acute lymphocytic anemia (ALL), plasmacytomas, multiple myeloma, Burkitt's lymphoma, arthritis, asthma, AIDS, autoimmune disease, rheumatoid arthritis, granulomatous disease, immune deficiency, inflammatory bowel disease, sepsis, neutropenia, neutrophilia, psoriasis, immune reactions to transplanted organs and tissues, systemic lupus erythematosis, hemophilia, hypercoagulation, diabetes mellitus, endocarditis, meningitis, Lyme Disease, and allergies.

[0033] The recitation of “Reproductive” in the “Preferred Indication” column indicates that the corresponding nucleic acid and protein, or antibody against the same, of the invention (or fragment or variant thereof), may be used for example, to diagnose, treat, prevent, and/or ameliorate diseases and/or disorders relating to neoplastic diseases (e.g., as described below under “Hyperproliferative Disorders”), and disorders of the reproductive system (e.g., as described below under “Reproductive System Disorders”).

[0034] In specific embodiments, a protein, nucleic acid, or antibody of the invention (or fragment or variant thereof) having a “Reproductive” recitation in the “Preferred Indication” column of Table 1D, may be used for example, to diagnose, treat, prevent, and/or ameliorate a disease or disorder selected from the group consisting of: cryptorchism, prostatitis, inguinal hernia, varicocele, leydig cell tumors, verrucous carcinoma, prostatitis, malacoplakia, Peyronie's disease, penile carcinoma, squamous cell hyperplasia, dysmenorrhea, ovarian adenocarcinoma, Turner's syndrome, mucopurulent cervicitis, Sertoli-leydig tumors, ovarian cancer, uterine cancer, pelvic inflammatory disease, testicular cancer, prostate cancer, Klinefelter's syndrome, Young's syndrome, premature ejaculation, diabetes mellitus, cystic fibrosis, Kartagener's syndrome, testicular atrophy, testicular feminization, anorchia, ectopic testis, epididymitis, orchitis, gonorrhea, syphilis, testicular torsion, vasitis nodosa, germ cell tumors, stromal tumors, dysmenorrhea, retroverted uterus, endometriosis, fibroids, adenomyosis, anovulatory bleeding, amenorrhea, Cushing's syndrome, hydatidiform moles, Asherman's syndrome, premature menopause, precocious puberty, uterine polyps, dysfunctional uterine bleeding, cervicitis, chronic cervicitis, mucopurulent cervicitis, cervical dysplasia, cervical polyps, Nabothian cysts, cervical erosion, cervical incompetence, cervical neoplasms, pseudohermaphroditism, and premenstrual syndrome.

[0035] The recitation of “Musculoskeletal” in the “Preferred Indication” column indicates that the corresponding nucleic acid and protein, or antibody against the same, of the invention (or fragment or variant thereof), may be used for example, to diagnose, treat, prevent, and/or ameliorate diseases and/or disorders relating to neoplastic diseases (e.g., as described below under “Hyperproliferative Disorders”), and disorders of the immune system (e.g., as described below under “Immune Activity”).

[0036] In specific embodiments, a protein, nucleic acid, or antibody of the invention (or fragment or variant thereof) having a “Musculoskeletal” recitation in the “Preferred Indication” column of Table 1D, may be used for example, to diagnose, treat, prevent, and/or ameliorate a disease or disorder selected from the group consisting of: bone cancers (e.g., osteochondromas, benign chondromas, chondroblastoma, chondromyxoid fibromas, osteoid osteomas, giant cell tumors, multiple myeloma, osteosarcomas), Paget's Disease, rheumatoid arthritis, systemic lupus erythematosus, osteomyelitis, Lyme Disease, gout, bursitis, tendonitis, osteoporosis, osteoarthritis, muscular dystrophy, mitochondrial myopathy, cachexia, and multiple sclerosis.

[0037] The recitation of “Cardiovascular” in the “Preferred Indication” column indicates that the corresponding nucleic acid and protein, or antibody against the same, of the invention (or fragment or variant thereof), may be used for example, to diagnose, treat, prevent, and/or ameliorate diseases and/or disorders relating to neoplastic diseases (e.g., as described below under “Hyperproliferative Disorders”), and disorders of the cardiovascular system (e.g., as described below under “Cardiovascular Disorders”).

[0038] In specific embodiments, a protein, nucleic acid, or antibody of the invention (or fragment or variant thereof) having a “Cardiovascular” recitation in the “Preferred Indication” column of Table 1D, may be used for example, to diagnose, treat, prevent, and/or ameliorate a disease or disorder selected from the group consisting of: myxomas, fibromas, rhabdomyomas, cardiovascular abnormalities (e.g., congenital heart defects, cerebral arteriovenous malformations, septal defects), heart disease (e.g., heart failure, congestive heart disease, arrhythmia, tachycardia, fibrillation, pericardial Disease, endocarditis), cardiac arrest, heart valve disease (e.g., stenosis, regurgitation, prolapse), vascular disease (e.g., hypertension, coronary artery disease, angina, aneurysm, arteriosclerosis, peripheral vascular disease), hyponatremia, hypematremia, hypokalemia, and hyperkalemia.

[0039] The recitation of “Mixed Fetal” in the “Preferred Indication” column indicates that the corresponding nucleic acid and protein, or antibody against the same, of the invention (or fragment or variant thereof), may be used for example, to diagnose, treat, prevent, and/or ameliorate diseases and/or disorders relating to neoplastic diseases (e.g., as described below under “Hyperproliferative Disorders”).

[0040] In specific embodiments, a protein, nucleic acid, or antibody of the invention (or fragment or variant thereof) having a “Mixed Fetal” recitation in the “Preferred Indication” column of Table 1D, may be used for example, to diagnose, treat, prevent, and/or ameliorate a disease or disorder selected from the group consisting of: spina bifida, hydranencephaly, neurofibromatosis, fetal alcohol syndrome, diabetes mellitus, PKU, Down's syndrome, Patau syndrome, Edwards syndrome, Turner syndrome, Apert syndrome, Carpenter syndrome, Conradi syndrome, Crouzon syndrome, cutis laxa, Cornelia de Lange syndrome, Ellis-van Creveld syndrome, Holt-Oram syndrome, Kartagener syndrome, Meckel-Gruber syndrome, Noonan syndrome, Pallister-Hall syndrome, Rubinstein-Taybi syndrome, Scimitar syndrome, Smith-Lemli-Opitz syndrome, thromocytopenia-absent radius (TAR) syndrome, Treacher Collins syndrome, Williams syndrome, Hirschsprung's disease, Meckel's diverticulum, polycystic kidney disease, Turner's syndrome, and gonadal dysgenesis, Klippel-Feil syndrome, Ostogenesis imperfecta, muscular dystrophy, Tay-Sachs disease, Wilm's tumor, neuroblastoma, and retinoblastoma.

[0041] The recitation of “Excretory” in the “Preferred Indication” column indicates that the corresponding nucleic acid and protein, or antibody against the same, of the invention (or fragment or variant thereof), may be used for example, to diagnose, treat, prevent, and/or ameliorate diseases and/or disorders relating to neoplastic diseases (e.g., as described below under “Hyperproliferative Disorders”) and renal disorders (e.g., as described below under “Renal Disorders”).

[0042] In specific embodiments, a protein, nucleic acid, or antibody of the invention (or fragment or variant thereof) having a “Excretory” recitation in the “Preferred Indication” column of Table 1D, may be used for example, to diagnose, treat, prevent, and/or ameliorate a disease or disorder selected from the group consisting of: bladder cancer, prostate cancer, benign prostatic hyperplasia, bladder disorders (e.g., urinary incontinence, urinary retention, urinary obstruction, urinary tract Infections, interstitial cystitis, prostatitis, neurogenic bladder, hematuria), renal disorders (e.g., hydronephrosis, proteinuria, renal failure, pyelonephritis, urolithiasis, reflux nephropathy, and unilateral obstructive uropathy).

[0043] The recitation of “Neural/Sensory” in the “Preferred Indication” column indicates that the corresponding nucleic acid and protein, or antibody against the same, of the invention (or fragment or variant thereof), may be used for example, to diagnose, treat, prevent, and/or ameliorate diseases and/or disorders relating to neoplastic diseases (e.g., as described below under “Hyperproliferative Disorders”) and diseases or disorders of the nervous system (e.g., as described below under “Neural Activity and Neurological Diseases”).

[0044] In specific embodiments, a protein, nucleic acid, or antibody of the invention (or fragment or variant thereof) having a “Neural/Sensory” recitation in the “Preferred Indication” column of Table 1D, may be used for example, to diagnose, treat, prevent, and/or ameliorate a disease or disorder selected from the group consisting of: brain cancer (e.g., brain stem glioma, brain tumors, central nervous system (Primary) lymphoma, central nervous system lymphoma, cerebellar astrocytoma, and cerebral astrocytoma, neurodegenerative disorders (e.g., Alzheimer's Disease, Creutzfeldt-Jakob Disease, Parkinson's Disease, and Idiopathic Presenile Dementia), encephalomyelitis, cerebral malaria, meningitis, metabolic brain diseases (e.g., phenylketonuria and pyruvate carboxylase deficiency), cerebellar ataxia, ataxia telangiectasia, and AIDS Dementia Complex, schizophrenia, attention deficit disorder, hyperactive attention deficit disorder, autism, and obsessive compulsive disorders.

[0045] The recitation of “Respiratory” in the “Preferred Indication” column indicates that the corresponding nucleic acid and protein, or antibody against the same, of the invention (or fragment or variant thereof), may be used for example, to diagnose, treat, prevent, and/or ameliorate diseases and/or disorders relating to neoplastic diseases (e.g., as described below under “Hyperproliferative Disorders”) and diseases or disorders of the respiratory system (e.g., as described below under “Respiratory Disorders”).

[0046] In specific embodiments, a protein, nucleic acid, or antibody of the invention (or fragment or variant thereof) having a “Respiratory” recitation in the “Preferred Indication” column of Table 1D, may be used for example, to diagnose, treat, prevent, and/or ameliorate a disease or disorder selected from the group consisting of: cancers of the respiratory system such as larynx cancer, pharynx cancer, trachea cancer, epiglottis cancer, lung cancer, squamous cell carcinomas, small cell (oat cell) carcinomas, large cell carcinomas, and adenocarcinomas. Allergic reactions, cystic fibrosis, sarcoidosis, histiocytosis X, infiltrative lung diseases (e.g., pulmonary fibrosis and lymphoid interstitial pneumonia), obstructive airway diseases (e.g., asthma, emphysema, chronic or acute bronchitis), occupational lung diseases (e.g., silicosis and asbestosis), pneumonia, and pleurisy.

[0047] The recitation of “Endocrine” in the “Preferred Indication” column indicates that the corresponding nucleic acid and protein, or antibody against the same, of the invention (or fragment or variant thereof), may be used for example, to diagnose, treat, prevent, and/or ameliorate diseases and/or disorders relating to neoplastic diseases (e.g., as described below under “Hyperproliferative Disorders”) and diseases or disorders of the respiratory system (e.g., as described below under “Respiratory Disorders”), renal disorders (e.g., as described below under “Renal Disorders”), and disorders of the endocrine system (e.g., as described below under “Endocrine Disorders”.

[0048] In specific embodiments, a protein, nucleic acid, or antibody of the invention (or fragment or variant thereof) having an “Endocrine” recitation in the “Preferred Indication” column of Table 1D, may be used for example, to diagnose, treat, prevent, and/or ameliorate a disease or disorder selected from the group consisting of: cancers of endocrine tissues and organs (e.g., cancers of the hypothalamus, pituitary gland, thyroid gland, parathyroid glands, pancreas, adrenal glands, ovaries, and testes), diabetes (e.g., diabetes insipidus, type I and type II diabetes mellitus), obesity, disorders related to pituitary glands (e.g., hyperpituitarism, hypopituitarism, and pituitary dwarfism), hypothyroidism, hyperthyroidism, goiter, reproductive disorders (e.g. male and female infertility), disorders related to adrenal glands (e.g., Addison's Disease, corticosteroid deficiency, and Cushing's Syndrome), kidney cancer (e.g., hypernephroma, transitional cell cancer, and Wilm's tumor), diabetic nephropathy, interstitial nephritis, polycystic kidney disease, glomerulonephritis (e.g., IgM mesangial proliferative glomerulonephritis and glomerulonephritis caused by autoimmune disorders; such as Goodpasture's syndrome), and nephrocalcinosis.

[0049] The recitation of “Digestive” in the “Preferred Indication” column indicates that the corresponding nucleic acid and protein, or antibody against the same, of the invention (or fragment or variant thereof), may be used for example, to diagnose, treat, prevent, and/or ameliorate diseases and/or disorders relating to neoplastic diseases (e.g., as described below under “Hyperproliferative Disorders”) and diseases or disorders of the gastrointestinal system (e.g., as described below under “Gastrointestinal Disorders”.

[0050] In specific embodiments, a protein, nucleic acid, or antibody of the invention (or fragment or variant thereof) having a “Digestive” recitation in the “Preferred Indication” column of Table 1D, may be used for example, to diagnose, treat, prevent, and/or ameliorate a disease or disorder selected from the group consisting of: ulcerative colitis, appendicitis, Crohn's disease, hepatitis, hepatic encephalopathy, portal hypertension, cholelithiasis, cancer of the digestive system (e.g., biliary tract cancer, stomach cancer, colon cancer, gastric cancer, pancreatic cancer, cancer of the bile duct, tumors of the colon (e.g., polyps or cancers), and cirrhosis), pancreatitis, ulcerative disease, pyloric stenosis, gastroenteritis, gastritis, gastric atropy, benign tumors of the duodenum, distension, irritable bowel syndrome, malabsorption, congenital disorders of the small intestine, bacterial and parasitic infection, megacolon, Hirschsprung's disease, aganglionic megacolon, acquired megacolon, colitis, anorectal disorders (e.g., anal fistulas, hemorrhoids), congenital disorders of the liver (e.g., Wilson's disease, hemochromatosis, cystic fibrosis, biliary atresia, and alpha1-antitrypsin deficiency), portal hypertension, cholelithiasis, and jaundice.

[0051] The recitation of “Connective/Epithelial” in the “Preferred Indication” column indicates that the corresponding nucleic acid and protein, or antibody against the same, of the invention (or fragment or variant thereof), may be used for example, to diagnose, treat, prevent, and/or ameliorate diseases and/or disorders relating to neoplastic diseases (e.g., as described below under “Hyperproliferative Disorders”), cellular and genetic abnormalities (e.g., as described below under “Diseases at the Cellular Level” ), angiogenesis (e.g., as described below under “Anti-Angiogenesis Activity”), and or to promote or inhibit regeneration (e.g., as described below under “Regeneration”), and wound healing (e.g., as described below under “Wound Healing and Epithelial Cell Proliferation”).

[0052] In specific embodiments, a protein, nucleic acid, or antibody of the invention (or fragment or variant thereof) having a “Connective/Epithelial” recitation in the “Preferred Indication” column of Table 1D, may be used for example, to diagnose, treat, prevent, and/or ameliorate a disease or disorder selected from the group consisting of: connective tissue metaplasia, mixed connective tissue disease, focal epithelial hyperplasia, epithelial metaplasia, mucoepithelial dysplasia, graft v. host disease, polymyositis, cystic hyperplasia, cerebral dysplasia, tissue hypertrophy, Alzheimer's disease, lymphoproliferative disorder, Waldenstron's macroglobulinemia, Crohn's disease, pernicious anemia, idiopathic Addison's disease, glomerulonephritis, bullous pemphigoid, Sjogren's syndrome, diabetes mellitus, cystic fibrosis, osteoblastoma, osteoclastoma, osteosarcoma, chondrosarcoma, osteoporosis, osteocarthritis, periodontal disease, wound healing, relapsing polychondritis, vasculitis, polyarteritis nodosa, Wegener's granulomatosis, cellulitis, rheumatoid arthritis, psoriatic arthritis, discoid lupus erythematosus, systemic lupus erythematosus, scleroderma, CREST syndrome, Sjogren's syndrome, polymyositis, dermatomyositis, mixed connective tissue disease, relapsing polychondritis, vasculitis, Henoch-Schonlein syndrome, erythema nodosum, polyarteritis nodosa, temporal (giant cell) arteritis, Takayasu's arteritis, Wegener's granulomatosis, Reiter's syndrome, Behcet's syndrome, ankylosing spondylitis, cellulitis, keloids, Ehler Danlos syndrome, Marfan syndrome, pseudoxantoma elasticum, osteogenese imperfecta, chondrodysplasias, epidermolysis bullosa, Alport syndrome, and cutis laxa.

Description of Table 2

[0053] Table 2 summarizes homology and features of some of the polypeptides of the invention. The first column provides a unique clone identifier, “Clone ID NO:Z”, corresponding to a cDNA clone disclosed in Table 1A or 1B. The second column provides the unique contig identifier, “Contig ID:” corresponding to contigs in Table 1B and allowing for correlation with the information in Table 1B. The third column provides the sequence identifier, “SEQ ID NO:X”, for the contig polynucleotide sequence. The fourth column provides the analysis method by which the homology/identity disclosed in the Table was determined. Comparisons were made between polypeptides encoded by the polynucleotides of the invention and either a non-redundant protein database (herein referred to as “NR”), or a database of protein families (herein referred to as “PFAM”) as further described below. The fifth column provides a description of the PFAM/NR hit having a significant match to a polypeptide of the invention. Column six provides the accession number of the PFAM/NR hit disclosed in the fifth column. Column seven, “Score/Percent Identity”, provides a quality score or the percent identity, of the hit disclosed in columns five and six. Columns 8 and 9, “NT From” and “NT To” respectively, delineate the polynucleotides in “SEQ ID NO:X” that encode a polypeptide having a significant match to the PFAM/NR database as disclosed in the fifth and sixth columns. In specific embodiments polypeptides of the invention comprise, or alternatively consist of, an amino acid sequence encoded by a polynucleotide in SEQ ID NO:X as delineated in columns 8 and 9, or fragments or variants thereof.

Description of Table 3

[0054] Table 3 provides polynucleotide sequences that may be disclaimed according to certain embodiments of the invention. The first column provides a unique clone identifier, “Clone ID”, for a cDNA clone related to contig sequences disclosed in Table 1B. The second column provides the sequence identifier, “SEQ ID NO:X”, for contig sequences disclosed in Table 1A and/or 1B. The third column provides the unique contig identifier, “Contig ID:”, for contigs disclosed in Table 1B. The fourth column provides a unique integer ‘a’ where ‘a’ is any integer between 1 and the final nucleotide minus 15 of SEQ ID NO:X, and the fifth column provides a unique integer ‘b’ where ‘b’ is any integer between 15 and the final nucleotide of SEQ ID NO:X, where both a and b correspond to the positions of nucleotide residues shown in SEQ ID NO:X, and where b is greater than or equal to a +14. For each of the polynucleotides shown as SEQ ID NO:X, the uniquely defined integers can be substituted into the general formula of a-b, and used to describe polynucleotides which may be preferably excluded from the invention. In certain embodiments, preferably excluded from the invention are at least one, two, three, four, five, ten, or more of the polynucleotide sequence(s) having the accession number(s) disclosed in the sixth column of this Table (including for example, published sequence in connection with a particular BAC clone). In further embodiments, preferably excluded from the invention are the specific polynucleotide sequence(s) contained in the clones corresponding to at least one, two, three, four, five, ten, or more of the available material having the accession numbers identified in the sixth column of this Table (including for example, the actual sequence contained in an identified BAC clone).

Description of Table 4

[0055] Table 4 provides a key to the tissue/cell source identifier code disclosed in Table 1B, column 8. Column 1 provides the tissue/cell source identifier code disclosed in Table 1B, Column 8. Columns 2-5 provide a description of the tissue or cell source. Codes corresponding to diseased tissues are indicated in column 6 with the word “disease”. The use of the word “disease” in column 6 is non-limiting. The tissue or cell source may be specific (e.g. a neoplasm), or may be disease-associated (e.g., a tissue sample from a normal portion of a diseased organ). Furthermore, tissues and/or cells lacking the “disease” designation may still be derived from sources directly or indirectly involved in a disease state or disorder, and therefore may have a further utility in that disease state or disorder. In numerous cases where the tissue/cell source is a library, column 7 identifies the vector used to generate the library.

Description of Table 5

[0056] Table 5 provides a key to the OMIM reference identification numbers disclosed in Table 1B, column 10. OMIM reference identification numbers (Column 1) were derived from Online Mendelian Inheritance in Man (Online Mendelian Inheritance in Man, OMIM. McKusick-Nathans Institute for Genetic Medicine, Johns Hopkins University (Baltimore, Md.) and National Center for Biotechnology Information, National Library of Medicine, (Bethesda, Md.) 2000. World Wide Web URL: http://www.ncbi.nlm.nih.gov/omim/). Column 2 provides diseases associated with the cytologic band disclosed in Table 1B, column 9, as determined using the Morbid Map database.

Description of Table 6

[0057] Table 6 summarizes some of the ATCC Deposits, Deposit dates, and ATCC designation numbers of deposits made with the ATCC in connection with the present application. These deposits were made in addition to those described in the Table 1A.

Description of Table 7

[0058] Table 7 shows the cDNA libraries sequenced, and ATCC designation numbers and vector information relating to these cDNA libraries.

[0059] The first column shows the first four letters indicating the Library from which each library clone was derived. The second column indicates the catalogued tissue description for the corresponding libraries. The third column indicates the vector containing the corresponding clones. The fourth column shows the ATCC deposit designation for each libray clone as indicated by the deposit information in Table 6.

Definitions

[0060] The following definitions are provided to facilitate understanding of certain terms used throughout this specification.

[0061] In the present invention, “isolated” refers to material removed from its original environment (e.g., the natural environment if it is naturally occurring), and thus is altered “by the hand of man” from its natural state. For example, an isolated polynucleotide could be part of a vector or a composition of matter, or could be contained within a cell, and still be “isolated” because that vector, composition of matter, or particular cell is not the original environment of the polynucleotide. The term “isolated” does not refer to genomic or cDNA libraries, whole cell total or mRNA preparations, genomic DNA preparations (including those separated by electrophoresis and transferred onto blots), sheared whole cell genomic DNA preparations or other compositions where the art demonstrates no distinguishing features of the polynucleotide/sequences of the present invention.

[0062] In the present invention, a “secreted” protein refers to those proteins capable of being directed to the ER, secretory vesicles, or the extracellular space as a result of a signal sequence, as well as those proteins released into the extracellular space without necessarily containing a signal sequence. If the secreted protein is released into the extracellular space, the secreted protein can undergo extracellular processing to produce a “mature” protein. Release into the extracellular space can occur by many mechanisms, including exocytosis and proteolytic cleavage.

[0063] As used herein, a “polynucleotide” refers to a molecule having a nucleic acid sequence encoding SEQ ID NO:Y or a fragment or variant thereof (e.g., the polypeptide delinated in columns fourteen and fifteen of Table 1A); a nucleic acid sequence contained in SEQ ID NO:X (as described in column 5 of Table 1A and/or column 3 of Table 1B) or the complement thereof; a cDNA sequence contained in Clone ID NO:Z (as described in column 2 of Table 1A and/or 1B and contained within a library deposited with the ATCC); a nucleotide sequence encoding the polypeptide encoded by a nucleotide sequence in SEQ ID NO:B as defined in column 6 (EXON From-To) of Table 1C or a fragment or variant thereof; or a nucleotide coding sequence in SEQ ID NO:B as defined in column 6 of Table 1C or the complement thereof. For example, the polynucleotide can contain the nucleotide sequence of the full length cDNA sequence, including the 5′ and 3′ untranslated sequences, the coding region, as well as fragments, epitopes, domains, and variants of the nucleic acid sequence. Moreover, as used herein, a “polypeptide” refers to a molecule having an amino acid sequence encoded by a polynucleotide of the invention as broadly defined (obviously excluding poly-Phenylalanine or poly-Lysine peptide sequences which result from translation of a polyA tail of a sequence corresponding to a cDNA).

[0064] In the present invention, “SEQ ID NO:X” was often generated by overlapping sequences contained in multiple clones (contig analysis). A representative clone containing all or most of the sequence for SEQ ID NO:X is deposited at Human Genome Sciences, Inc. (HGS) in a catalogued and archived library. As shown, for example, in column 2 of Table 1B, each clone is identified by a cDNA Clone ID (identifier generally referred to herein as Clone ID NO:Z). Each Clone ID is unique to an individual clone and the Clone ID is all the information needed to retrieve a given clone from the HGS library. Table 7 provides a list of the deposited cDNA libraries. One can use the Clone ID NO:Z to determine the library source by reference to Tables 6 and 7. Table 7 lists the deposited cDNA libraries by name and links each library to an ATCC Deposit. Library names contain four characters, for example, “HTWE.” The name of a cDNA clone (Clone ID) isolated from that library begins with the same four characters, for example “HTWEP07”. As mentioned below, Table 1A and/or 1B correlates the Clone ID names with SEQ ID NO:X. Thus, starting with an SEQ ID NO:X, one can use Tables 1A, 1B, 6, 7, and 9 to determine the corresponding Clone ID, which library it came from and which ATCC deposit the library is contained in. Furthermore, it is possible to retrieve a given cDNA clone from the source library by techniques known in the art and described elsewhere herein. The ATCC is located at 10801 University Boulevard, Manassas, Va. 20110-2209, USA. The ATCC deposits were made pursuant to the terms of the Budapest Treaty on the international recognition of the deposit of microorganisms for the purposes of patent procedure.

[0065] In specific embodiments, the polynucleotides of the invention are at least 15, at least 30, at least 50, at least 100, at least 125, at least 500, or at least 1000 continuous nucleotides but are less than or equal to 300 kb, 200 kb, 100 kb, 50 kb, 15 kb, 10 kb, 7.5 kb, 5 kb, 2.5 kb, 2.0 kb, or 1 kb, in length. In a further embodiment, polynucleotides of the invention comprise a portion of the coding sequences, as disclosed herein, but do not comprise all or a portion of any intron. In another embodiment, the polynucleotides comprising coding sequences do not contain coding sequences of a genomic flanking gene (i.e., 5′ or 3′ to the gene of interest in the genome). In other embodiments, the polynucleotides of the invention do not contain the coding sequence of more than 1000, 500, 250, 100, 50, 25, 20, 15, 10, 5, 4, 3, 2, or 1 genomic flanking gene(s).

[0066] A “polynucleotide” of the present invention also includes those polynucleotides capable of hybridizing, under stringent hybridization conditions, to sequences contained in SEQ ID NO:X, or the complement thereof (e.g., the complement of any one, two, three, four, or more of the polynucleotide fragments described herein), the polynucleotide sequence delineated in columns 7 and 8 of Table 1A or the complement thereof, the polynucleotide sequence delineated in columns 8 and 9 of Table 2 or the complement thereof, and/or cDNA sequences contained in Clone ID NO:Z (e.g., the complement of any one, two, three, four, or more of the polynucleotide fragments, or the cDNA clone within the pool of cDNA clones deposited with the ATCC, described herein), and/or the polynucleotide sequence delineated in column 6 of Table 1C or the complement thereof. “Stringent hybridization conditions” refers to an overnight incubation at 42 degree C. in a solution comprising 50% formamide, 5×SSC (750 mM NaCl, 75 mM trisodium citrate), 50 mM sodium phosphate (pH 7.6), 5× Denhardt's solution, 10% dextran sulfate, and 20 μg/ml denatured, sheared salmon sperm DNA, followed by washing the filters in 0.1×SSC at about 65 degree C.

[0067] Also contemplated are nucleic acid molecules that hybridize to the polynucleotides of the present invention at lower stringency hybridization conditions. Changes in the stringency of hybridization and signal detection are primarily accomplished through the manipulation of formamide concentration (lower percentages of formamide result in lowered stringency); salt conditions, or temperature. For example, lower stringency conditions include an overnight incubation at 37 degree C. in a solution comprising 6×SSPE (20×SSPE=3M NaCl; 0.2M NaH₂PO₄; 0.02M EDTA, pH 7.4), 0.5% SDS, 30% formamide, 100 ug/ml salmon sperm blocking DNA; followed by washes at 50 degree C. with 1×SSPE, 0.1% SDS. In addition, to achieve even lower stringency, washes performed following stringent hybridization can be done at higher salt concentrations (e.g. 5×SSC).

[0068] Note that variations in the above conditions may be accomplished through the inclusion and/or substitution of alternate blocking reagents used to suppress background in hybridization experiments. Typical blocking reagents include Denhardt's reagent, BLOTTO, heparin, denatured salmon sperm DNA, and commercially available proprietary formulations. The inclusion of specific blocking reagents may require modification of the hybridization conditions described above, due to problems with compatibility.

[0069] Of course, a polynucleotide which hybridizes only to polyA+ sequences (such as any 3′ terminal polyA+ tract of a cDNA shown in the sequence listing), or to a complementary stretch of T (or U) residues, would not be included in the definition of “polynucleotide,” since such a polynucleotide would hybridize to any nucleic acid molecule containing a poly (A) stretch or the complement thereof (e.g., practically any double-stranded cDNA clone generated using oligo dT as a primer).

[0070] The polynucleotide of the present invention can be composed of any polyribonucleotide or polydeoxribonucleotide, which may be unmodified RNA or DNA or modified RNA or DNA. For example, polynucleotides can be composed of single- and double-stranded DNA, DNA that is a mixture of single- and double-stranded regions, single- and double-stranded RNA, and RNA that is mixture of single- and double-stranded regions, hybrid molecules comprising DNA and RNA that may be single-stranded or, more typically, double-stranded or a mixture of single- and double-stranded regions. In addition, the polynucleotide can be composed of triple-stranded regions comprising RNA or DNA or both RNA and DNA. A polynucleotide may also contain one or more modified bases or DNA or RNA backbones modified for stability or for other reasons. “Modified” bases include, for example, tritylated bases and unusual bases such as inosine. A variety of modifications can be made to DNA and RNA; thus, “polynucleotide” embraces chemically, enzymatically, or metabolically modified forms.

[0071] In specific embodiments, the polynucleotides of the invention are at least 15, at least 30, at least 50, at least 100, at least 125, at least 500, or at least 1000 continuous nucleotides but are less than or equal to 300 kb, 200 kb, 100 kb, 50 kb, 15 kb, 10 kb, 7.5 kb, 5 kb, 2.5 kb, 2.0 kb, or 1 kb, in length. In a further embodiment, polynucleotides of the invention comprise a portion of the coding sequences, as disclosed herein, but do not comprise all or a portion of any intron. In another embodiment, the polynucleotides comprising coding sequences do not contain coding sequences of a genomic flanking gene (i.e., 5′ or 3′ to the gene of interest in the genome). In other embodiments, the polynucleotides of the invention do not contain the coding sequence of more than 1000, 500, 250, 100, 50, 25, 20, 15, 10, 5, 4, 3, 2, or 1 genomic flanking gene(s).

[0072] “SEQ ID NO:X” refers to a polynucleotide sequence described in column 5 of Table 1A, while “SEQ ID NO:Y” refers to a polypeptide sequence described in column 10 of Table 1A. SEQ ID NO:X is identified by an integer specified in column 6 of Table 1A. The polypeptide sequence SEQ ID NO:Y is a translated open reading frame (ORF) encoded by polynucleotide SEQ ID NO:X. The polynucleotide sequences are shown in the sequence listing immediately followed by all of the polypeptide sequences. Thus, a polypeptide sequence corresponding to polynucleotide sequence SEQ ID NO:2 is the first polypeptide sequence shown in the sequence listing. The second polypeptide sequence corresponds to the polynucleotide sequence shown as SEQ ID NO:3, and so on.

[0073] The polypeptide of the present invention can be composed of amino acids joined to each other by peptide bonds or modified peptide bonds, i.e., peptide isosteres, and may contain amino acids other than the 20 gene-encoded amino acids. The polypeptides may be modified by either natural processes, such as posttranslational processing, or by chemical modification techniques which are well known in the art. Such modifications are well described in basic texts and in more detailed monographs, as well as in a voluminous research literature. Modifications can occur anywhere in a polypeptide, including the peptide backbone, the amino acid side-chains and the amino or carboxyl termini. It will be appreciated that the same type of modification may be present in the same or varying degrees at several sites in a given polypeptide. Also, a given polypeptide may contain many types of modifications. Polypeptides may be branched, for example, as a result of ubiquitination, and they may be cyclic, with or without branching. Cyclic, branched, and branched cyclic polypeptides may result from posttranslation natural processes or may be made by synthetic methods. Modifications include acetylation, acylation, ADP-ribosylation, amidation, covalent attachment of flavin, covalent attachment of a heme moiety, covalent attachment of a nucleotide or nucleotide derivative, covalent attachment of a lipid or lipid derivative, covalent attachment of phosphotidylinositol, cross-linking, cyclization, disulfide bond formation, demethylation, formation of covalent cross-links, formation of cysteine, formation of pyroglutamate, formylation, gamma-carboxylation, glycosylation, GPI anchor formation, hydroxylation, iodination, methylation, myristoylation, oxidation, pegylation, proteolytic processing, phosphorylation, prenylation, racemization, selenoylation, sulfation, transfer-RNA mediated addition of amino acids to proteins such as arginylation, and ubiquitination. (See, for instance, PROTEINS—STRUCTURE AND MOLECULAR PROPERTIES, 2nd Ed., T. E. Creighton, W.H. Freeman and Company, New York (1993); POSTTRANSLATIONAL COVALENT MODIFICATION OF PROTEINS, B. C. Johnson, Ed., Academic Press, New York, pgs. 1-12 (1983); Seifter et al., Meth. Enzymol. 182:626-646 (1990); Rattan et al., Ann. N.Y. Acad. Sci. 663:48-62 (1992)).

[0074] “SEQ ID NO:X” refers to a polynucleotide sequence described, for example, in Tables 1A, 1B or 2, while “SEQ ID NO:Y” refers to a polypeptide sequence described in column 11 of Table 1A and or column 6 of Table 1B. SEQ ID NO:X is identified by an integer specified in column 4 of Table 1B. The polypeptide sequence SEQ ID NO:Y is a translated open reading frame (ORF) encoded by polynucleotide SEQ ID NO:X. “Clone ID NO:Z” refers to a cDNA clone described in column 2 of Table 1A and/or 1B.

[0075] “A polypeptide having functional activity” refers to a polypeptide capable of displaying one or more known functional activities associated with a full-length (complete) protein. Such functional activities include, but are not limited to, biological activity, antigenicity [ability to bind (or compete with a polypeptide for binding) to an anti-polypeptide antibody], immunogenicity (ability to generate antibody which binds to a specific polypeptide of the invention), ability to form multimers with polypeptides of the invention, and ability to bind to a receptor or ligand for a polypeptide.

[0076] The polypeptides of the invention can be assayed for functional activity (e.g. biological activity) using or routinely modifying assays known in the art, as well as assays described herein. Specifically, one of skill in the art may routinely assay secreted polypeptides (including fragments and variants) of the invention for activity using assays as described in the examples section below.

[0077] “A polypeptide having biological activity” refers to a polypeptide exhibiting activity similar to, but not necessarily identical to, an activity of a polypeptide of the present invention, including mature forms, as measured in a particular biological assay, with or without dose dependency. In the case where dose dependency does exist, it need not be identical to that of the polypeptide, but rather substantially similar to the dose-dependence in a given activity as compared to the polypeptide of the present invention (i.e., the candidate polypeptide will exhibit greater activity or not more than about 25-fold less and, preferably, not more than about tenfold less activity, and most preferably, not more than about three-fold less activity relative to the polypeptide of the present invention).

LENGTHY TABLE REFERENCED HERE
US20070048818A1-20070301-T00001
Please refer to the end of the specification for access instructions.

LENGTHY TABLE REFERENCED HERE
US20070048818A1-20070301-T00002
Please refer to the end of the specification for access instructions.

[0078] The first column in Table 1B provides the gene number in the application corresponding to the clone identifier. The second column in Table 1B provides a unique “Clone ID NO:Z” for a cDNA clone related to each contig sequence disclosed in Table 1B. This clone ID references the cDNA clone which contains at least the 5′ most sequence of the assembled contig and at least a portion of SEQ ID NO:X was determined by directly sequencing the referenced clone. The reference clone may have more sequence than described in the sequence listing or the clone may have less. In the vast majority of cases, however, the clone is believed to encode a full-length polypeptide. In the case where a clone is not full-length, a full-length cDNA can be obtained by methods described elsewhere herein.

[0079] The third column in Table 1B provides a unique “Contig ID” identification for each contig sequence. The fourth column provides the “SEQ ID NO:” identifier for each of the contig polynucleotide sequences disclosed in Table 1B. The fifth column, “ORF (From-To)”, provides the location (i.e., nucleotide position numbers) within the polynucleotide sequence “SEQ ID NO:X” that delineate the preferred open reading frame (ORF) shown in the sequence listing and referenced in Table 1B, column 6, as SEQ ID NO:Y. Where the nucleotide position number “To” is lower than the nucleotide position number “From”, the preferred ORF is the reverse complement of the referenced polynucleotide sequence.

[0080] The sixth column in Table 1B provides the corresponding SEQ ID NO:Y for the polypeptide sequence encoded by the preferred ORF delineated in column 5. In one embodiment, the invention provides an amino acid sequence comprising, or alternatively consisting of, a polypeptide encoded by the portion of SEQ ID NO:X delineated by “ORF (From-To)”. Also provided are polynucleotides encoding such amino acid sequences and the complementary strand thereto.

[0081] Column 7 in Table 1B lists residues comprising epitopes contained in the polypeptides encoded by the preferred ORF (SEQ ID NO:Y), as predicted using the algorithm of Jameson and Wolf, (1988) Comp. Appl. Biosci. 4:181-186. The Jameson-Wolf antigenic analysis was performed using the computer program PROTEAN (Version 3.11 for the Power MacIntosh, DNASTAR, Inc., 1228 South Park Street Madison, Wis.). In specific embodiments, polypeptides of the invention comprise, or alternatively consist of, at least one, two, three, four, five or more of the predicted epitopes as described in Table 1B. It will be appreciated that depending on the analytical criteria used to predict antigenic determinants, the exact address of the determinant may vary slightly.

[0082] Column 8, in Table 1B, provides an expression profile and library code: count for each of the contig sequences (SEQ ID NO:X) disclosed in Table 1B, which can routinely be combined with the information provided in Table 4 and used to determine the tissues, cells, and/or cell line libraries which predominantly express the polynucleotides of the invention. The first number in column 8 (preceding the colon), represents the tissue/cell source identifier code corresponding to the code and description provided in Table 4. For those identifier codes in which the first two letters are not “AR”, the second number in column 8 (following the colon) represents the number of times a sequence corresponding to the reference polynucleotide sequence was identified in the tissue/cell source. Those tissue/cell source identifier codes in which the first two letters are “AR” designate information generated using DNA array technology. Utilizing this technology, cDNAs were amplified by PCR and then transferred, in duplicate, onto the array. Gene expression was assayed through hybridization of first strand cDNA probes to the DNA array. cDNA probes were generated from total RNA extracted from a variety of different tissues and cell lines. Probe synthesis was performed in the presence of ³³P dCTP, using oligo(dT) to prime reverse transcription. After hybridization, high stringency washing conditions were employed to remove non-specific hybrids from the array. The remaining signal, emanating from each gene target, was measured using a Phosphorimager. Gene expression was reported as Phosphor Stimulating Luminescence (PSL) which reflects the level of phosphor signal generated from the probe hybridized to each of the gene targets represented on the array. A local background signal subtraction was performed before the total signal generated from each array was used to normalize gene expression between the different hybridizations. The value presented after “[array code]:” represents the mean of the duplicate values, following background subtraction and probe normalization. One of skill in the art could routinely use this information to identify normal and/or diseased tissue(s) which show a predominant expression pattern of the corresponding polynucleotide of the invention or to identify polynucleotides which show predominant and/or specific tissue and/or cell expression.

[0083] Column 9 in Table 1B provides a chromosomal map location for certain polynucleotides of the invention. Chromosomal location was determined by finding exact matches to EST and cDNA sequences contained in the NCBI (National Center for Biotechnology Information) UniGene database. Each sequence in the UniGene database is assigned to a “cluster”; all of the ESTs, cDNAs, and STSs in a cluster are believed to be derived from a single gene. Chromosomal mapping data is often available for one or more sequence(s) in a UniGene cluster; this data (if consistent) is then applied to the cluster as a whole. Thus, it is possible to infer the chromosomal location of a new polynucleotide sequence by determining its identity with a mapped UniGene cluster.

[0084] A modified version of the computer program BLASTN (Altshul, et al., J. Mol. Biol. 215:403-410 (1990), and Gish, and States, Nat. Genet. 3:266-272) (1993) was used to search the UniGene database for EST or cDNA sequences that contain exact or near-exact matches to a polynucleotide sequence of the invention (the ‘Query’). A sequence from the UniGene database (the ‘Subject’) was said to be an exact match if it contained a segment of 50 nucleotides in length such that 48 of those nucleotides were in the same order as found in the Query sequence. If all of the matches that met this criteria were in the same UniGene cluster, and mapping data was available for this cluster, it is indicated in Table 1B under the heading “Cytologic Band”. Where a cluster had been further localized to a distinct cytologic band, that band is disclosed; where no banding information was available, but the gene had been localized to a single chromosome, the chromosome is disclosed.

[0085] Once a presumptive chromosomal location was determined for a polynucleotide of the invention, an associated disease locus was identified by comparison with a database of diseases which have been experimentally associated with genetic loci. The database used was the Morbid Map, derived from OMIM™ (“Online Mendelian Inheritance in Man”; McKusick-Nathans Institute for Genetic Medicine, Johns Hopkins University (Baltimore, Md.) and National Center for Biotechnology Information, National Library of Medicine (Bethesda, Md.) 2000; World Wide Web URL: http://www.ncbi.nlm.nih.gov/omim/). If the putative chromosomal location of a polynucleotide of the invention (Query sequence) was associated with a disease in the Morbid Map database, an OMIM reference identification number was noted in column 10, Table 1B, labelled “OMIM Disease Reference(s). Table 5 is a key to the OMIM reference identification numbers (column 1), and provides a description of the associated disease in Column 2.

[0086] Table 1C summarizes additional polynucleotides encompassed by the invention (including cDNA clones related to the sequences (Clone ID NO:Z), contig sequences (contig identifier (Contig ID:) contig nucleotide sequence identifiers (SEQ ID NO:X)), and genomic sequences (SEQ ID NO:B). The first column provides a unique clone identifier, “Clone ID NO:Z”, for a cDNA clone related to each contig sequence. The second column provides the sequence identifier, “SEQ ID NO:X”, for each contig sequence. The third column provides a unique contig identifier, “Contig ID:” for each contig sequence. The fourth column, provides a BAC identifier “BAC ID NO:A” for the BAC clone referenced in the corresponding row of the table. The fifth column provides the nucleotide sequence identifier, “SEQ ID NO:B” for a fragment of the BAC clone identified in column four of the corresponding row of the table. The sixth column, “Exon From-To”, provides the location (i.e., nucleotide position numbers) within the polynucleotide sequence of SEQ ID NO:B which delineate certain polynucleotides of the invention that are also exemplary members of polynucleotide sequences that encode polypeptides of the invention (e.g., polypeptides containing amino acid sequences encoded by the polynucleotide sequences delineated in column six, and fragments and variants thereof).

LENGTHY TABLE REFERENCED HERE
US20070048818A1-20070301-T00003
Please refer to the end of the specification for access instructions.

[0087] Table 1D: The polynucleotides or polypeptides, or agonists or antagonists of the present invention can be used in assays to test for one or more biological activities. If these polynucleotides and polypeptides do exhibit activity in a particular assay, it is likely that these molecules may be involved in the diseases associated with the biological activity. Thus, the polynucleotides or polypeptides, or agonists or antagonists could be used to treat the associated disease.

[0088] The present invention encompasses methods of preventing, treating, diagnosing, or ameliorating a disease or disorder. In preferred embodiments, the present invention encompasses a method of treating a disease or disorder listed in the “Preferred Indications” column of Table 1D; comprising administering to a patient in which such treatment, prevention, or amelioration is desired a protein, nucleic acid, or antibody of the invention (or fragment or variant thereof) in an amount effective to treat, prevent, diagnose, or ameliorate the disease or disorder. The first and seccond columns of Table 1D show the “Gene No.” and “cDNA Clone ID No.”, respectively, indicating certain nucleic acids and proteins (or antibodies against the same) of the invention (including polynucleotide, polypeptide, and antibody fragments or variants thereof) that may be used in preventing, treating, diagnosing, or ameliorating the disease(s) or disorder(s) indicated in the corresponding row in Column 3 of Table 1D.

[0089] In another embodiment, the present invention also encompasses methods of preventing, treating, diagnosing, or ameliorating a disease or disorder listed in the “Preferred Indications” column of Table 1D; comprising administering to a patient combinations of the proteins, nucleic acids, or antibodies of the invention (or fragments or variants thereof), sharing similar indications as shown in the corresponding rows in Column 3 of Table 1D.

[0090] The “Preferred Indication” column describes diseases, disorders, and/or conditions that may be treated, prevented, diagnosed, or ameliorated by a protein, nucleic acid, or antibody of the invention (or fragment or variant thereof).

[0091] The recitation of “Cancer” in the “Preferred Indication” column indicates that the corresponding nucleic acid and protein, or antibody against the same, of the invention (or fragment or variant thereof) may be used for example, to diagnose, treat, prevent, and/or ameliorate diseases and/or disorders relating to neoplastic diseases (e.g., leukemias, cancers, and/or as described below under “Hyperproliferative Disorders”).

[0092] In specific embodiments, a protein, nucleic acid, or antibody of the invention (or fragment or variant thereof) having a “Cancer” recitation in the “Preferred Indication” column of Table 1D may be used for example, to diagnose, treat, prevent, and/or ameliorate a neoplasm located in a tissue selected from the group consisting of: colon, abdomen, bone, breast, digestive system, liver, pancreas, prostate, peritoneum, lung, blood (e.g., leukemia), endocrine glands (adrenal, parathyroid, pituitary, testicles, ovary, thymus, thyroid), uterus, eye, head and neck, nervous (central and peripheral), lymphatic system, pelvic, skin, soft tissue, spleen, thoracic, and urogenital.

[0093] In specific embodiments, a protein, nucleic acid, or antibody of the invention (or fragment or variant thereof) having a “Cancer” recitation in the “Preferred Indication” column of Table 1D, may be used for example, to diagnose, treat, prevent, and/or ameliorate a pre-neoplastic condition, selected from the group consisting of: hyperplasia (e.g., endometrial hyperplasia and/or as described in the section entitled “Hyperproliferative Disorders”), metaplasia (e.g., connective tissue metaplasia, atypical metaplasia, and/or as described in the section entitled “Hyperproliferative Disorders”), and/or dysplasia (e.g., cervical dysplasia, and bronchopulmonary dysplasia).

[0094] In another specific embodiment, a protein, nucleic acid, or antibody of the invention (or fragment or variant thereof) having a “Cancer” recitation in the “Preferred Indication” column of Table 1D, may be used for example, to diagnose, treat, prevent, and/or ameliorate a benign dysproliferative disorder selected from the group consisting of: benign tumors, fibrocystic conditions, tissue hypertrophy, and/or as described in the section entitled “Hyperproliferative Disorders”.

[0095] The recitation of “Immune/Hematopoietic” in the “Preferred Indication” column indicates that the corresponding nucleic acid and protein, or antibody against the same, of the invention (or fragment or variant thereof), may be used for example, to diagnose, treat, prevent, and/or ameliorate diseases and/or disorders relating to neoplastic diseases (e.g., as described below under “Hyperproliferative Disorders”), blood disorders (e.g., as described below under “Immune Activity” “Cardiovascular Disorders” and/or “Blood-Related Disorders”), and infections (e.g., as described below under “Infectious Disease”).

[0096] In specific embodiments, a protein, nucleic acid, or antibody of the invention (or fragment or variant thereof) having the “Immune/Hematopoietic” recitation in the “Preferred Indication” column of Table 1D, may be used for example, to diagnose, treat, prevent, and/or ameliorate a disease or disorder selected from the group consisting of: anemia, pancytopenia, leukopenia, thrombocytopenia, leukemias, Hodgkin's disease, non-Hodgkin's lymphoma, acute lymphocytic anemia (ALL), plasmacytomas, multiple myeloma, Burkitt's lymphoma, arthritis, asthma, AIDS, autoimmune disease, rheumatoid arthritis, granulomatous disease, immune deficiency, inflammatory bowel disease, sepsis, neutropenia, neutrophilia, psoriasis, immune reactions to transplanted organs and tissues, systemic lupus erythematosis, hemophilia, hypercoagulation, diabetes mellitus, endocarditis, meningitis, Lyme Disease, and allergies.

[0097] The recitation of “Reproductive” in the “Preferred Indication” column indicates that the corresponding nucleic acid and protein, or antibody against the same, of the invention (or fragment or variant thereof), may be used for example, to diagnose, treat, prevent, and/or ameliorate diseases and/or disorders relating to neoplastic diseases (e.g., as described below under “Hyperproliferative Disorders”), and disorders of the reproductive system (e.g., as described below under “Reproductive System Disorders”).

[0098] In specific embodiments, a protein, nucleic acid, or antibody of the invention (or fragment or variant thereof) having a “Reproductive” recitation in the “Preferred Indication” column of Table 1D, may be used for example, to diagnose, treat, prevent, and/or ameliorate a disease or disorder selected from the group consisting of: cryptorchism, prostatitis, inguinal hernia, varicocele, leydig cell tumors, verrucous carcinoma, prostatitis, malacoplakia, Peyronie's disease, penile carcinoma, squamous cell hyperplasia, dysmenorrhea, ovarian adenocarcinoma, Turner's syndrome, mucopurulent cervicitis, Sertoli-leydig tumors, ovarian cancer, uterine cancer, pelvic inflammatory disease, testicular cancer, prostate cancer, Klinefelter's syndrome, Young's syndrome, premature ejaculation, diabetes mellitus, cystic fibrosis, Kartagener's syndrome, testicular atrophy, testicular feminization, anorchia, ectopic testis, epididymitis, orchitis, gonorrhea, syphilis, testicular torsion, vasitis nodosa, germ cell tumors, stromal tumors, dysmenorrhea, retroverted uterus, endometriosis, fibroids, adenomyosis, anovulatory bleeding, amenorrhea, Cushing's syndrome, hydatidiform moles, Asherman's syndrome, premature menopause, precocious puberty, uterine polyps, dysfunctional uterine bleeding, cervicitis, chronic cervicitis, mucopurulent cervicitis, cervical dysplasia, cervical polyps, Nabothian cysts, cervical erosion, cervical incompetence, cervical neoplasms, pseudohermaphroditism, and premenstrual syndrome.

[0099] The recitation of “Musculoskeletal” in the “Preferred Indication” column indicates that the corresponding nucleic acid and protein, or antibody against the same, of the invention (or fragment or variant thereof), may be used for example, to diagnose, treat, prevent, and/or ameliorate diseases and/or disorders relating to neoplastic diseases (e.g., as described below under “Hyperproliferative Disorders”), and disorders of the immune system (e.g., as described below under “Immune Activity”).

[0100] In specific embodiments, a protein, nucleic acid, or antibody of the invention (or fragment or variant thereof) having a “Musculoskeletal” recitation in the “Preferred Indication” column of Table 1D, may be used for example, to diagnose, treat, prevent, and/or ameliorate a disease or disorder selected from the group consisting of: bone cancers (e.g., osteochondromas, benign chondromas, chondroblastoma, chondromyxoid fibromas, osteoid osteomas, giant cell tumors, multiple myeloma, osteosarcomas), Paget's Disease, rheumatoid arthritis, systemic lupus erythematosus, osteomyelitis, Lyme Disease, gout, bursitis, tendonitis, osteoporosis, osteoarthritis, muscular dystrophy, mitochondrial myopathy, cachexia, and multiple sclerosis.

[0101] The recitation of “Cardiovascular” in the “Preferred Indication” column indicates that the corresponding nucleic acid and protein, or antibody against the same, of the invention (or fragment or variant thereof), may be used for example, to diagnose, treat, prevent, and/or ameliorate diseases and/or disorders relating to neoplastic diseases (e.g., as described below under “Hyperproliferative Disorders”), and disorders of the cardiovascular system (e.g., as described below under “Cardiovascular Disorders”).

[0102] In specific embodiments, a protein, nucleic acid, or antibody of the invention (or fragment or variant thereof) having a “Cardiovascular” recitation in the “Preferred Indication” column of Table 1D, may be used for example, to diagnose, treat, prevent, and/or ameliorate a disease or disorder selected from the group consisting of: myxomas, fibromas, rhabdomyomas, cardiovascular abnormalities (e.g., congenital heart defects, cerebral arteriovenous malformations, septal defects), heart disease (e.g., heart failure, congestive heart disease, arrhythmia, tachycardia, fibrillation, pericardial Disease, endocarditis), cardiac arrest, heart valve disease (e.g., stenosis, regurgitation, prolapse), vascular disease (e.g., hypertension, coronary artery disease, angina, aneurysm, arteriosclerosis, peripheral vascular disease), hyponatremia, hypematremia, hypokalemia, and hyperkalemia.

[0103] The recitation of “Mixed Fetal” in the “Preferred Indication” column indicates that the corresponding nucleic acid and protein, or antibody against the same, of the invention (or fragment or variant thereof), may be used for example, to diagnose, treat, prevent, and/or ameliorate diseases and/or disorders relating to neoplastic diseases (e.g., as described below under “Hyperproliferative Disorders”).

[0104] In specific embodiments, a protein, nucleic acid, or antibody of the invention (or fragment or variant thereof) having a “Mixed Fetal” recitation in the “Preferred Indication” column of Table 1D, may be used for example, to diagnose, treat, prevent, and/or ameliorate a disease or disorder selected from the group consisting of: spina bifida, hydranencephaly, neurofibromatosis, fetal alcohol syndrome, diabetes mellitus, PKU, Down's syndrome, Patau syndrome, Edwards syndrome, Turner syndrome, Apert syndrome, Carpenter syndrome, Conradi syndrome, Crouzon syndrome, cutis laxa, Cornelia de Lange syndrome, Ellis-van Creveld syndrome, Holt-Oram syndrome, Kartagener syndrome, Meckel-Gruber syndrome, Noonan syndrome, Pallister-Hall syndrome, Rubinstein-Taybi syndrome, Scimitar syndrome, Smith-Lemli-Opitz syndrome, thromocytopenia-absent radius (TAR) syndrome, Treacher Collins syndrome, Williams syndrome, Hirschsprung's disease, Meckel's diverticulum, polycystic kidney disease, Turner's syndrome, and gonadal dysgenesis, Klippel-Feil syndrome, Ostogenesis imperfecta, muscular dystrophy, Tay-Sachs disease, Wilm's tumor, neuroblastoma, and retinoblastoma.

[0105] The recitation of “Excretory” in the “Preferred Indication” column indicates that the corresponding nucleic acid and protein, or antibody against the same, of the invention (or fragment or variant thereof), may be used for example, to diagnose, treat, prevent, and/or ameliorate diseases and/or disorders relating to neoplastic diseases (e.g., as described below under “Hyperproliferative Disorders”) and renal disorders (e.g., as described below under “Renal Disorders”).

[0106] In specific embodiments, a protein, nucleic acid, or antibody of the invention (or fragment or variant thereof) having a “Excretory” recitation in the “Preferred Indication” column of Table 1D, may be used for example, to diagnose, treat, prevent, and/or ameliorate a disease or disorder selected from the group consisting of: bladder cancer, prostate cancer, benign prostatic hyperplasia, bladder disorders (e.g., urinary incontinence, urinary retention, urinary obstruction, urinary tract Infections, interstitial cystitis, prostatitis, neurogenic bladder, hematuria), renal disorders (e.g., hydronephrosis, proteinuria, renal failure, pyelonephritis, urolithiasis, reflux nephropathy, and unilateral obstructive uropathy).

[0107] The recitation of “Neural/Sensory” in the “Preferred Indication” column indicates that the corresponding nucleic acid and protein, or antibody against the same, of the invention (or fragment or variant thereof), may be used for example, to diagnose, treat, prevent, and/or ameliorate diseases and/or disorders relating to neoplastic diseases (e.g., as described below under “Hyperproliferative Disorders”) and diseases or disorders of the nervous system (e.g., as described below under “Neural Activity and Neurological Diseases”).

[0108] In specific embodiments, a protein, nucleic acid, or antibody of the invention (or fragment or variant thereof) having a “Neural/Sensory” recitation in the “Preferred Indication” column of Table 1D, may be used for example, to diagnose, treat, prevent, and/or ameliorate a disease or disorder selected from the group consisting of: brain cancer (e.g., brain stem glioma, brain tumors, central nervous system (Primary) lymphoma, central nervous system lymphoma, cerebellar astrocytoma, and cerebral astrocytoma, neurodegenerative disorders (e.g., Alzheimer's Disease, Creutzfeldt-Jakob Disease, Parkinson's Disease, and Idiopathic Presenile Dementia), encephalomyelitis, cerebral malaria, meningitis, metabolic brain diseases (e.g., phenylketonuria and pyruvate carboxylase deficiency), cerebellar ataxia, ataxia telangiectasia, and AIDS Dementia Complex, schizophrenia, attention deficit disorder, hyperactive attention deficit disorder, autism, and obsessive compulsive disorders.

[0109] The recitation of “Respiratory” in the “Preferred Indication” column indicates that the corresponding nucleic acid and protein, or antibody against the same, of the invention (or fragment or variant thereof), may be used for example, to diagnose, treat, prevent, and/or ameliorate diseases and/or disorders relating to neoplastic diseases (e.g., as described below under “Hyperproliferative Disorders”) and diseases or disorders of the respiratory system (e.g., as described below under “Respiratory Disorders”).

[0110] In specific embodiments, a protein, nucleic acid, or antibody of the invention (or fragment or variant thereof) having a “Respiratory” recitation in the “Preferred Indication” column of Table 1D, may be used for example, to diagnose, treat, prevent, and/or ameliorate a disease or disorder selected from the group consisting of: cancers of the respiratory system such as larynx cancer, pharynx cancer, trachea cancer, epiglottis cancer, lung cancer, squamous cell carcinomas, small cell (oat cell) carcinomas, large cell carcinomas, and adenocarcinomas. Allergic reactions, cystic fibrosis, sarcoidosis, histiocytosis X, infiltrative lung diseases (e.g., pulmonary fibrosis and lymphoid interstitial pneumonia), obstructive airway diseases (e.g., asthma, emphysema, chronic or acute bronchitis), occupational lung diseases (e.g., silicosis and asbestosis), pneumonia, and pleurisy.

[0111] The recitation of “Endocrine” in the “Preferred Indication” column indicates that the corresponding nucleic acid and protein, or antibody against the same, of the invention (or fragment or variant thereof), may be used for example, to diagnose, treat, prevent, and/or ameliorate diseases and/or disorders relating to neoplastic diseases (e.g., as described below under “Hyperproliferative Disorders”) and diseases or disorders of the respiratory system (e.g., as described below under “Respiratory Disorders”), renal disorders (e.g., as described below under “Renal Disorders”), and disorders of the endocrine system (e.g., as described below under “Endocrine Disorders”.

[0112] In specific embodiments, a protein, nucleic acid, or antibody of the invention (or fragment or variant thereof) having an “Endocrine” recitation in the “Preferred Indication” column of Table 1D, may be used for example, to diagnose, treat, prevent, and/or ameliorate a disease or disorder selected from the group consisting of: cancers of endocrine tissues and organs (e.g., cancers of the hypothalamus, pituitary gland, thyroid gland, parathyroid glands, pancreas, adrenal glands, ovaries, and testes), diabetes (e.g., diabetes insipidus, type I and type II diabetes mellitus), obesity, disorders related to pituitary glands (e.g., hyperpituitarism, hypopituitarism, and pituitary dwarfism), hypothyroidism, hyperthyroidism, goiter, reproductive disorders (e.g. male and female infertility), disorders related to adrenal glands (e.g., Addison's Disease, corticosteroid deficiency, and Cushing's Syndrome), kidney cancer (e.g., hypemephroma, transitional cell cancer, and Wilm's tumor), diabetic nephropathy, interstitial nephritis, polycystic kidney disease, glomerulonephritis (e.g., IgM mesangial proliferative glomerulonephritis and glomerulonephritis caused by autoimmune disorders; such as Goodpasture's syndrome), and nephrocalcinosis.

[0113] The recitation of “Digestive” in the “Preferred Indication” column indicates that the corresponding nucleic acid and protein, or antibody against the same, of the invention (or fragment or variant thereof), may be used for example, to diagnose, treat, prevent, and/or ameliorate diseases and/or disorders relating to neoplastic diseases (e.g., as described below under “Hyperproliferative Disorders”) and diseases or disorders of the gastrointestinal system (e.g., as described below under “Gastrointestinal Disorders”.

[0114] In specific embodiments, a protein, nucleic acid, or antibody of the invention (or fragment or variant thereof) having a “Digestive” recitation in the “Preferred Indication” column of Table 1D, may be used for example, to diagnose, treat, prevent, and/or ameliorate a disease or disorder selected from the group consisting of: ulcerative colitis, appendicitis, Crohn's disease, hepatitis, hepatic encephalopathy, portal hypertension, cholelithiasis, cancer of the digestive system (e.g., biliary tract cancer, stomach cancer, colon cancer, gastric cancer, pancreatic cancer, cancer of the bile duct, tumors of the colon (e.g., polyps or cancers), and cirrhosis), pancreatitis, ulcerative disease, pyloric stenosis, gastroenteritis, gastritis, gastric atropy, benign tumors of the duodenum, distension, irritable bowel syndrome, malabsorption, congenital disorders of the small intestine, bacterial and parasitic infection, megacolon, Hirschsprung's disease, aganglionic megacolon, acquired megacolon, colitis, anorectal disorders (e.g., anal fistulas, hemorrhoids), congenital disorders of the liver (e.g., Wilson's disease, hemochromatosis, cystic fibrosis, biliary atresia, and alpha1-antitrypsin deficiency), portal hypertension, cholelithiasis, and jaundice.

[0115] The recitation of “Connective/Epithelial” in the “Preferred Indication” column indicates that the corresponding nucleic acid and protein, or antibody against the same, of the invention (or fragment or variant thereof), may be used for example, to diagnose, treat, prevent, and/or ameliorate diseases and/or disorders relating to neoplastic diseases (e.g., as described below under “Hyperproliferative Disorders”), cellular and genetic abnormalities (e.g., as described below under “Diseases at the Cellular Level”), angiogenesis (e.g., as described below under “Anti-Angiogenesis Activity”), and or to promote or inhibit regeneration (e.g., as described below under “Regeneration”), and wound healing (e.g., as described below under “Wound Healing and Epithelial Cell Proliferation”).

[0116] In specific embodiments, a protein, nucleic acid, or antibody of the invention (or fragment or variant thereof) having a “Connective/Epithelial” recitation in the “Preferred Indication” column of Table 1D, may be used for example, to diagnose, treat, prevent, and/or ameliorate a disease or disorder selected from the group consisting of: connective tissue metaplasia, mixed connective tissue disease, focal epithelial hyperplasia, epithelial metaplasia, mucoepithelial dysplasia, graft v. host disease, polymyositis, cystic hyperplasia, cerebral dysplasia, tissue hypertrophy, Alzheimer's disease, lymphoproliferative disorder, Waldenstron's macroglobulinemia, Crohn's disease, pernicious anemia, idiopathic Addison's disease, glomerulonephritis, bullous pemphigoid, Sjogren's syndrome, diabetes mellitus, cystic fibrosis, osteoblastoma, osteoclastoma, osteosarcoma, chondrosarcoma, osteoporosis, osteocarthritis, periodontal disease, wound healing, relapsing polychondritis, vasculitis, polyarteritis nodosa, Wegener's granulomatosis, cellulitis, rheumatoid arthritis, psoriatic arthritis, discoid lupus erythematosus, systemic lupus erythematosus, scleroderma, CREST syndrome, Sjogren's syndrome, polymyositis, dermatomyositis, mixed connective tissue disease, relapsing polychondritis, vasculitis, Henoch-Schonlein syndrome, erythema nodosum, polyarteritis nodosa, temporal (giant cell) arteritis, Takayasu's arteritis, Wegener's granulomatosis, Reiter's syndrome, Behcet's syndrome, ankylosing spondylitis, cellulitis, keloids, Ehler Danlos syndrome, Marfan syndrome, pseudoxantoma elasticum, osteogenese imperfecta, chondrodysplasias, epidermolysis bullosa, Alport syndrome, and cutis laxa.

LENGTHY TABLE REFERENCED HERE
US20070048818A1-20070301-T00004
Please refer to the end of the specification for access instructions.

LENGTHY TABLE REFERENCED HERE
US20070048818A1-20070301-T00005
Please refer to the end of the specification for access instructions.

[0117] Table 2 further characterizes certain encoded polypeptides of the invention, by providing the results of comparisons to protein and protein family databases. The first column provides a unique clone identifier, “Clone ID NO:”, corresponding to a cDNA clone disclosed in Table 1A and/or Table 1B. The second column provides the unique contig identifier, “Contig ID:” which allows correlation with the information in Table 1B. The third column provides the sequence identifier, “SEQ ID NO:”, for the contig polynucleotide sequences. The fourth column provides the analysis method by which the homology/identity disclosed in the Table was determined. The fifth column provides a description of the PFAM/NR hit identified by each analysis. Column six provides the accession number of the PFAM/NR hit disclosed in the fifth column. Column seven, score/percent identity, provides a quality score or the percent identity, of the hit disclosed in column five. Comparisons were made between polypeptides encoded by polynucleotides of the invention and a non-redundant protein database (herein referred to as “NR”), or a database of protein families (herein referred to as “PFAM”), as described below.

[0118] The NR database, which comprises the NBRF PIR database, the NCBI GenPept database, and the SIB SwissProt and TrEMBL databases, was made non-redundant using the computer program nrdb2 (Warren Gish, Washington University in Saint Louis). Each of the polynucleotides shown in Table 1B, column 3 (e.g., SEQ ID NO:X or the ‘Query’ sequence) was used to search against the NR database. The computer program BLASTX was used to compare a 6-frame translation of the Query sequence to the NR database (for information about the BLASTX algorithm please see Altshul et al., J. Mol. Biol. 215:403-410 (1990), and Gish and States, Nat. Genet. 3:266-272 (1993). A description of the sequence that is most similar to the Query sequence (the highest scoring ‘Subject’) is shown in column five of Table 2 and the database accession number for that sequence is provided in column six. The highest scoring ‘Subject’ is reported in Table 2 if (a) the estimated probability that the match occurred by chance alone is less than 1.0 e-07, and (b) the match was not to a known repetitive element. BLASTX returns alignments of short polypeptide segments of the Query and Subject sequences which share a high degree of similarity; these segments are known as High-Scoring Segment Pairs or HSPs. Table 2 reports the degree of similarity between the Query and the Subject for each HSP as a percent identity in Column 7. The percent identity is determined by dividing the number of exact matches between the two aligned sequences in the HSP, dividing by the number of Query amino acids in the HSP and multiplying by 100. The polynucleotides of SEQ ID NO:X which encode the polypeptide sequence that generates an HSP are delineated by columns 8 and 9 of Table 2.

[0119] The PFAM database, PFAM version 2.1, (Sonnhammer, Nucl. Acids Res., 26:320-322, 1998)) consists of a series of multiple sequence alignments; one alignment for each protein family. Each multiple sequence alignment is converted into a probability model called a Hidden Markov Model, or HMM, that represents the position-specific variation among the sequences that make up the multiple sequence alignment (see, e.g., Durbin, et al., Biological sequence analysis: probabilistic models of proteins and nucleic acids, Cambridge University Press, 1998 for the theory of HMMs). The program HMMER version 1.8 (Sean Eddy, Washington University in Saint Louis) was used to compare the predicted protein sequence for each Query sequence (SEQ ID NO:Y in Table 1B) to each of the HMMs derived from PFAM version 2.1. A HMM derived from PFAM version 2.1 was said to be a significant match to a polypeptide of the invention if the score returned by HMMER 1.8 was greater than 0.8 times the HMMER 1.8 score obtained with the most distantly related known member of that protein family. The description of the PFAM family which shares a significant match with a polypeptide of the invention is listed in column 5 of Table 2, and the database accession number of the PFAM hit is provided in column 6. Column 7 provides the score returned by HMMER version 1.8 for the alignment. Columns 8 and 9 delineate the polynucleotides of SEQ ID NO:X which encode the polypeptide sequence which show a significant match to a PFAM protein family.

[0120] As mentioned, columns 8 and 9 in Table 2, “NT From” and “NT To”, delineate the polynucleotides of “SEQ ID NO:X” that encode a polypeptide having a significant match to the PFAM/NR database as disclosed in the fifth column. In one embodiment, the invention provides a protein comprising, or alternatively consisting of, a polypeptide encoded by the polynucleotides of SEQ ID NO:X delineated in columns 8 and 9 of Table 2. Also provided are polynucleotides encoding such proteins, and the complementary strand thereto.

[0121] The nucleotide sequence SEQ ID NO:X and the translated SEQ ID NO:Y are sufficiently accurate and otherwise suitable for a variety of uses well known in the art and described further below. For instance, the nucleotide sequences of SEQ ID NO:X are useful for designing nucleic acid hybridization probes that will detect nucleic acid sequences contained in SEQ ID NO:X or the cDNA contained in Clone ID NO:Z. These probes will also hybridize to nucleic acid molecules in biological samples, thereby enabling immediate applications in chromosome mapping, linkage analysis, tissue identification and/or typing, and a variety of forensic and diagnostic methods of the invention. Similarly, polypeptides identified from SEQ ID NO:Y may be used to generate antibodies which bind specifically to these polypeptides, or fragments thereof, and/or to the polypeptides encoded by the cDNA clones identified in, for example, Table 1A and/or 1B.

[0122] Nevertheless, DNA sequences generated by sequencing reactions can contain sequencing errors. The errors exist as misidentified nucleotides, or as insertions or deletions of nucleotides in the generated DNA sequence. The erroneously inserted or deleted nucleotides cause frame shifts in the reading frames of the predicted amino acid sequence. In these cases, the predicted amino acid sequence diverges from the actual amino acid sequence, even though the generated DNA sequence may be greater than 99.9% identical to the actual DNA sequence (for example, one base insertion or deletion in an open reading frame of over 1000 bases).

[0123] Accordingly, for those applications requiring precision in the nucleotide sequence or the amino acid sequence, the present invention provides not only the generated nucleotide sequence identified as SEQ ID NO:X, and a predicted translated amino acid sequence identified as SEQ ID NO:Y, but also a sample of plasmid DNA containing cDNA Clone ID NO:Z (e.g., as set forth in columns 2 and 3 of Table 1A and/or as set forth, for example, in Table 1B, 6, and 7). The nucleotide sequence of each deposited clone can readily be determined by sequencing the deposited clone in accordance with known methods. Further, techniques known in the art can be used to verify the nucleotide sequences of SEQ ID NO:X.

[0124] The predicted amino acid sequence can then be verified from such deposits. Moreover, the amino acid sequence of the protein encoded by a particular clone can also be directly determined by peptide sequencing or by expressing the protein in a suitable host cell containing the deposited human cDNA, collecting the protein, and determining its sequence.

RACE Protocol For Recovery of Full-Length Genes

[0125] Partial cDNA clones can be made full-length by utilizing the rapid amplification of cDNA ends (RACE) procedure described in Frohman, M. A., et al., Proc. Nat'l. Acad. Sci. USA, 85:8998-9002 (1988). A cDNA clone missing either the 5′ or 3′ end can be reconstructed to include the absent base pairs extending to the translational start or stop codon, respectively. In some cases, cDNAs are missing the start codon of translation, therefor. The following briefly describes a modification of this original 5′ RACE procedure. Poly A+ or total RNA is reverse transcribed with Superscript II (Gibco/BRL) and an antisense or complementary primer specific to the cDNA sequence. The primer is removed from the reaction with a Microcon Concentrator (Amicon). The first-strand cDNA is then tailed with DATP and terminal deoxynucleotide transferase (Gibco/BRL). Thus, an anchor sequence is produced which is needed for PCR amplification. The second strand is synthesized from the dA-tail in PCR buffer, Taq DNA polymerase (Perkin-Elmer Cetus), an oligo-dT primer containing three adjacent restriction sites (XhoI, SalI and ClaI) at the 5′ end and a primer containing just these restriction sites. This double-stranded cDNA is PCR amplified for 40 cycles with the same primers as well as a nested cDNA-specific antisense primer. The PCR products are size-separated on an ethidium bromide-agarose gel and the region of gel containing cDNA products the predicted size of missing protein-coding DNA is removed. cDNA is purified from the agarose with the Magic PCR Prep kit (Promega), restriction digested with XhoI or SalI, and ligated to a plasmid such as pBluescript SKII (Stratagene) at XhoI and EcoRV sites. This DNA is transformed into bacteria and the plasmid clones sequenced to identify the correct protein-coding inserts. Correct 5′ ends are confirmed by comparing this sequence with the putatively identified homologue and overlap with the partial cDNA clone. Similar methods known in the art and/or commercial kits are used to amplify and recover 3′ ends.

[0126] Several quality-controlled kits are commercially available for purchase. Similar reagents and methods to those above are supplied in kit form from Gibco/BRL for both 5′ and 3′ RACE for recovery of full length genes. A second kit is available from Clontech which is a modification of a related technique, SLIC (single-stranded ligation to single-stranded cDNA), developed by Dumas et al., Nucleic Acids Res., 19:5227-32 (1991). The major differences in procedure are that the RNA is alkaline hydrolyzed after reverse transcription and RNA ligase is used to join a restriction site-containing anchor primer to the first-strand cDNA. This obviates the necessity for the dA-tailing reaction which results in a polyT stretch that is difficult to sequence past.

[0127] An alternative to generating 5′ or 3′ cDNA from RNA is to use cDNA library double-stranded DNA. An asymmetric PCR-amplified antisense cDNA strand is synthesized with an antisense cDNA-specific primer and a plasmid-anchored primer. These primers are removed and a symmetric PCR reaction is performed with a nested cDNA-specific antisense primer and the plasmid-anchored primer.

RNA Ligase Protocol for Generating the 5′ or 3′ End Sequences to Obtain Fun Length Genes

[0128] Once a gene of interest is identified, several methods are available for the identification of the 5′ or 3′ portions of the gene which may not be present in the original cDNA plasmid. These methods include, but are not limited to, filter probing, clone enrichment using specific probes and protocols similar and identical to 5′ and 3′ RACE. While the full length gene may be present in the library and can be identified by probing, a useful method for generating the 5′ or 3′ end is to use the existing sequence information from the original cDNA to generate the missing information. A method similar to 5′ RACE is available for generating the missing 5′ end of a desired full-length gene. (This method was published by Fromont-Racine et al., Nucleic Acids Res., 21(7):1683-1684 (1993)). Briefly, a specific RNA oligonucleotide is ligated to the 5′ ends of a population of RNA presumably containing full-length gene RNA transcript and a primer set containing a primer specific to the ligated RNA oligonucleotide and a primer specific to a known sequence of the gene of interest, is used to PCR amplify the 5′ portion of the desired full length gene which may then be sequenced and used to generate the full length gene. This method starts with total RNA isolated from the desired source, poly A RNA may be used but is not a prerequisite for this procedure. The RNA preparation may then be treated with phosphatase if necessary to eliminate 5′ phosphate groups on degraded or damaged RNA which may interfere with the later RNA ligase step. The phosphatase if used is then inactivated and the RNA is treated with tobacco acid pyrophosphatase in order to remove the cap structure present at the 5′ ends of messenger RNAs. This reaction leaves a 5′ phosphate group at the 5′ end of the cap cleaved RNA which can then be ligated to an RNA oligonucleotide using T4 RNA ligase. This modified RNA preparation can then be used as a template for first strand cDNA synthesis using a gene specific oligonucleotide. The first strand synthesis reaction can then be used as a template for PCR amplification of the desired 5′ end using a primer specific to the ligated RNA oligonucleotide and a primer specific to the known sequence of the gene of interest. The resultant product is then sequenced and analyzed to confirm that the 5′ end sequence belongs to the relevant gene.

[0129] The present invention also relates to vectors or plasmids which include such DNA sequences, as well as the use of the DNA sequences. The material deposited with the ATCC (e.g., as described in columns 2 and 3 of Table 1A, and/or as set forth in Table 1B, Table 6, or Table 7) is a mixture of cDNA clones derived from a variety of human tissue and cloned in either a plasmid vector or a phage vector, as described, for example, in Table 1A and Table 7. These deposits are referred to as “the deposits” herein. The tissues from which some of the clones were derived are listed in Table 7, and the vector in which the corresponding cDNA is contained is also indicated in Table 7. The deposited material includes cDNA clones corresponding to SEQ ID NO:X described, for example, in Table 1A and/or 1B (Clone ID NO:Z). A clone which is isolatable from the ATCC Deposits by use of a sequence listed as SEQ ID NO:X, may include the entire coding region of a human gene or in other cases such clone may include a substantial portion of the coding region of a human gene. Furthermore, although the sequence listing may in some instances list only a portion of the DNA sequence in a clone included in the ATCC Deposits, it is well within the ability of one skilled in the art to sequence the DNA included in a clone contained in the ATCC Deposits by use of a sequence (or portion thereof) described in, for example Tables 1A and/or 1B or 2, by procedures hereinafter further described, and others apparent to those skilled in the art.

[0130] Also provided in Table 1A and 7 is the name of the vector which contains the cDNA clone. Each vector is routinely used in the art. The following additional information is provided for convenience.

[0131] Vectors Lambda Zap (U.S. Pat. Nos. 5,128,256 and 5,286,636), Uni-Zap XR (U.S. Pat. Nos. 5,128,256 and 5,286,636), Zap Express (U.S. Pat. Nos. 5,128,256 and 5,286,636), pBluescript (pBS) (Short, J. M. et al., Nucleic Acids Res. 16:7583-7600 (1988); Alting-Mees, M. A. and Short, J. M., Nucleic Acids Res. 17:9494 (1989)) and pBK (Alting-Mees, M. A. et al., Strategies 5:58-61 (1992)) are commercially available from Stratagene Cloning Systems, Inc., 11011 N. Torrey Pines Road, La Jolla, Calif., 92037. pBS contains an ampicillin resistance gene and pBK contains a neomycin resistance gene. Phagemid pBS may be excised from the Lambda Zap and Uni-Zap XR vectors, and phagemid pBK may be excised from the Zap Express vector. Both phagemids may be transformed into E. coli strain XL-1 Blue, also available from Stratagene.

[0132] Vectors pSport1, pCMVSport 1.0, pCMVSport 2.0 and pCMVSport 3.0, were obtained from Life Technologies, Inc., P.O. Box 6009, Gaithersburg, Md. 20897. All Sport vectors contain an ampicillin resistance gene and may be transformed into E. coli strain DH10B, also available from Life Technologies. See, for instance, Gruber, C. E., et al., Focus 15:59-(1993). Vector lafmid BA (Bento Soares, Columbia University, New York, N.Y.) contains an ampicillin resistance gene and can be transformed into E. colistrain XL-1 Blue. Vector pCR®2.1, which is available from Invitrogen, 1600 Faraday Avenue, Carlsbad, Calif. 92008, contains an ampicillin resistance gene and may be transformed into E. coli strain DH10B, available from Life Technologies. See, for instance, Clark, J. M., Nuc. Acids Res. 16:9677-9686 (1988) and Mead, D. et al., Bio/Technology 9: (1991).

[0133] The present invention also relates to the genes corresponding to SEQ ID NO:X, SEQ ID NO:Y, and/or the deposited clone (Clone ID NO:Z). The corresponding gene can be isolated in accordance with known methods using the sequence information disclosed herein. Such methods include preparing probes or primers from the disclosed sequence and identifying or amplifying the corresponding gene from appropriate sources of genomic material.

[0134] Also provided in the present invention are allelic variants, orthologs, and/or species homologs. Procedures known in the art can be used to obtain full-length genes, allelic variants, splice variants, full-length coding portions, orthologs, and/or species homologs of genes corresponding to SEQ ID NO:X or the complement thereof, polypeptides encoded by genes corresponding to SEQ ID NO:X or the complement thereof, and/or the cDNA contained in Clone ID NO:Z, using information from the sequences disclosed herein or the clones deposited with the ATCC. For example, allelic variants and/or species homologs may be isolated and identified by making suitable probes or primers from the sequences provided herein and screening a suitable nucleic acid source for allelic variants and/or the desired homologue.

[0135] The polypeptides of the invention can be prepared in any suitable manner. Such polypeptides include isolated naturally occurring polypeptides, recombinantly produced polypeptides, synthetically produced polypeptides, or polypeptides produced by a combination of these methods. Means for preparing such polypeptides are well understood in the art.

[0136] The polypeptides may be in the form of the secreted protein, including the mature form, or may be a part of a larger protein, such as a fusion protein (see below). It is often advantageous to include an additional amino acid sequence which contains secretory or leader sequences, pro-sequences, sequences which aid in purification, such as multiple histidine residues, or an additional sequence for stability during recombinant production.

[0137] The polypeptides of the present invention are preferably provided in an isolated form, and preferably are substantially purified. A recombinantly produced version of a polypeptide, including the secreted polypeptide, can be substantially purified using techniques described herein or otherwise known in the art, such as, for example, by the one-step method described in Smith and Johnson, Gene 67:31-40 (1988). Polypeptides of the invention also can be purified from natural, synthetic or recombinant sources using techniques described herein or otherwise known in the art, such as, for example, antibodies of the invention raised against the polypeptides of the present invention in methods which are well known in the art.

[0138] The present invention provides a polynucleotide comprising, or alternatively consisting of, the nucleic acid sequence of SEQ ID NO:X, and/or the cDNA sequence contained in Clone ID NO:Z. The present invention also provides a polypeptide comprising, or alternatively, consisting of, the polypeptide sequence of SEQ ID NO:Y, a polypeptide encoded by SEQ ID NO:X or a complement thereof, a polypeptide encoded by the cDNA contained in Clone ID NO:Z, and/or the polypeptide sequence encoded by a nucleotide sequence in SEQ ID NO:B as defined in column 6 of Table 1C. Polynucleotides encoding a polypeptide comprising, or alternatively consisting of the polypeptide sequence of SEQ ID NO:Y, a polypeptide encoded by SEQ ID NO:X, a polypeptide encoded by the cDNA contained in Clone ID NO:Z, and/or a polypeptide sequence encoded by a nucleotide sequence in SEQ ID NO:B as defined in column 6 of Table 1C are also encompassed by the invention. The present invention further encompasses a polynucleotide comprising, or alternatively consisting of, the complement of the nucleic acid sequence of SEQ ID NO:X, a nucleic acid sequence encoding a polypeptide encoded by the complement of the nucleic acid sequence of SEQ ID NO:X, and/or the cDNA contained in Clone ID NO:Z.

[0139] Moreover, representative examples of polynucleotides of the invention comprise, or alternatively consist of, one, two, three, four, five, six, seven, eight, nine, ten, or more of the sequences delineated in Table 1C column 6, or any combination thereof. Additional, representative examples of polynucleotides of the invention comprise, or alternatively consist of, one, two, three, four, five, six, seven, eight, nine, ten, or more of the complementary strand(s) of the sequences delineated in Table 1C column 6, or any combination thereof. In further embodiments, the above-described polynucleotides of the invention comprise, or alternatively consist of, sequences delineated in Table 1C, column 6, and have a nucleic acid sequence which is different from that of the BAC fragment having the sequence disclosed in SEQ ID NO:B (see Table 1C, column 5). In additional embodiments, the above-described polynucleotides of the invention comprise, or alternatively consist of, sequences delineated in Table 1C, column 6, and have a nucleic acid sequence which is different from that published for the BAC clone identified as BAC ID NO:A (see Table 1C, column 4). In additional embodiments, the above-described polynucleotides of the invention comprise, or alternatively consist of, sequences delineated in Table 1C, column 6, and have a nucleic acid sequence which is different from that contained in the BAC clone identified as BAC ID NO:A (see Table 1C, column 4). Polypeptides encoded by these polynucleotides, other polynucleotides that encode these polypeptides, and antibodies that bind these polypeptides are also encompassed by the invention. Additionally, fragments and variants of the above-described polynucleotides and polypeptides are also encompassed by the invention.

[0140] Further, representative examples of polynucleotides of the invention comprise, or alternatively consist of, one, two, three, four, five, six, seven, eight, nine, ten, or more of the sequences delineated in column 6 of Table 1C which correspond to the same Clone ID NO:Z (see Table 1C, column 1), or any combination thereof. Additional, representative examples of polynucleotides of the invention comprise, or alternatively consist of, one, two, three, four, five, six, seven, eight, nine, ten, or more of the complementary strand(s) of the sequences delineated in column 6 of Table 1C which correspond to the same Clone ID NO:Z (see Table 1C, column 1), or any combination thereof. In further embodiments, the above-described polynucleotides of the invention comprise, or alternatively consist of, sequences delineated in column 6 of Table 1C which correspond to the same Clone ID NO:Z (see Table 1C, column 1) and have a nucleic acid sequence which is different from that of the BAC fragment having the sequence disclosed in SEQ ID NO:B (see Table 1C, column 5). In additional embodiments, the above-described polynucleotides of the invention comprise, or alternatively consist of, sequences delineated in column 6 of Table 1C which correspond to the same Clone ID NO:Z (see Table 1C, column 1) and have a nucleic acid sequence which is different from that published for the BAC clone identified as BAC ID NO:A (see Table 1C, column 4). In additional embodiments, the above-described polynucleotides of the invention comprise, or alternatively consist of, sequences delineated in column 6 of Table 1C which correspond to the same Clone ID NO:Z (see Table 1C, column 1) and have a nucleic acid sequence which is different from that contained in the BAC clone identified as BAC ID NO:A (see Table 1C, column 4). Polypeptides encoded by these polynucleotides, other polynucleotides that encode these polypeptides, and antibodies that bind these polypeptides are also encompassed by the invention. Additionally, fragments and variants of the above-described polynucleotides and polypeptides are also encompassed by the invention.

[0141] Further, representative examples of polynucleotides of the invention comprise, or alternatively consist of, one, two, three, four, five, six, seven, eight, nine, ten, or more of the sequences delineated in column 6 of Table 1C which correspond to the same contig sequence identifer SEQ ID NO:X (see Table 1C, column 2), or any combination thereof. Additional, representative examples of polynucleotides of the invention comprise, or alternatively consist of, one, two, three, four, five, six, seven, eight, nine, ten, or more of the complementary strand(s) of the sequences delineated in column 6 of Table 1C which correspond to the same contig sequence identifer SEQ ID NO:X (see Table 1C, column 2), or any combination thereof. In further embodiments, the above-described polynucleotides of the invention comprise, or alternatively consist of, sequences delineated in column 6 of Table 1C which correspond to the same contig sequence identifer SEQ ID NO:X (see Table 1C, column 2) and have a nucleic acid sequence which is different from that of the BAC fragment having the sequence disclosed in SEQ ID NO:B (see Table 1C, column 5). In additional embodiments, the above-described polynucleotides of the invention comprise, or alternatively consist of, sequences delineated in column 6 of Table 1C which correspond to the same contig sequence identifer SEQ ID NO:X (see Table 1C, column 2) and have a nucleic acid sequence which is different from that published for the BAC clone identified as BAC ID NO:A (see Table 1C, column 4). In additional embodiments, the above-described polynucleotides of the invention comprise, or alternatively consist of, sequences delineated in column 6 of Table 1C which correspond to the same contig sequence identifer SEQ ID NO:X (see Table 1C, column 2) and have a nucleic acid sequence which is different from that contained in the BAC clone identified as BAC ID NO:A (See Table 1C, column 4). Polypeptides encoded by these polynucleotides, other polynucleotides that encode these polypeptides, and antibodies that bind these polypeptides are also encompassed by the invention. Additionally, fragments and variants of the above-described polynucleotides and polypeptides are also encompassed by the invention.

[0142] Moreover, representative examples of polynucleotides of the invention comprise, or alternatively consist of, one, two, three, four, five, six, seven, eight, nine, ten, or more of the sequences delineated in the same row of Table 1C column 6, or any combination thereof. Additional, representative examples of polynucleotides of the invention comprise, or alternatively consist of, one, two, three, four, five, six, seven, eight, nine, ten, or more of the complementary strand(s) of the sequences delineated in the same row of Table 1C column 6, or any combination thereof. In preferred embodiments, the polynucleotides of the invention comprise, or alternatively consist of, one, two, three, four, five, six, seven, eight, nine, ten, or more of the complementary strand(s) of the sequences delineated in the same row of Table 1C column 6, wherein sequentially delineated sequences in the table (i.e. corresponding to those exons located closest to each other) are directly contiguous in a 5′ to 3′ orientation. In further embodiments, above-described polynucleotides of the invention comprise, or alternatively consist of, sequences delineated in the same row of Table 1C, column 6, and have a nucleic acid sequence which is different from that of the BAC fragment having the sequence disclosed in SEQ ID NO:B (see Table 1C, column 5). In additional embodiments, the above-described polynucleotides of the invention comprise, or alternatively consist of, sequences delineated in the same row of Table 1C, column 6, and have a nucleic acid sequence which is different from that published for the BAC clone identified as BAC ID NO:A (see Table 1C, column 4). In additional embodiments, the above-described polynucleotides of the invention comprise, or alternatively consist of, sequences delineated in the same row of Table 1C, column 6, and have a nucleic acid sequence which is different from that contained in the BAC clone identified as BAC ID NO:A (see Table 1C, column 4). Polypeptides encoded by these polynucleotides, other polynucleotides that encode these polypeptides, and antibodies that bind these polypeptides are also encompassed by the invention.

[0143] In additional specific embodiments, polynucleotides of the invention comprise, or alternatively consist of, one, two, three, four, five, six, seven, eight, nine, ten, or more of the sequences delineated in column 6 of Table 1C, and the polynucleotide sequence of SEQ ID NO:X (e.g., as defined in Table 1C, column 2) or fragments or variants thereof. Polypeptides encoded by these polynucleotides, other polynucleotides that encode these polypeptides, and antibodies that bind these polypeptides are also encompassed by the invention.

[0144] In additional specific embodiments, polynucleotides of the invention comprise, or alternatively consist of, one, two, three, four, five, six, seven, eight, nine, ten, or more of the sequences delineated in column 6 of Table 1C which correspond to the same Clone ID NO:Z (see Table 1C, column 1), and the polynucleotide sequence of SEQ ID NO:X (e.g., as defined in Table 1A, 1B, or 1C) or fragments or variants thereof. In preferred embodiments, the delineated sequence(s) and polynucleotide sequence of SEQ ID NO:X correspond to the same Clone ID NO:Z. Polypeptides encoded by these polynucleotides, other polynucleotides that encode these polypeptides, and antibodies that bind these polypeptides are also encompassed by the invention.

[0145] In further specific embodiments, polynucleotides of the invention comprise, or alternatively consist of, one, two, three, four, five, six, seven, eight, nine, ten, or more of the sequences delineated in the same row of column 6 of Table 1C, and the polynucleotide sequence of SEQ ID NO:X (e.g., as defined in Table 1A, 1B, or 1C) or fragments or variants thereof. In preferred embodiments, the delineated sequence(s) and polynucleotide sequence of SEQ ID NO:X correspond to the same row of column 6 of Table 1C. Polypeptides encoded by these polynucleotides, other polynucleotides that encode these polypeptides, and antibodies that bind these polypeptides are also encompassed by the invention.

[0146] In additional specific embodiments, polynucleotides of the invention comprise, or alternatively consist of a polynucleotide sequence in which the 3′ 10 polynucleotides of one of the sequences delineated in column 6 of Table 1C and the 5′ 10 polynucleotides of the sequence of SEQ ID NO:X are directly contiguous. Nucleic acids which hybridize to the complement of these 20 contiguous polynucleotides under stringent hybridization conditions or alternatively, under lower stringency conditions, are also encompassed by the invention. Polypeptides encoded by these polynucleotides and/or nucleic acids, other polynucleotides and/or nucleic acids that encode these polypeptides, and antibodies that bind these polypeptides are also encompassed by the invention. Additionally, fragments and variants of the above-described polynucleotides, nucleic acids, and polypeptides are also encompassed by the invention.

[0147] In additional specific embodiments, polynucleotides of the invention comprise, or alternatively consist of, a polynucleotide sequence in which the 3′ 10 polynucleotides of one of the sequences delineated in column 6 of Table 1C and the 5′ 10 polynucleotides of a fragment or variant of the sequence of SEQ ID NO:X are directly contiguous Nucleic acids which hybridize to the complement of these 20 contiguous polynucleotides under stringent hybridization conditions or alternatively, under lower stringency conditions, are also encompassed by the invention. Polypeptides encoded by these polynucleotides and/or nucleic acids, other polynucleotides and/or nucleic acids encoding these polypeptides, and antibodies that bind these polypeptides are also encompassed by the invention. Additionally, fragments and variants of the above-described polynucleotides, nucleic acids, and polypeptides are also encompassed by the invention.

[0148] In specific embodiments, polynucleotides of the invention comprise, or alternatively consist of, a polynucleotide sequence in which the 3′ 10 polynucleotides of the sequence of SEQ ID NO:X and the 5′ 10 polynucleotides of the sequence of one of the sequences delineated in column 6 of Table 1C are directly contiguous. Nucleic acids which hybridize to the complement of these 20 contiguous polynucleotides under stringent hybridization conditions or alternatively, under lower stringency conditions, are also encompassed by the invention. Polypeptides encoded by these polynucleotides and/or nucleic acids, other polynucleotides and/or nucleic acids encoding these polypeptides, and antibodies that bind these polypeptides are also encompassed by the invention. Additionally, fragments and variants of the above-described polynucleotides, nucleic acids, and polypeptides are also encompassed by the invention.

[0149] In specific embodiments, polynucleotides of the invention comprise, or alternatively consist of, a polynucleotide sequence in which the 3′ 10 polynucleotides of a fragment or variant of the sequence of SEQ ID NO:X and the 5′ 10 polynucleotides of the sequence of one of the sequences delineated in column 6 of Table 1C are directly contiguous. Nucleic acids which hybridize to the complement of these 20 contiguous polynucleotides under stringent hybridization conditions or alternatively, under lower stringency conditions, are also encompassed by the invention. Polypeptides encoded by these polynucleotides and/or nucleic acids, other polynucleotides and/or nucleic acids encoding these polypeptides, and antibodies that bind these polypeptides are also encompassed by the invention. Additionally, fragments and variants of the above-described polynucleotides, nucleic acids, and polypeptides, are also encompassed by the invention.

[0150] In further specific embodiments, polynucleotides of the invention comprise, or alternatively consist of, a polynucleotide sequence in which the 3′ 10 polynucleotides of one of the sequences delineated in column 6 of Table 1C and the 5′ 10 polynucleotides of another sequence in column 6 are directly contiguous. Nucleic acids which hybridize to the complement of these 20 contiguous polynucleotides under stringent hybridization conditions or alternatively, under lower stringency conditions, are also encompassed by the invention. Polypeptides encoded by these polynucleotides and/or nucleic acids, other polynucleotides and/or nucleic acids encoding these polypeptides, and antibodies that bind these polypeptides are also encompassed by the invention. Additionally, fragments and variants of the above-described polynucleotides, nucleic acids, and polypeptides are also encompassed by the invention.

[0151] In specific embodiments, polynucleotides of the invention comprise, or alternatively consist of, a polynucleotide sequence in which the 3′ 10 polynucleotides of one of the sequences delineated in column 6 of Table 1C and the 5′ 10 polynucleotides of another sequence in column 6 corresponding to the same Clone ID NO:Z (see Table 1C, column 1) are directly contiguous. Nucleic acids which hybridize to the complement of these 20 lower stringency conditions, are also encompassed by the invention. Polypeptides encoded by these polynucleotides and/or nucleic acids, other polynucleotides and/or nucleic acids encoding these polypeptides, and antibodies that bind these polypeptides are also encompassed by the invention. Additionally, fragments and variants of the above-described polynucleotides, nucleic acids, and polypeptides are also encompassed by the invention.

[0152] In specific embodiments, polynucleotides of the invention comprise, or alternatively consist of, a polynucleotide sequence in which the 3′ 10 polynucleotides of one sequence in column 6 corresponding to the same contig sequence identifer SEQ ID NO:X (see Table 1C, column 2) are directly contiguous. Nucleic acids which hybridize to the complement of these 20 contiguous polynucleotides under stringent hybridization conditions or alternatively, under lower stringency conditions, are also encompassed by the invention. Polypeptides encoded by these polynucleotides and/or nucleic acids, other polynucleotides and/or nucleic acids encoding these polypeptides, and antibodies that bind these polypeptides are also encompassed by the invention. Additionally, fragments and variants of the above-described polynucleotides, nucleic acids, and polypeptides are also encompassed by the invention.

[0153] In specific embodiments, polynucleotides of the invention comprise, or alternatively consist of a polynucleotide sequence in which the 3′ 10 polynucleotides of one of the sequences delineated in column 6 of Table 1C and the 5′ 10 polynucleotides of another sequence in column 6 corresponding to the same row are directly contiguous. In preferred embodiments, the 3′ 10 polynucleotides of one of the sequences delineated in column 6 of Table 1C is directly contiguous with the 5′ 10 polynucleotides of the next sequential exon delineated in Table 1C, column 6. Nucleic acids which hybridize to the complement of these 20 contiguous polynucleotides under stringent hybridization conditions or alternatively, under lower stringency conditions, are also encompassed by the invention. Polypeptides encoded by these polynucleotides and/or nucleic acids, other polynucleotides and/or nucleic acids encoding these polypeptides, and antibodies that bind these polypeptides are also encompassed by the invention. Additionally, fragments and variants of the above-described polynucleotides, nucleic acids, and polypeptides are also encompassed by the invention.

[0154] Many polynucleotide sequences, such as EST sequences, are publicly available and accessible through sequence databases and may have been publicly available prior to conception of the present invention. Preferably, such related polynucleotides are specifically excluded from the scope of the present invention. Accordingly, for each contig sequence (SEQ ID NO:X) listed in the fifth column of Table 1A and/or the fourth column of Table 1B, preferably excluded are one or more polynucleotides comprising a nucleotide sequence described by the general formula of a-b, where a is any integer between 1 and the final nucleotide minus 15 of SEQ ID NO:X, b is an integer of 15 to the final nucleotide of SEQ ID NO:X, where both a and b correspond to the positions of nucleotide residues shown in SEQ ID NO:X, and where b is greater than or equal to a +14. More specifically, preferably excluded are one or more polynucleotides comprising a nucleotide sequence described by the general formula of a-b, where a and b are integers as defined in columns 4 and 5, respectively, of Table 3. In specific embodiments, the polynucleotides of the invention do not consist of at least one, two, three, four, five, ten, or more of the specific polynucleotide sequences referenced by the Genbank Accession No. as disclosed in column 6 of Table 3 (including for example, published sequence in connection with a particular BAC clone). In further embodiments, preferably excluded from the invention are the specific polynucleotide sequence(s) contained in the clones corresponding to at least one, two, three, four, five, ten, or more of the available material having the accession numbers identified in the sixth column of this Table (including for example, the actual sequence contained in an identified BAC clone). In no way is this listing meant to encompass all of the sequences which may be excluded by the general formula, it is just a representative example. All references available through these accessions are hereby incorporated by reference in their entirety.

LENGTHY TABLE REFERENCED HERE
US20070048818A1-20070301-T00006
Please refer to the end of the specification for access instructions.

LENGTHY TABLE REFERENCED HERE
US20070048818A1-20070301-T00007
Please refer to the end of the specification for access instructions.

LENGTHY TABLE REFERENCED HERE
US20070048818A1-20070301-T00008
Please refer to the end of the specification for access instructions.

Mature Polypeptides

[0155] The present invention also encompasses mature forms of a polypeptide having the amino acid sequence of SEQ ID NO:Y and/or the amino acid sequence encoded by the cDNA in a deposited clone. Polynucleotides encoding the mature forms (such as, for example, the polynucleotide sequence in SEQ ID NO:X and/or the polynucleotide sequence contained in the cDNA of a deposited clone) are also encompassed by the invention. Moreover, fragments or variants of these polypeptides (such as, fragments as described herein, polypeptides at least 80%, 85%, 90%, 95%, 96%, 97%, 98%, 99%, or 100% identical to these polypeptides, or polypeptides encoded by a polynucleotide that hybridizes under stringent conditions to the complementary strand of the polynucleotide encoding these polypeptides) are also encompassed by the invention. In preferred embodiments, these fragments or variants retain one or more functional acitivities of the full-length or mature form of the polypeptide (e.g., biological activity, antigenicity [ability to bind (or compete with a polypeptide of the invention for binding) to an anti-polypeptide of the invention antibody], immunogenicity (ability to generate antibody which binds to a specific polypeptide of the invention), ability to form multimers with polypeptides of the invention, and ability to bind to a receptor or ligand for a polypeptide of the invention). Antibodies that bind the polypeptides of the invention, and polynucleotides encoding these polypeptides are also encompassed by the invention.

[0156] According to the signal hypothesis, proteins secreted by mammalian cells have a signal or secretary leader sequence which is cleaved from the mature protein once export of the growing protein chain across the rough endoplasmic reticulum has been initiated. Most mammalian cells and even insect cells cleave secreted proteins with the same specificity. However, in some cases, cleavage of a secreted protein is not entirely uniform, which results in two or more mature species of the protein. Further, it has long been known that cleavage specificity of a secreted protein is ultimately determined by the primary structure of the complete protein, that is, it is inherent in the amino acid sequence of the polypeptide.

[0157] Methods for predicting whether a protein has a signal sequence, as well as the cleavage point for that sequence, are available. For instance, the method of McGeoch, Virus Res. 3:271-286 (1985), uses the information from a short N-terminal charged region and a subsequent uncharged region of the complete (uncleaved) protein. The method of von Heinje, Nucleic Acids Res. 14:4683-4690 (1986) uses the information from the residues surrounding the cleavage site, typically residues −13 to +2, where +1 indicates the amino terminus of the secreted protein. The accuracy of predicting the cleavage points of known mammalian secretory proteins for each of these methods is in the range of 75-80%. (von Heinje, supra.) However, the two methods do not always produce the same predicted cleavage point(s) for a given protein.

[0158] In the present case, the deduced amino acid sequence of the secreted polypeptide was analyzed by a computer program called SignalP (Henrik Nielsen et al., Protein Engineering 10:1-6 (1997)), which predicts the cellular location of a protein based on the amino acid sequence. As part of this computational prediction of localization, the methods of McGeoch and von Heinje are incorporated. The analysis of the amino acid sequences of the secreted proteins described herein by this program provided the results shown in Table 1A.

[0159] In specific embodiments, polypeptides of the invention comprise, or alternatively consist of, the predicted mature form of the polypeptide as delineated in columns 14 and 15 of Table 1A. Moreover, fragments or variants of these polypeptides (such as, fragments as described herein, polypeptides at least 80%, 85%, 90%, 95%, 96%, 97%, 98%, 99%, or 100% identical to these polypeptides, or polypeptides encoded by a polynucleotide that hybridizes under stringent conditions to the complementary strand of the polynucleotide encoding these polypeptides) are also encompassed by the invention. In preferred embodiments, these fragments or variants retain one or more functional acitivities of the full-length or mature form of the polypeptide (e.g., biological activity, antigenicity [ability to bind (or compete with a polypeptide of the invention for binding) to an anti-polypeptide of the invention antibody], immunogenicity (ability to generate antibody which binds to a specific polypeptide of the invention), ability to form multimers with polypeptides of the invention, and ability to bind to a receptor or ligand for a polypeptide of the invention). Antibodies that bind the polypeptides of the invention, and polynucleotides encoding these polypeptides are also encompassed by the invention.

[0160] Polynucleotides encoding proteins comprising, or consisting of, the predicted mature form of polypeptides of the invention (e.g., polynucleotides having the sequence of SEQ ID NO: X (Table 1A, column 4), the sequence delineated in columns 7 and 8 of Table 1A, and a sequence encoding the mature polypeptide delineated in columns 14 and 15 of Table 1A (e.g., the sequence of SEQ ID NO:X encoding the mature polypeptide delineated in columns 14 and 15 of Table 1)) are also encompassed by the invention, as are fragments or variants of these polynucleotides (such as, fragments as described herein, polynucleotides at least 80%, 85%, 90%, 95%, 96%, 97%, 98%, 99%, or 100% identical to these polyncueotides, and nucleic acids which hybridizes under stringent conditions to the complementary strand of the polynucleotide).

[0161] As one of ordinary skill would appreciate, however, cleavage sites sometimes vary from organism to organism and cannot be predicted with absolute certainty. Accordingly, the present invention provides secreted polypeptides having a sequence shown in SEQ ID NO:Y which have an N-terminus beginning within 15 residues of the predicted cleavage point (i.e., having 1, 2, 3, 4, 5, 6, 7, 8, 9, 10, 11, 12, 13, 14, or 15 more or less contiguous residues of SEQ ID NO:Y at the N-terminus when compared to the predicted mature form of the polypeptide (e.g., the mature polypeptide delineated in columns 14 and 15 of Table 1). Similarly, it is also recognized that in some cases, cleavage of the signal sequence from a secreted protein is not entirely uniform, resulting in more than one secreted species. These polypeptides, and the polynucleotides encoding such polypeptides, are contemplated by the present invention.

[0162] Moreover, the signal sequence identified by the above analysis may not necessarily predict the naturally occurring signal sequence. For example, the naturally occurring signal sequence may be further upstream from the predicted signal sequence. However, it is likely that the predicted signal sequence will be capable of directing the secreted protein to the ER. Nonetheless, the present invention provides the mature protein produced by expression of the polynucleotide sequence of SEQ ID NO:X and/or the polynucleotide sequence contained in the cDNA of a deposited clone, in a mammalian cell (e.g., COS cells, as desribed below). These polypeptides, and the polynucleotides encoding such polypeptides, are contemplated by the present invention.

Polynucleotide and Polypeptide Variants

[0163] The present invention is also directed to variants of the polynucleotide sequence disclosed in SEQ ID NO:X or the complementary strand thereto, nucleotide sequences encoding the polypeptide of SEQ ID NO:Y, the nucleotide sequence of SEQ ID NO:X that encodes the polypeptide sequence as defined in columns 13 and 14 of Table 1A, nucleotide sequences encoding the polypeptide sequence as defined in columns 13 and 14 of Table 1A, the nucleotide sequence of SEQ ID NO:X encoding the polypeptide sequence as defined in column 7 of Table 1B, nucleotide sequences encoding the polypeptide as defined in column 7 of Table 1B, the nucleotide sequence as defined in columns 8 and 9 of Table 2, nucleotide sequences encoding the polypeptide encoded by the nucleotide sequence as defined in columns 8 and 9 of Table 2, the nucleotide sequence as defined in column 6 of Table 1C, nucleotide sequences encoding the polypeptide encoded by the nucleotide sequence as defined in column 6 of Table 1C, the cDNA sequence contained in Clone ID NO:Z, nucleotide sequences encoding the polypeptide encoded by the cDNA sequence contained in Clone ID NO:Z, and/or nucleotide sequences encoding a mature (secreted) polypeptide encoded by the cDNA sequence contained in Clone ID NO:Z.

[0164] The present invention also encompasses variants of the polypeptide sequence disclosed in SEQ ID NO:Y, the polypeptide as defined in columns 13 and 14 of Table 1A, the polypeptide sequence as defined in column 7 of Table 1B, a polypeptide sequence encoded by the polynucleotide sequence in SEQ ID NO:X, a polypeptide sequence encoded by the nucleotide sequence as defined in columns 8 and 9 of Table 2, a polypeptide sequence encoded by the nucleotide sequence as defined in column 6 of Table 1C, a polypeptide sequence encoded by the complement of the polynucleotide sequence in SEQ ID NO:X, the polypeptide sequence encoded by the cDNA sequence contained in Clone ID NO:Z and/or a mature (secreted) polypeptide encoded by the cDNA sequence contained in Clone ID NO:Z.

[0165] “Variant” refers to a polynucleotide or polypeptide differing from the polynucleotide or polypeptide of the present invention, but retaining essential properties thereof. Generally, variants are overall closely similar, and, in many regions, identical to the polynucleotide or polypeptide of the present invention.

[0166] “Variant” refers to a polynucleotide or polypeptide differing from the polynucleotide or polypeptide of the present invention, but retaining essential properties thereof. Generally, variants are overall closely similar, and, in many regions, identical to the polynucleotide or polypeptide of the present invention.

[0167] Thus, one aspect of the invention provides an isolated nucleic acid molecule comprising, or alternatively consisting of, a polynucleotide having a nucleotide sequence selected from the group consisting of: (a) a nucleotide sequence described in SEQ ID NO:X or contained in the cDNA sequence of Clone ID NO:Z; (b) a nucleotide sequence in SEQ ID NO:X or the cDNA in Clone ID NO:Z which encodes the complete amino acid sequence of SEQ ID NO:Y or the complete amino acid sequence encoded by the cDNA in Clone ID NO:Z; (c) a nucleotide sequence in SEQ ID NO:X or the cDNA in Clone ID NO:Z which encodes a mature polypeptide (i.e., a secreted polypeptide (e.g., as delineated in columns 14 and 15 of Table 1A)); (d) a nucleotide sequence in SEQ ID NO:X or the cDNA sequence of Clone ID NO:Z, which encodes a biologically active fragment of a polypeptide; (e) a nucleotide sequence in SEQ ID NO:X or the cDNA sequence of Clone ID NO:Z, which encodes an antigenic fragment of a polypeptide; (f) a nucleotide sequence encoding a polypeptide comprising the complete amino acid sequence of SEQ ID NO:Y or the complete amino acid sequence encoded by the cDNA in Clone ID NO:Z; (g) a nucleotide sequence encoding a mature polypeptide of the amino acid sequence of SEQ ID NO:Y (i.e., a secreted polypeptide (e.g., as delineated in columns 14 and 15 of Table 1A)) or a mature polypeptide of the amino acid sequence encoded by the cDNA in Clone ID NO:Z; (h) a nucleotide sequence encoding a biologically active fragment of a polypeptide having the complete amino acid sequence of SEQ ID NO:Y or the complete amino acid sequence encoded by the cDNA in Clone ID NO:Z; (i) a nucleotide sequence encoding an antigenic fragment of a polypeptide having the complete amino acid sequence of SEQ ID NO:Y or the complete amino acid sequence encoded by the cDNA in Clone ID NO:Z; and (j) a nucleotide sequence complementary to any of the nucleotide sequences in (a), (b), (c), (d), (e), (f), (g), (h), or (i) above.

[0168] The present invention is also directed to nucleic acid molecules which comprise, or alternatively consist of, a nucleotide sequence which is at least 80%, 85%, 90%, 95%, 96%, 97%, 98%, 99% or 100%, identical to, for example, any of the nucleotide sequences in (a), (b), (c), (d), (e), (f), (g), (h), (i), or (j) above, the nucleotide coding sequence in SEQ ID NO:X or the complementary strand thereto, the nucleotide coding sequence of the cDNA contained in Clone ID NO:Z or the complementary strand thereto, a nucleotide sequence encoding the polypeptide of SEQ ID NO:Y, a nucleotide sequence encoding a polypeptide sequence encoded by the nucleotide sequence in SEQ ID NO:X, a polypeptide sequence encoded by the complement of the polynucleotide sequence in SEQ ID NO:X, a nucleotide sequence encoding the polypeptide encoded by the cDNA contained in Clone ID NO:Z, the nucleotide coding sequence in SEQ ID NO:X as defined in columns 8 and 9 of Table 2 or the complementary strand thereto, a nucleotide sequence encoding the polypeptide encoded by the nucleotide sequence in SEQ ID NO:X as defined in columns 8 and 9 of Table 2 or the complementary strand thereto, the nucleotide coding sequence in SEQ ID NO:B as defined in column 6 of Table 1C or the complementary strand thereto, a nucleotide sequence encoding the polypeptide encoded by the nucleotide sequence in SEQ ID NO:B as defined in column 6 of Table 1C or the complementary strand thereto, the nucleotide sequence in SEQ ID NO:X encoding the polypeptide sequence as defined in column 7 of Table 1B or the complementary strand thereto, nucleotide sequences encoding the polypeptide as defined in column 7 of Table 1B or the complementary strand thereto, and/or polynucleotide fragments of any of these nucleic acid molecules (e.g., those fragments described herein). Polynucleotides which hybridize to the complement of these nucleic acid molecules under stringent hybridization conditions or alternatively, under lower stringency conditions, are also encompassed by the invention, as are polypeptides encoded by these polynucleotides and nucleic acids.

[0169] In a preferred embodiment, the invention encompasses nucleic acid molecules which comprise, or alternatively, consist of a polynucleotide which hybridizes under stringent hybridization conditions, or alternatively, under lower stringency conditions, to a polynucleotide in (a), (b), (c), (d), (e), (f), (g), (h), or (i), above, as are polypeptides encoded by these polynucleotides. In another preferred embodiment, polynucleotides which hybridize to the complement of these nucleic acid molecules under stringent hybridization conditions, or alternatively, under lower stringency conditions, are also encompassed by the invention, as are polypeptides encoded by these polynucleotides.

[0170] In another embodiment, the invention provides a purified protein comprising, or alternatively consisting of, a polypeptide having an amino acid sequence selected from the group consisting of: (a) the complete amino acid sequence of SEQ ID NO:Y or the complete amino acid sequence encoded by the cDNA in Clone ID NO:Z; (b) the amino acid sequence of a mature (secreted) form of a polypeptide having the amino acid sequence of SEQ ID NO:Y (e.g., as delineated in columns 14 and 15 of Table 1A) or a mature form of the amino acid sequence encoded by the cDNA in Clone ID NO:Z mature; (c) the amino acid sequence of a biologically active fragment of a polypeptide having the complete amino acid sequence of SEQ ID NO:Y or the complete amino acid sequence encoded by the cDNA in Clone ID NO:Z; and (d) the amino acid sequence of an antigenic fragment of a polypeptide having the complete amino acid sequence of SEQ ID NO:Y or the complete amino acid sequence encoded by the cDNA in Clone ID NO:Z.

[0171] The present invention is also directed to proteins which comprise, or alternatively consist of, an amino acid sequence which is at least 80%, 85%, 90%, 95%, 96%, 97%, 98%, 99% or 100%, identical to, for example, any of the amino acid sequences in (a), (b), (c), or (d), above, the amino acid sequence shown in SEQ ID NO:Y, the amino acid sequence encoded by the cDNA contained in Clone ID NO:Z, the amino acid sequence of the polypeptide encoded by the nucleotide sequence in SEQ ID NO:X as defined in columns 8 and 9 of Table 2, the amino acid sequence of the polypeptide encoded by the nucleotide sequence in SEQ ID NO:B as defined in column 6 of Table 1C, the amino acid sequence as defined in column 7 of Table 1B, an amino acid sequence encoded by the nucleotide sequence in SEQ ID NO:X, and an amino acid sequence encoded by the complement of the polynucleotide sequence in SEQ ID NO:X. Fragments of these polypeptides are also provided (e.g., those fragments described herein). Further proteins encoded by polynucleotides which hybridize to the complement of the nucleic acid molecules encoding these amino acid sequences under stringent hybridization conditions or alternatively, under lower stringency conditions, are also encompassed by the invention, as are the polynucleotides encoding these proteins.

[0172] By a nucleic acid having a nucleotide sequence at least, for example, 95% “identical” to a reference nucleotide sequence of the present invention, it is intended that the nucleotide sequence of the nucleic acid is identical to the reference sequence except that the nucleotide sequence may include up to five point mutations per each 100 nucleotides of the reference nucleotide sequence encoding the polypeptide. In other words, to obtain a nucleic acid having a nucleotide sequence at least 95% identical to a reference nucleotide sequence, up to 5% of the nucleotides in the reference sequence may be deleted or substituted with another nucleotide, or a number of nucleotides up to 5% of the total nucleotides in the reference sequence may be inserted into the reference sequence. The query sequence may be an entire sequence referred to in Table 1B or 2 as the ORF (open reading frame), or any fragment specified as described herein.

[0173] As a practical matter, whether any particular nucleic acid molecule or polypeptide is at least 80%, 85%, 90%, 95%, 96%, 97%, 98% or 99% identical to a nucleotide sequence of the present invention can be determined conventionally using known computer programs. A preferred method for determining the best overall match between a query sequence (a sequence of the present invention) and a subject sequence, also referred to as a global sequence alignment, can be determined using the FASTDB computer program based on the algorithm of Brutlag et al. (Comp. App. Biosci. 6:237-245 (1990)). In a sequence alignment the query and subject sequences are both DNA sequences. An RNA sequence can be compared by converting U's to T's. The result of said global sequence alignment is expressed as percent identity. Preferred parameters used in a FASTDB alignment of DNA sequences to calculate percent identity are: Matrix=Unitary, k-tuple=4, Mismatch Penalty=1, Joining Penalty=30, Randomization Group Length=0, Cutoff Score=1, Gap Penalty=5, Gap Size Penalty 0.05, Window Size=500 or the length of the subject nucleotide sequence, whichever is shorter.

[0174] If the subject sequence is shorter than the query sequence because of 5′ or 3′ deletions, not because of internal deletions, a manual correction must be made to the results. This is because the FASTDB program does not account for 5′ and 3′ truncations of the subject sequence when calculating percent identity. For subject sequences truncated at the 5′ or 3′ ends, relative to the query sequence, the percent identity is corrected by calculating the number of bases of the query sequence that are 5′ and 3′ of the subject sequence, which are not matched/aligned, as a percent of the total bases of the query sequence. Whether a nucleotide is matched/aligned is determined by results of the FASTDB sequence alignment. This percentage is then subtracted from the percent identity, calculated by the above FASTDB program using the specified parameters, to arrive at a final percent identity score. This corrected score is what is used for the purposes of the present invention. Only bases outside the 5′ and 3′ bases of the subject sequence, as displayed by the FASTDB alignment, which are not matched/aligned with the query sequence, are calculated for the purposes of manually adjusting the percent identity score.

[0175] For example, a 90 base subject sequence is aligned to a 100 base query sequence to determine percent identity. The deletions occur at the 5′ end of the subject sequence and therefore, the FASTDB alignment does not show a matched/alignment of the first 10 bases at 5′ end. The 10 unpaired bases represent 10% of the sequence (number of bases at the 5′ and 3′ ends not matched/total number of bases in the query sequence) so 10% is subtracted from the percent identity score calculated by the FASTDB program. If the remaining 90 bases were perfectly matched the final percent identity would be 90%. In another example, a 90 base subject sequence is compared with a 100 base query sequence. This time the deletions are internal deletions so that there are no bases on the 5′ or 3′ of the subject sequence which are not matched/aligned with the query. In this case the percent identity calculated by FASTDB is not manually corrected. Once again, only bases 5′ and 3′ of the subject sequence which are not matched/aligned with the query sequence are manually corrected for. No other manual corrections are to be made for the purposes of the present invention.

[0176] For example, a 90 base subject sequence is aligned to a 100 base query sequence to determine percent identity. The deletions occur at the 5′ end of the subject sequence and therefore, the FASTDB alignment does not show a matched/alignment of the first 10 bases at 5′ end. The 10 unpaired bases represent 10% of the sequence (number of bases at the 5′ and 3′ ends not matched/total number of bases in the query sequence) so 10% is subtracted from the percent identity score calculated by the FASTDB program. If the remaining 90 bases were perfectly matched the final percent identity would be 90%. In another example, a 90 base subject sequence is compared with a 100 base query sequence. This time the deletions are internal deletions so that there are no bases on the 5′ or 3′ of the subject sequence which are not matched/aligned with the query. In this case the percent identity calculated by FASTDB is not manually corrected. Once again, only bases 5′ and 3′ of the subject sequence which are not matched/aligned with the query sequence are manually corrected for. No other manual corrections are to be made for the purposes of the present invention.

[0177] By a polypeptide having an amino acid sequence at least, for example, 95% “identical” to a query amino acid sequence of the present invention, it is intended that the amino acid sequence of the subject polypeptide is identical to the query sequence except that the subject polypeptide sequence may include up to five amino acid alterations per each 100 amino acids of the query amino acid sequence. In other words, to obtain a polypeptide having an amino acid sequence at least 95% identical to a query amino acid sequence, up to 5% of the amino acid residues in the subject sequence may be inserted, deleted, (indels) or substituted with another amino acid. These alterations of the reference sequence may occur at the amino or carboxy terminal positions of the reference amino acid sequence or anywhere between those terminal positions, interspersed either individually among residues in the reference sequence or in one or more contiguous groups within the reference sequence.

[0178] As a practical matter, whether any particular polypeptide is at least 80%, 85%, 90%, 95%, 96%, 97%, 98% or 99% identical to, for instance, the amino acid sequence of a polypeptide referred to in Table 1A (e.g., the amino acid sequence delineated in columns 14 and 15) or a fragment thereof, Table 1B (e.g., the amino acid sequence identified in column 6) or a fragment thereof, Table 2 (e.g., the amino acid sequence of the polypeptide encoded by the polynucleotide sequence defined in columns 8 and 9 of Table 2) or a fragment thereof, the amino acid sequence of the polypeptide encoded by the polynucleotide sequence in SEQ ID NO:B as defined in column 6 of Table 1C or a fragment thereof, the amino acid sequence of the polypeptide encoded by the nucleotide sequence in SEQ ID NO:X or a fragment thereof, or the amino acid sequence of the polypeptide encoded by cDNA contained in Clone ID NO:Z, or a fragment thereof, the amino acid sequence of a mature (secreted) polypeptide encoded by cDNA contained in Clone ID NO:Z, or a fragment thereof, can be determined conventionally using known computer programs. A preferred method for determining the best overall match between a query sequence (a sequence of the present invention) and a subject sequence, also referred to as a global sequence alignment, can be determined using the FASTDB computer program based on the algorithm of Brutlag et al. (Comp. App. Biosci. 6:237-245 (1990)). In a sequence alignment the query and subject sequences are either both nucleotide sequences or both amino acid sequences. The result of said global sequence alignment is expressed as percent identity. Preferred parameters used in a FASTDB amino acid alignment are: Matrix=PAM 0, k-tuple=2, Mismatch Penalty=1, Joining Penalty=20, Randomization Group Length=0, Cutoff Score=1, Window Size=sequence length, Gap Penalty=5, Gap Size Penalty=0.05, Window Size=500 or the length of the subject amino acid sequence, whichever is shorter.

[0179] If the subject sequence is shorter than the query sequence due to N- or C-terminal deletions, not because of internal deletions, a manual correction must be made to the results. This is because the FASTDB program does not account for N- and C-terminal truncations of the subject sequence when calculating global percent identity. For subject sequences truncated at the N- and C-termini, relative to the query sequence, the percent identity is corrected by calculating the number of residues of the query sequence that are N- and C-terminal of the subject sequence, which are not matched/aligned with a corresponding subject residue, as a percent of the total bases of the query sequence. Whether a residue is matched/aligned is determined by results of the FASTDB sequence alignment. This percentage is then subtracted from the percent identity, calculated by the above FASTDB program using the specified parameters, to arrive at a final percent identity score. This final percent identity score is what is used for the purposes of the present invention. Only residues to the N- and C-termini of the subject sequence, which are not matched/aligned with the query sequence, are considered for the purposes of manually adjusting the percent identity score. That is, only query residue positions outside the farthest N- and C-terminal residues of the subject sequence.

[0180] For example, a 90 amino acid residue subject sequence is aligned with a 100 residue query sequence to determine percent identity. The deletion occurs at the N-terminus of the subject sequence and therefore, the FASTDB alignment does not show a matching/alignment of the first 10 residues at the N-terminus. The 10 unpaired residues represent 10% of the sequence (number of residues at the N- and C-termini not matched/total number of residues in the query sequence) so 10% is subtracted from the percent identity score calculated by the FASTDB program. If the remaining 90 residues were perfectly matched the final percent identity would be 90%. In another example, a 90 residue subject sequence is compared with a 100 residue query sequence. This time the deletions are internal deletions so there are no residues at the N- or C-termini of the subject sequence which are not matched/aligned with the query. In this case the percent identity calculated by FASTDB is not manually corrected. Once again, only residue positions outside the N- and C-terminal ends of the subject sequence, as displayed in the FASTDB alignment, which are not matched/aligned with the query sequnce are manually corrected for. No other manual corrections are to made for the purposes of the present invention.

[0181] The polynucleotide variants of the invention may contain alterations in the coding regions, non-coding regions, or both. Especially preferred are polynucleotide variants containing alterations which produce silent substitutions, additions, or deletions, but do not alter the properties or activities of the encoded polypeptide. Nucleotide variants produced by silent substitutions due to the degeneracy of the genetic code are preferred. Moreover, polypeptide variants in which less than 50, less than 40, less than 30, less than 20, less than 10, or 5-50, 5-25, 5-10, 1-5, or 1-2 amino acids are substituted, deleted, or added in any combination are also preferred. Polynucleotide variants can be produced for a variety of reasons, e.g., to optimize codon expression for a particular host (change codons in the human mRNA to those preferred by a bacterial host such as E. coli).

[0182] Naturally occurring variants are called “allelic variants,” and refer to one of several alternate forms of a gene occupying a given locus on a chromosome of an organism. (Genes II, Lewin, B., ed., John Wiley & Sons, New York (1985)). These allelic variants can vary at either the polynucleotide and/or polypeptide level and are included in the present invention. Alternatively, non-naturally occurring variants may be produced by mutagenesis techniques or by direct synthesis.

[0183] Using known methods of protein engineering and recombinant DNA technology, variants may be generated to improve or alter the characteristics of the polypeptides of the present invention. For instance, one or more amino acids can be deleted from the N-terminus or C-terminus of the polypeptide of the present invention without substantial loss of biological function. As an example, Ron et al. (J. Biol. Chem. 268: 2984-2988 (1993)) reported variant KGF proteins having heparin binding activity even after deleting 3, 8, or 27 amino-terminal amino acid residues. Similarly, Interferon gamma exhibited up to ten times higher activity after deleting 8-10 amino acid residues from the carboxy terminus of this protein. (Dobeli et al., J. Biotechnology 7:199-216 (1988).)

[0184] Moreover, ample evidence demonstrates that variants often retain a biological activity similar to that of the naturally occurring protein. For example, Gayle and coworkers (J. Biol. Chem. 268:22105-22111 (1993)) conducted extensive mutational analysis of human cytokine IL-1a. They used random mutagenesis to generate over 3,500 individual IL-1a mutants that averaged 2.5 amino acid changes per variant over the entire length of the molecule. Multiple mutations were examined at every possible amino acid position. The investigators found that “[m]ost of the molecule could be altered with little effect on either [binding or biological activity].” In fact, only 23 unique amino acid sequences, out of more than 3,500 nucleotide sequences examined, produced a protein that significantly differed in activity from wild-type.

[0185] Furthermore, even if deleting one or more amino acids from the N-terminus or C-terminus of a polypeptide results in modification or loss of one or more biological functions, other biological activities may still be retained. For example, the ability of a deletion variant to induce and/or to bind antibodies which recognize the secreted form will likely be retained when less than the majority of the residues of the secreted form are removed from the N-terminus or C-terminus. Whether a particular polypeptide lacking N- or C-terminal residues of a protein retains such immunogenic activities can readily be determined by routine methods described herein and otherwise known in the art.

[0186] Thus, the invention further includes polypeptide variants which show a functional activity (e.g., biological activity) of the polypeptides of the invention. Such variants include deletions, insertions, inversions, repeats, and substitutions selected according to general rules known in the art so as have little effect on activity.

[0187] The present application is directed to nucleic acid molecules at least 80%, 85%, 90%, 95%, 96%, 97%, 98%, 99% or 100% identical to the nucleic acid sequences disclosed herein, (e.g., encoding a polypeptide having the amino acid sequence of an N and/or C terminal deletion), irrespective of whether they encode a polypeptide having functional activity. This is because even where a particular nucleic acid molecule does not encode a polypeptide having functional activity, one of skill in the art would still know how to use the nucleic acid molecule, for instance, as a hybridization probe or a polymerase chain reaction (PCR) primer. Uses of the nucleic acid molecules of the present invention that do not encode a polypeptide having functional activity include, inter alia, (1) isolating a gene or allelic or splice variants thereof in a cDNA library; (2) in situ hybridization (e.g., “FISH”) to metaphase chromosomal spreads to provide precise chromosomal location of the gene, as described in Verma et al., Human Chromosomes: A Manual of Basic Techniques, Pergamon Press, New York (1988); (3) Northern Blot analysis for detecting mRNA expression in specific tissues (e.g., normal or diseased tissues); and (4) in situ hybridization (e.g., histochemistry) for detecting mRNA expression in specific tissues (e.g., normal or diseased tissues)

[0188] Preferred, however, are nucleic acid molecules having sequences at least 80%, 85%, 90%, 95%, 96%, 97%, 98%, 99% or 100% identical to the nucleic acid sequences disclosed herein, which do, in fact, encode a polypeptide having functional activity. By a polypeptide having “functional activity” is meant, a polypeptide capable of displaying one or more known functional activities associated with a full-length (complete) protein and/or a mature (secreted) protein of the invention. Such functional activities include, but are not limited to, biological activity, antigenicity [ability to bind (or compete with a polypeptide of the invention for binding) to an anti-polypeptide of the invention antibody], immunogenicity (ability to generate antibody which binds to a specific polypeptide of the invention), ability to form multimers with polypeptides of the invention, and ability to bind to a receptor or ligand for a polypeptide of the invention.

[0189] The functional activity of the polypeptides, and fragments, variants and derivatives of the invention, can be assayed by various methods.

[0190] For example, in one embodiment where one is assaying for the ability to bind or compete with a full-length polypeptide of the present invention for binding to an anti-polypetide antibody, various immunoassays known in the art can be used, including but not limited to, competitive and non-competitive assay systems using techniques such as radioimmunoassays, ELISA (enzyme linked immunosorbent assay), “sandwich” immunoassays, immunoradiometric assays, gel diffusion precipitation reactions, immunodiffusion assays, in situ immunoassays (using colloidal gold, enzyme or radioisotope labels, for example), western blots, precipitation reactions, agglutination assays (e.g., gel agglutination assays, hemagglutination assays), complement fixation assays, immunofluorescence assays, protein A assays, and immunoelectrophoresis assays, etc. In one embodiment, antibody binding is detected by detecting a label on the primary antibody. In another embodiment, the primary antibody is detected by detecting binding of a secondary antibody or reagent to the primary antibody. In a further embodiment, the secondary antibody is labeled. Many means are known in the art for detecting binding in an immunoassay and are within the scope of the present invention.

[0191] In another embodiment, where a ligand is identified, or the ability of a polypeptide fragment, variant or derivative of the invention to multimerize is being evaluated, binding can be assayed, e.g., by means well-known in the art, such as, for example, reducing and non-reducing gel chromatography, protein affinity chromatography, and affinity blotting. See generally, Phizicky et al., Microbiol. Rev. 59:94-123 (1995). In another embodiment, the ability of physiological correlates of a polypeptide of the present invention to bind to a substrate(s) of the polypeptide of the invention can be routinely assayed using techniques known in the art.

[0192] In addition, assays described herein (see Examples) and otherwise known in the art may routinely be applied to measure the ability of polypeptides of the present invention and fragments, variants and derivatives thereof to elicit polypeptide related biological activity (either in vitro or in vivo). Other methods will be known to the skilled artisan and are within the scope of the invention.

[0193] Of course, due to the degeneracy of the genetic code, one of ordinary skill in the art will immediately recognize that a large number of the nucleic acid molecules having a sequence at least 80%, 85%, 90%, 95%, 96%, 97%, 98%, 99%, or 100% identical to, for example, the nucleic acid sequence of the cDNA contained in Clone ID NO:Z, the nucleic acid sequence referred to in Table 1B (SEQ ID NO:X),), the nucleic acid sequence disclosed in Table 1A (e.g., the nucleic acid sequence delineated in columns 7 and 8), the nucleic acid sequence disclosed in Table 2 (e.g., the nucleic acid sequence delineated in columns 8 and 9) or fragments thereof, will encode polypeptides “having functional activity.” In fact, since degenerate variants of any of these nucleotide sequences all encode the same polypeptide, in many instances, this will be clear to the skilled artisan even without performing the above described comparison assay. It will be further recognized in the art that, for such nucleic acid molecules that are not degenerate variants, a reasonable number will also encode a polypeptide having functional activity. This is because the skilled artisan is fully aware of amino acid substitutions that are either less likely or not likely to significantly effect protein function (e.g., replacing one aliphatic amino acid with a second aliphatic amino acid), as further described below.

[0194] For example, guidance concerning how to make phenotypically silent amino acid substitutions is provided in Bowie et al., “Deciphering the Message in Protein Sequences: Tolerance to Amino Acid Substitutions,” Science 247:1306-1310 (1990), wherein the authors indicate that there are two main strategies for studying the tolerance of an amino acid sequence to change.

[0195] The first strategy exploits the tolerance of amino acid substitutions by natural selection during the process of evolution. By comparing amino acid sequences in different species, conserved amino acids can be identified. These conserved amino acids are likely important for protein function. In contrast, the amino acid positions where substitutions have been tolerated by natural selection indicates that these positions are not critical for protein function. Thus, positions tolerating amino acid substitution could be modified while still maintaining biological activity of the protein.

[0196] The second strategy uses genetic engineering to introduce amino acid changes at specific positions of a cloned gene to identify regions critical for protein function. For example, site directed mutagenesis or alanine-scanning mutagenesis (introduction of single alanine mutations at every residue in the molecule) can be used. See Cunningham and Wells, Science 244:1081-1085 (1989). The resulting mutant molecules can then be tested for biological activity.

[0197] As the authors state, these two strategies have revealed that proteins are surprisingly tolerant of amino acid substitutions. The authors further indicate which amino acid changes are likely to be permissive at certain amino acid positions in the protein. For example, most buried (within the tertiary structure of the protein) amino acid residues require nonpolar side chains, whereas few features of surface side chains are generally conserved. Moreover, tolerated conservative amino acid substitutions involve replacement of the aliphatic or hydrophobic amino acids Ala, Val, Leu and Ile; replacement of the hydroxyl residues Ser and Thr; replacement of the acidic residues Asp and Glu; replacement of the amide residues Asn and Gln, replacement of the basic residues Lys, Arg, and His; replacement of the aromatic residues Phe, Tyr, and Trp, and replacement of the small-sized amino acids Ala, Ser, Thr, Met, and Gly.

[0198] Besides conservative amino acid substitution, variants of the present invention include (i) substitutions with one or more of the non-conserved amino acid residues, where the substituted amino acid residues may or may not be one encoded by the genetic code, or (ii) substitutions with one or more of the amino acid residues having a substituent group, or (iii) fusion of the mature polypeptide with another compound, such as a compound to increase the stability and/or solubility of the polypeptide (for example, polyethylene glycol), (iv) fusion of the polypeptide with additional amino acids, such as, for example, an IgG Fc fusion region peptide, serum albumin (preferably human serum albumin) or a fragment thereof, or leader or secretory sequence, or a sequence facilitating purification, or (v) fusion of the polypeptide with another compound, such as albumin (including but not limited to recombinant albumin (see, e.g., U.S. Pat. No. 5,876,969, issued Mar. 2, 1999, EP Patent 0 413 622, and U.S. Pat. No. 5,766,883, issued Jun. 16, 1998, herein incorporated by reference in their entirety)). Such variant polypeptides are deemed to be within the scope of those skilled in the art from the teachings herein.

[0199] For example, polypeptide variants containing amino acid substitutions of charged amino acids with other charged or neutral amino acids may produce proteins with improved characteristics, such as less aggregation. Aggregation of pharmaceutical formulations both reduces activity and increases clearance due to the aggregate's immunogenic activity. See Pinckard et al., Clin. Exp. Immunol. 2:331-340 (1967); Robbins et al., Diabetes 36: 838-845 (1987); Cleland et al., Crit. Rev. Therapeutic Drug Carrier Systems 10:307-377 (1993).

[0200] A further embodiment of the invention relates to polypeptides which comprise the amino acid sequence of a polypeptide having an amino acid sequence which contains at least one amino acid substitution, but not more than 50 amino acid substitutions, even more preferably, not more than 40 amino acid substitutions, still more preferably, not more than 30 amino acid substitutions, and still even more preferably, not more than 20 amino acid substitutions from a polypeptide sequence disclosed herein. Of course it is highly preferable for a polypeptide to have an amino acid sequence which, for example, comprises the amino acid sequence of a polypeptide of SEQ ID NO:Y, the amino acid sequence of the mature (e.g., secreted) polypeptide of SEQ ID NO:Y, an amino acid sequence encoded by SEQ ID NO:X, an amino acid sequence encoded by the portion of SEQ ID NO:X as defined in columnns 8 and 9 of Table 2, an amino acid sequence encoded by the complement of SEQ ID NO:X, an amino acid sequence encoded by cDNA contained in Clone ID NO:Z, and/or the amino acid sequence of a mature (secreted) polypeptide encoded by cDNA contained in Clone ID NO:Z, or a fragment thereof, which contains, in order of ever-increasing preference, at least one, but not more than 10, 9, 8, 7, 6, 5, 4, 3, 2 or 1 amino acid substitutions.

[0201] In specific embodiments, the polypeptides of the invention comprise, or alternatively, consist of, fragments or variants of a reference amino acid sequence selected from: (a) the amino acid sequence of SEQ ID NO:Y or fragments thereof (e.g., the mature formand/or other fragments described herein); (b) the amino acid sequence encoded by SEQ ID NO:X or fragments thereof; (c) the amino acid sequence encoded by the complement of SEQ ID NO:X or fragments thereof; (d) the amino acid sequence encoded by the portion of SEQ ID NO:X as defined in columns 8 and 9 of Table 2 or fragments thereof; and (e) the amino acid sequence encoded by cDNA contained in Clone ID NO:Z or fragments thereof; wherein the fragments or variants have 1-5, 5-10, 5-25, 5-50, 10-50 or 50-150, amino acid residue additions, substitutions, and/or deletions when compared to the reference amino acid sequence. In preferred embodiments, the amino acid substitutions are conservative. Polynucleotides encoding these polypeptides are also encompassed by the invention.

Polynucleotide and Polypeptide Fragments

[0202] The present invention is also directed to polynucleotide fragments of the polynucleotides (nucleic acids) of the invention. In the present invention, a “polynucleotide fragment” refers to a polynucleotide having a nucleic acid sequence which, for example: is a portion of the cDNA contained in Clone ID NO:Z or the complementary strand thereto; is a portion of the polynucleotide sequence encoding the polypeptide encoded by the cDNA contained in Clone ID NO:Z or the complementary strand thereto; is a portion of the polynucleotide sequence encoding the mature (secreted) polypeptide encoded by the cDNA contained in Clone ID NO:Z or the complementary strand thereto; is a portion of a polynucleotide sequence encoding the mature amino acid sequence as defined in columns 14 and 15 of Table 1A or the complementary strand thereto; is a portion of a polynucleotide sequence encoding the amino acid sequence encoded by the region of SEQ ID NO:X as defined in columns 8 and 9 of Table 2 or the complementary strand thereto; is a portion of the polynucleotide sequence of SEQ ID NO:X as defined in columns 8 and 9 of Table 2 or the complementary strand thereto; is a portion of the polynucleotide sequence in SEQ ID NO:X or the complementary strand thereto; is a polynucleotide sequence encoding a portion of the polypeptide of SEQ ID NO:Y; is a polynucleotide sequence encoding a portion of a polypeptide encoded by SEQ ID NO:X; is a polynucleotide sequence encoding a portion of a polypeptide encoded by the complement of the polynucleotide sequence in SEQ ID NO:X; is a portion of a polynucleotide sequence encoding the amino acid sequence encoded by the region of SEQ ID NO:B as defined in column 6 of Table 1C or the complementary strand thereto; or is a portion of the polynucleotide sequence of SEQ ID NO:B as defined in column 6 of Table 1C or the complementary strand thereto.

[0203] The polynucleotide fragments of the invention are preferably at least about 15 nt, and more preferably at least about 20 nt, still more preferably at least about 30 nt, and even more preferably, at least about 40 nt, at least about 50 nt, at least about 75 nt, or at least about 150 nt in length. A fragment “at least 20 nt in length,” for example, is intended to include 20 or more contiguous bases from the cDNA sequence contained in Clone ID NO:Z, or the nucleotide sequence shown in SEQ ID NO:X or the complementary stand thereto. In this context “about” includes the particularly recited value or a value larger or smaller by several (5, 4, 3, 2, or 1) nucleotides, at either terminus or at both termini. These nucleotide fragments have uses that include, but are not limited to, as diagnostic probes and primers as discussed herein. Of course, larger fragments (e.g., at least 160, 170, 180, 190, 200, 250, 500, 600, 1000, or 2000 nucleotides in length) are also encompassed by the invention.

[0204] Moreover, representative examples of polynucleotide fragments of the invention comprise, or alternatively consist of, a sequence from about nucleotide number 1-50, 51-100, 101-150, 151-200, 201-250, 251-300, 301-350, 351-400, 401-450, 451-500, 501-550, 551-600, 601-650, 651-700, 701-750, 751-800, 801-850, 851-900, 901-950, 951-1000, 1001-1050, 1051-1100, 1101-1150, 1151-1200, 1201-1250, 1251-1300, 1301-1350, 1351-1400, 1401-1450, 1451-1500, 1501-1550, 1551-1600, 1601-1650, 1651-1700, 1701-1750, 1751-1800, 1801-1850, 1851-1900, 1901-1950, 1951-2000, 2001-2050, 2051-2100, 2101-2150, 2151-2200, 2201-2250, 2251-2300, 2301-2350, 2351-2400, 2401-2450, 2451-2500, 2501-2550, 2551-2600, 2601-2650, 2651-2700, 2701-2750, 2751-2800, 2801-2850, 2851-2900, 2901-2950, 2951-3000, 3001-3050, 3051-3100, 3101-3150, 3151-3200, 3201-3250, 3251-3300, 3301-3350, 3351-3400, 3401-3450, 3451-3500, 3501-3550, 3551-3600, 3601-3650, 3651-3700, 3701-3750, 3751-3800, 3801-3850, 3851-3900, 3901-3950, 3951-4000, 4001-4050, 4051-4100, 4101-4150, 4151-4200, 4201-4250, 4251-4300, 4301-4350, 4351-4400, 4401-4450, 4451-4500, 4501-4550, 4551-4600, 4601-4650, 4651-4700, 4701-4750, 4751-4800, 4801-4850, 4851-4900, 4901-4950, 4951-5000, 5001-5050, 5051-5100, 5101-5150, 5151-5200, 5201-5250, 5251-5300, 5301-5350, 5351-5400, 5401-5450, 5451-5500, 5501-5550, 5551-5600, 5601-5650, 5651-5700, 5701-5750, 5751-5800, 5801-5850, 5851-5900, 5901-5950, 5951-6000, 6001-6050, 6051-6100, 6101-6150, 6151-6200, 6201-6250, 6251-6300, 6301-6350, 6351-6400, 6401-6450, 6451-6500, 6501-6550, 6551-6600, 6601-6650, 6651-6700, 6701-6750, 6751-6800, 6801-6850, 6851-6900, 6901-6950, 6951-7000, 7001-7050, 7051-7100, 7101-7150, 7151-7200, 7201-7250, 7251-7300 or 7301 to the end of SEQ ID NO:X, or the complementary strand thereto. In this context “about” includes the particularly recited range or a range larger or smaller by several (5, 4, 3, 2, or 1) nucleotides, at either terminus or at both termini. Preferably, these fragments encode a polypeptide which has a functional activity (e.g., biological activity). More preferably, these polynucleotides can be used as probes or primers as discussed herein. Polynucleotides which hybridize to one or more of these polynucleotides under stringent hybridization conditions or alternatively, under lower stringency conditions are also encompassed by the invention, as are polypeptides encoded by these polynucleotides.

[0205] Further representative examples of polynucleotide fragments of the invention comprise, or alternatively consist of, a sequence from about nucleotide number 1-50, 51-100, 101-150, 151-200, 201-250, 251-300, 301-350, 351-400, 401-450, 451-500, 501-550, 551-600, 601-650, 651-700, 701-750, 751-800, 801-850, 851-900, 901-950, 951-1000, 1001-1050, 1051-1100, 1101-1150, 1151-1200, 1201-1250, 1251-1300, 1301-1350, 1351-1400, 1401-1450, 1451-1500, 1501-1550, 1551-1600, 1601-1650, 1651-1700, 1701-1750, 1751-1800, 1801-1850, 1851-1900, 1901-1950, 1951-2000, 2001-2050, 2051-2100, 2101-2150, 2151-2200, 2201-2250, 2251-2300, 2301-2350, 2351-2400, 2401-2450, 2451-2500, 2501-2550, 2551-2600, 2601-2650, 2651-2700, 2701-2750, 2751-2800, 2801-2850, 2851-2900, 2901-2950, 2951-3000, 3001-3050, 3051-3100, 3101-3150, 3151-3200, 3201-3250, 3251-3300, 3301-3350, 3351-3400, 3401-3450, 3451-3500, 3501-3550, 3551-3600, 3601-3650, 3651-3700, 3701-3750, 3751-3800, 3801-3850, 3851-3900, 3901-3950, 3951-4000, 4001-4050, 4051-4100, 4101-4150, 4151-4200, 4201-4250, 4251-4300, 4301-4350, 4351-4400, 4401-4450, 4451-4500, 4501-4550, 4551-4600, 4601-4650, 4651-4700, 4701-4750, 4751-4800, 4801-4850, 4851-4900, 4901-4950, 4951-5000, 5001-5050, 5051-5100, 5101-5150, 5151-5200, 5201-5250, 5251-5300, 5301-5350, 5351-5400, 5401-5450, 5451-5500, 5501-5550, 5551-5600, 5601-5650, 5651-5700, 5701-5750, 5751-5800, 5801-5850, 5851-5900, 5901-5950, 5951-6000, 6001-6050, 6051-6100, 6101-6150, 6151-6200, 6201-6250, 6251-6300, 6301-6350, 6351-6400, 6401-6450, 6451-6500, 6501-6550, 6551-6600, 6601-6650, 6651-6700, 6701-6750, 6751-6800, 6801-6850, 6851-6900, 6901-6950, 6951-7000, 7001-7050, 7051-7100, 7101-7150, 7151-7200, 7201-7250, 7251-7300 or 7301 to the end of the cDNA sequence contained in Clone ID NO:Z, or the complementary strand thereto. In this context “about” includes the particularly recited range or a range larger or smaller by several (5, 4, 3, 2, or 1) nucleotides, at either terminus or at both termini. Preferably, these fragments encode a polypeptide which has a functional activity (e.g., biological activity). More preferably, these polynucleotides can be used as probes or primers as discussed herein. Polynucleotides which hybridize to one or more of these polynucleotides under stringent hybridization conditions or alternatively, under lower stringency conditions are also encompassed by the invention, as are polypeptides encoded by these polynucleotides.

[0206] Moreover, representative examples of polynucleotide fragments of the invention comprise, or alternatively consist of, a nucleic acid sequence comprising one, two, three, four, five, six, seven, eight, nine, ten, or more of the above described polynucleotide fragments of the invention in combination with a polynucleotide sequence delineated in Table 1C column 6. Additional, representative examples of polynucleotide fragments of the invention comprise, or alternatively consist of, a nucleic acid sequence comprising one, two, three, four, five, six, seven, eight, nine, ten, or more of the above described polynucleotide fragments of the invention in combination with a polynucleotide sequence that is the complementary strand of a sequence delineated in column 6 of Table 1C. In further embodiments, the above-described polynucleotide fragments of the invention comprise, or alternatively consist of, sequences delineated in Table 1C, column 6, and have a nucleic acid sequence which is different from that of the BAC fragment having the sequence disclosed in SEQ ID NO:B (see Table 1C, column 5). In additional embodiments, the above-described polynucleotide fragments of the invention comprise, or alternatively consist of, sequences delineated in Table 1C, column 6, and have a nucleic acid sequence which is different from that published for the BAC clone identified as BAC ID NO:A (see Table 1C, column 4). In additional embodiments, the above-described polynucleotides of the invention comprise, or alternatively consist of, sequences delineated Table 1C, column 6, and have a nucleic acid sequence which is different from that contained in the BAC clone identified as BAC ID NO:A (see Table 1C, column 4). Polypeptides encoded by these polynucleotides, other polynucleotides that encode these polypeptides, and antibodies that bind these polypeptides are also encompassed by the invention. Additionally, fragments and variants of the above-described polynucleotides and polypeptides are also encompassed by the invention.

[0207] In additional specific embodiments, polynucleotides of the invention comprise, or alternatively consist of, one, two, three, four, five, six, seven, eight, nine, ten, or more fragments of the sequences delineated in column 6 of Table 1C, and the polynucleotide sequence of SEQ ID NO:X (e.g., as defined in Table 1C, column 2) or fragments or variants thereof. Polypeptides encoded by these polynucleotides, other polynucleotides that encode these polypeptides, and antibodies that bind these polypeptides are also encompassed by the invention.

[0208] In additional specific embodiments, polynucleotides of the invention comprise, or alternatively consist of, one, two, three, four, five, six, seven, eight, nine, ten, or more fragments of the sequences delineated in column 6 of Table 1C which correspond to the same Clone ID NO:Z (see Table 1C, column 1), and the polynucleotide sequence of SEQ ID NO:X (e.g., as defined in Table 1A, 1B, or 1C) or fragments or variants thereof. Polypeptides encoded by these polynucleotides, other polynucleotides that encode these polypeptides, and antibodies that bind these polypeptides are also encompassed by the invention.

[0209] In further specific embodiments, polynucleotides of the invention comprise, or alternatively consist of, one, two, three, four, five, six, seven, eight, nine, ten, or more fragments of the sequences delineated in the same row of column 6 of Table 1C, and the polynucleotide sequence of SEQ ID NO:X (e.g., as defined in Table 1A, 1B, or 1C) or fragments or variants thereof. Polypeptides encoded by these polynucleotides, other polynucleotides that encode these polypeptides, and antibodies that bind these polypeptides are also encompassed by the invention.

[0210] In additional specific embodiments, polynucleotides of the invention comprise, or alternatively consist of a polynucleotide sequence in which the 3′ 10 polynucleotides of one of the sequences delineated in column 6 of Table 1C and the 5′ 10 polynucleotides of the sequence of SEQ ID NO:X are directly contiguous. Nucleic acids which hybridize to the complement of these 20 contiguous polynucleotides under stringent hybridization conditions or alternatively, under lower stringency conditions, are also encompassed by the invention. Polypeptides encoded by these polynucleotides and/or nucleic acids, other polynucleotides and/or nucleic acids that encode these polypeptides, and antibodies that bind these polypeptides are also encompassed by the invention. Additionally, fragments and variants of the above-described polynucleotides, nucleic acids, and polypeptides are also encompassed by the invention.

[0211] In additional specific embodiments, polynucleotides of the invention comprise, or alternatively consist of a polynucleotide sequence in which the 3′ 10 polynucleotides of one of the sequences delineated in column 6 of Table 1C and the 5′ 10 polynucleotides of a fragment or variant of the sequence of SEQ ID NO:X (e.g., as described herein) are directly contiguous Nucleic acids which hybridize to the complement of these 20 contiguous polynucleotides under stringent hybridization conditions or alternatively, under lower stringency conditions, are also encompassed by the invention. Polypeptides encoded by these polynucleotides and/or nucleic acids, other polynucleotides and/or nucleic acids encoding these polypeptides, and antibodies that bind these polypeptides are also encompassed by the invention. Additionally, fragments and variants of the above-described polynucleotides, nucleic acids, and polypeptides are also encompassed by the invention.

[0212] In further specific embodiments, polynucleotides of the invention comprise, or alternatively consist of a polynucleotide sequence in which the 3′ 10 polynucleotides of a fragment or variant of the sequence of SEQ ID NO:X and the 5′ 10 polynucleotides of the sequence of one of the sequences delineated in column 6 of Table 1C are directly contiguous. Nucleic acids which hybridize to the complement of these 20 contiguous polynucleotides under stringent hybridization conditions or alternatively, under lower stringency conditions, are also encompassed by the invention. Polypeptides encoded by these polynucleotides and/or nucleic acids, other polynucleotides and/or nucleic acids encoding these polypeptides, and antibodies that bind these polypeptides are also encompassed by the invention. Additionally, fragments and variants of the above-described polynucleotides, nucleic acids, and polypeptides are also encompassed by the invention.

[0213] In specific embodiments, polynucleotides of the invention comprise, or alternatively consist of a polynucleotide sequence in which the 3′ 10 polynucleotides of one of the sequences delineated in column 6 of Table 1C and the 5′ 10 polynucleotides of another sequence in column 6 are directly contiguous. In preferred embodiments, the 3′ 10 polynucleotides of one of the sequences delineated in column 6 of Table 1C is directly contiguous with the 5′ 10 polynucleotides of the next sequential exon delineated in Table 1C, column 6. Nucleic acids which hybridize to the complement of these 20 contiguous polynucleotides under stringent hybridization conditions or alternatively, under lower stringency conditions, are also encompassed by the invention. Polypeptides encoded by these polynucleotides and/or nucleic acids, other polynucleotides and/or nucleic acids encoding these polypeptides, and antibodies that bind these polypeptides are also encompassed by the invention. Additionally, fragments and variants of the above-described polynucleotides, nucleic acids, and polypeptides are also encompassed by the invention.

[0214] In the present invention, a “polypeptide fragment” refers to an amino acid sequence which is a portion of the amino acid sequence contained in SEQ ID NO:Y, is a portion of the mature form of SEQ ID NO:Y as defined in columns 14 and 15 of Table 1A, a portion of an amino acid sequence encoded by the portion of SEQ ID NO:X as defined in columnns 8 and 9 of Table 2, is a portion of an amino acid sequence encoded by the polynucleotide sequence of SEQ ID NO:X, is a portion of an amino acid sequence encoded by the complement of the polynucleotide sequence in SEQ ID NO:X, is a portion of the amino acid sequence of a mature (secreted) polypeptide encoded by the cDNA contained in Clone ID NO:Z, and/or is a portion of an amino acid sequence encoded by the cDNA contained in Clone ID NO:Z. Protein (polypeptide) fragments may be “free-standing,” or comprised within a larger polypeptide of which the fragment forms a part or region, most preferably as a single continuous region. Representative examples of polypeptide fragments of the invention, include, for example, fragments comprising, or alternatively consisting of, from about amino acid number 1-20, 21-40, 41-60, 61-80, 81-100, 101-120, 121-140, 141-160, 161-180, 181-200, 201-220, 221-240, 241-260, 261-280, 281-300, 301-320, 321-340, 341-360, 361-380, 381-400, 401-420, 421-440, 441-460, 461-480, 481-500, 501-520, 521-540, 541-560, 561-580, 581-600, 601-620, 621-640, 641-660, 661-680, 681-700, 701-720, 721-740, 741-760, 761-780, 781-800, 801-820, 821-840, 841-860, 861-880, 881-900, 901-920, 921-940, 941-960, 961-980, 981-1000, 1001-1020, 1021-1040, 1041-1060, 1061-1080, 1081-1100, 1101-1120, 1121-1140, 1141-1160, 1161-1180, 1181-1200, 1201-1220, 1221-1240, 1241-1260, 1261-1280, 1281-1300, 1301-1320, 1321-1340, 1341-1360, 1361-1380, 1381-1400, 1401-1420, 1421-1440, or 1441 to the end of the coding region of cDNA and SEQ ID NO: Y. In a preferred embodiment, polypeptide fragments of the invention include, for example, fragments comprising, or alternatively consisting of, from about amino acid number 1-20, 21-40, 41-60, 61-80, 81-100, 101-120, 121-140, 141-160, 161-180, 181-200, 201-220, 221-240, 241-260, 261-280, 281-300, 301-320, 321-340, 341-360, 361-380, 381-400, 401-420, 421-440, 441-460, 461-480, 481-500, 501-520, 521-540, 541-560, 561-580, 581-600, 601-620, 621-640, 641-660, 661-680, 681-700, 701-720, 721-740, 741-760, 761-780, 781-800, 801-820, 821-840, 841-860, 861-880, 881-900, 901-920, 921-940, 941-960, 961-980, 981-1000, 1001-1020, 1021-1040, 1041-1060, 1061-1080, 1081-1100, 1101-1120, 1121-1140, 1141-1160, 1161-1180, 1181-1200, 1201-1220, 1221-1240, 1241-1260, 1261-1280, 1281-1300, 1301-1320, 1321-1340, 1341-1360, 1361-1380, 1381-1400, 1401-1420, 1421-1440, or 1441 to the end of the coding region of SEQ ID NO:Y. Moreover, polypeptide fragments of the invention may be at least about 10, 15, 20, 25, 30, 35, 40, 45, 50, 55, 60, 65, 70, 75, 80, 85, 90, 100, 110, 120, 130, 140, or 150 amino acids in length. In this context “about” includes the particularly recited ranges or values, or ranges or values larger or smaller by several (5, 4, 3, 2, or 1) amino acids, at either extreme or at both extremes. Polynucleotides encoding these polypeptide fragments are also encompassed by the invention.

[0215] Even if deletion of one or more amino acids from the N-terminus of a protein results in modification of loss of one or more biological functions of the protein, other functional activities (e.g., biological activities, ability to multimerize, ability to bind a ligand) may still be retained. For example, the ability of shortened muteins to induce and/or bind to antibodies which recognize the complete or mature forms of the polypeptides generally will be retained when less than the majority of the residues of the complete or mature polypeptide are removed from the N-terminus. Whether a particular polypeptide lacking N-terminal residues of a complete polypeptide retains such immunologic activities can readily be determined by routine methods described herein and otherwise known in the art. It is not unlikely that a mutein with a large number of deleted N-terminal amino acid residues may retain some biological or immunogenic activities. In fact, peptides composed of as few as six amino acid residues may often evoke an immune response.

[0216] Accordingly, polypeptide fragments include the secreted protein as well as the mature form. Further preferred polypeptide fragments include the secreted protein or the mature form having a continuous series of deleted residues from the amino or the carboxy terminus, or both. For example, any number of amino acids, ranging from 1-60, can be deleted from the amino terminus of either the secreted polypeptide or the mature form. Similarly, any number of amino acids, ranging from 1-30, can be deleted from the carboxy terminus of the secreted protein or mature form. Furthermore, any combination of the above amino and carboxy terminus deletions are preferred. Similarly, polynucleotides encoding these polypeptide fragments are also preferred.

[0217] The present invention further provides polypeptides having one or more residues deleted from the amino terminus of the amino acid sequence of a polypeptide disclosed herein (e.g., a polypeptide of SEQ ID NO:Y, a polypeptide as defined in columns 14 and 15 of Table 1A, a polypeptide encoded by the polynucleotide sequence contained in SEQ ID NO:X or the complement thereof, a polypeptide encoded by the portion of SEQ ID NO:X as defined in columns 8 and 9 of Table 2, a polypeptide encoded by the portion of SEQ ID NO:B as defined in column 6 of Table 1C, a polypeptide encoded by the cDNA contained in Clone ID NO:Z, and/or a mature polypeptide encoded by the cDNA contained in Clone ID NO:Z). In particular, N-terminal deletions may be described by the general formula m-q, where q is a whole integer representing the total number of amino acid residues in a polypeptide of the invention (e.g., the polypeptide disclosed in SEQ ID NO:Y, the mature (secreted) portion of SEQ ID NO:Y as defined in columns 14 and 15 of Table 1A, or the polypeptide encoded by the portion of SEQ ID NO:X as defined in columns 8 and 9 of Table 2), and m is defined as any integer ranging from 2 to q-6. Polynucleotides encoding these polypeptides are also encompassed by the invention.

[0218] The present invention further provides polypeptides having one or more residues from the carboxy terminus of the amino acid sequence of a polypeptide disclosed herein (e.g., a polypeptide of SEQ ID NO:Y, the mature (secreted) portion of SEQ ID NO:Y as defined in columns 14 and 15 of Table 1A, a polypeptide encoded by the polynucleotide sequence contained in SEQ ID NO:X, a polypeptide encoded by the portion of SEQ ID NO:X as defined in columns 8 and 9 of Table 2, a polypeptide encoded by the portion of SEQ ID NO:B as defined in column 6 of Table 1C, a polypeptide encoded by the cDNA contained in Clone ID NO:Z, and/or a mature polypeptide encoded by the cDNA contained in Clone ID NO:Z). In particular, C-terminal deletions may be described by the general formula 1-n, where n is any whole integer ranging from 6 to q-1, and where n corresponds to the position of amino acid residue in a polypeptide of the invention. Polynucleotides encoding these polypeptides are also encompassed by the invention.

[0219] In addition, any of the above described N- or C-terminal deletions can be combined to produce a N- and C-terminal deleted polypeptide. The invention also provides polypeptides having one or more amino acids deleted from both the amino and the carboxyl termini, which may be described generally as having residues m-n of a polypeptide encoded by SEQ ID NO:X (e.g., including, but not limited to, the preferred polypeptide disclosed as SEQ ID NO:Y, the mature (secreted) portion of SEQ ID NO:Y as defined in columns 14 and 15 of Table 1A, and the polypeptide encoded by the portion of SEQ ID NO:X as defined in columns 8 and 9 of Table 2), the cDNA contained in Clone ID NO:Z, and/or the complement thereof, where n and m are integers as described above. Polynucleotides encoding these polypeptides are also encompassed by the invention.

[0220] Also as mentioned above, even if deletion of one or more amino acids from the C-terminus of a protein results in modification of loss of one or more biological functions of the protein, other functional activities (e.g., biological activities, ability to multimerize, ability to bind a ligand) may still be retained. For example the ability of the shortened mutein to induce and/or bind to antibodies which recognize the complete or mature forms of the polypeptide generally will be retained when less than the majority of the residues of the complete or mature polypeptide are removed from the C-terminus. Whether a particular polypeptide lacking C-terminal residues of a complete polypeptide retains such immunologic activities can readily be determined by routine methods described herein and otherwise known in the art. It is not unlikely that a mutein with a large number of deleted C-terminal amino acid residues may retain some biological or immunogenic activities. In fact, peptides composed of as few as six amino acid residues may often evoke an immune response.

[0221] The present application is also directed to proteins containing polypeptides at least 80%, 85%, 90%, 95%, 96%, 97%, 98% or 99% identical to a polypeptide sequence set forth herein. In preferred embodiments, the application is directed to proteins containing polypeptides at least 80%, 85%, 90%, 95%, 96%, 97%, 98% or 99% identical to polypeptides having the amino acid sequence of the specific N- and C-terminal deletions. Polynucleotides encoding these polypeptides are also encompassed by the invention.

[0222] Any polypeptide sequence encoded by, for example, the polynucleotide sequences set forth as SEQ ID NO:X or the complement thereof, (presented, for example, in Tables 1A and 2), the cDNA contained in Clone ID NO:Z, or the polynucleotide sequence as defined in column 6 of Table 1C, may be analyzed to determine certain preferred regions of the polypeptide. For example, the amino acid sequence of a polypeptide encoded by a polynucleotide sequence of SEQ ID NO:X (e.g., the polypeptide of SEQ ID NO:Y and the polypeptide encoded by the portion of SEQ ID NO:X as defined in columnns 8 and 9 of Table 2) or the cDNA contained in Clone ID NO:Z may be analyzed using the default parameters of the DNASTAR computer algorithm (DNASTAR, Inc., 1228 S. Park St., Madison, Wis. 53715 USA; http://www.dnastar.com/).

[0223] Polypeptide regions that may be routinely obtained using the DNASTAR computer algorithm include, but are not limited to, Garnier-Robson alpha-regions, beta-regions, turn-regions, and coil-regions; Chou-Fasman alpha-regions, beta-regions, and turn-regions; Kyte-Doolittle hydrophilic regions and hydrophobic regions; Eisenberg alpha- and beta-amphipathic regions; Karplus-Schulz flexible regions; Emini surface-forming regions; and Jameson-Wolf regions of high antigenic index. Among highly preferred polynucleotides of the invention in this regard are those that encode polypeptides comprising regions that combine several structural features, such as several (e.g., 1, 2, 3 or 4) of the features set out above.

[0224] Additionally, Kyte-Doolittle hydrophilic regions and hydrophobic regions, Emini surface-forming regions, and Jameson-Wolf regions of high antigenic index (i.e., containing four or more contiguous amino acids having an antigenic index of greater than or equal to 1.5, as identified using the default parameters of the Jameson-Wolf program) can routinely be used to determine polypeptide regions that exhibit a high degree of potential for antigenicity. Regions of high antigenicity are determined from data by DNASTAR analysis by choosing values which represent regions of the polypeptide which are likely to be exposed on the surface of the polypeptide in an environment in which antigen recognition may occur in the process of initiation of an immune response.

[0225] Preferred polypeptide fragments of the invention are fragments comprising, or alternatively, consisting of, an amino acid sequence that displays a functional activity (e.g. biological activity) of the polypeptide sequence of which the amino acid sequence is a fragment. By a polypeptide displaying a “functional activity” is meant a polypeptide capable of one or more known functional activities associated with a full-length protein, such as, for example, biological activity, antigenicity, immunogenicity, and/or multimerization, as described herein.

[0226] Other preferred polypeptide fragments are biologically active fragments. Biologically active fragments are those exhibiting activity similar, but not necessarily identical, to an activity of the polypeptide of the present invention. The biological activity of the fragments may include an improved desired activity, or a decreased undesirable activity.

[0227] In preferred embodiments, polypeptides of the invention comprise, or alternatively consist of, one, two, three, four, five or more of the antigenic fragments of the polypeptide of SEQ ID NO:Y, or portions thereof. Polynucleotides encoding these polypeptides are also encompassed by the invention.

Epitopes and Antibodies

[0228] The present invention encompasses polypeptides comprising, or alternatively consisting of, an epitope of: the polypeptide sequence shown in SEQ ID NO:Y; a polypeptide sequence encoded by SEQ ID NO:X or the complementary strand thereto; the polypeptide sequence encoded by the portion of SEQ ID NO:X as defined in columns 8 and 9 of Table 2; the polypeptide sequence encoded by the portion of SEQ ID NO:B as defined in column 6 of Table 1C or the complement thereto; the polypeptide sequence encoded by the cDNA contained in Clone ID NO:Z; or the polypeptide sequence encoded by a polynucleotide that hybridizes to the sequence of SEQ ID NO:X, the complement of the sequence of SEQ ID NO:X, the complement of a portion of SEQ ID NO:X as defined in columns 8 and 9 of Table 2, or the cDNA sequence contained in Clone ID NO:Z under stringent hybridization conditions or alternatively, under lower stringency hybridization as defined supra. The present invention further encompasses polynucleotide sequences encoding an epitope of a polypeptide sequence of the invention (such as, for example, the sequence disclosed in SEQ ID NO:X, or a fragment thereof), polynucleotide sequences of the complementary strand of a polynucleotide sequence encoding an epitope of the invention, and polynucleotide sequences which hybridize to the complementary strand under stringent hybridization conditions or alternatively, under lower stringency hybridization conditions defined supra.

[0229] The term “epitopes,” as used herein, refers to portions of a polypeptide having antigenic or immunogenic activity in an animal, preferably a mammal, and most preferably in a human. In a preferred embodiment, the present invention encompasses a polypeptide comprising an epitope, as well as the polynucleotide encoding this polypeptide. An “immunogenic epitope,” as used herein, is defined as a portion of a protein that elicits an antibody response in an animal, as determined by any method known in the art, for example, by the methods for generating antibodies described infra. (See, for example, Geysen et al., Proc. Natl. Acad. Sci. USA 81:3998-4002 (1983)). The term “antigenic epitope,” as used herein, is defined as a portion of a protein to which an antibody can immunospecifically bind its antigen as determined by any method well known in the art, for example, by the immunoassays described herein. Immunospecific binding excludes non-specific binding but does not necessarily exclude cross-reactivity with other antigens. Antigenic epitopes need not necessarily be immunogenic.

[0230] Fragments which function as epitopes may be produced by any conventional means. (See, e.g., Houghten, R. A., Proc. Natl. Acad. Sci. USA 82:5131-5135 (1985) further described in U.S. Pat. No. 4,631,211.)

[0231] In the present invention, antigenic epitopes preferably contain a sequence of at least 4, at least 5, at least 6, at least 7, more preferably at least 8, at least 9, at least 10, at least 11, at least 12, at least 13, at least 14, at least 15, at least 20, at least 25, at least 30, at least 40, at least 50, and, most preferably, between about 15 to about 30 amino acids. Preferred polypeptides comprising immunogenic or antigenic epitopes are at least 10, 15, 20, 25, 30, 35, 40, 45, 50, 55, 60, 65, 70, 75, 80, 85, 90, 95, or 100 amino acid residues in length. Additional non-exclusive preferred antigenic epitopes include the antigenic epitopes disclosed herein, as well as portions thereof. Antigenic epitopes are useful, for example, to raise antibodies, including monoclonal antibodies, that specifically bind the epitope. Preferred antigenic epitopes include the antigenic epitopes disclosed herein, as well as any combination of two, three, four, five or more of these antigenic epitopes. Antigenic epitopes can be used as the target molecules in immunoassays. (See, for instance, Wilson et al., Cell 37:767-778 (1984); Sutcliffe et al., Science 219:660-666 (1983)).

[0232] Non-limiting examples of epitopes of polypeptides that can be used to generate antibodies of the invention include a polypeptide comprising, or alternatively consisting of, at least one, two, three, four, five, six or more of the portion(s) of SEQ ID NO:Y specified in column 7 of Table 1B. These polypeptide fragments have been determined to bear antigenic epitopes of the proteins of the invention by the analysis of the Jameson-Wolf antigenic index which is included in the DNAStar suite of computer programs. By “comprise” it is intended that a polypeptide contains at least one, two, three, four, five, six or more of the portion(s) of SEQ ID NO:Y shown in column 7 of Table 1B, but it may contain additional flanking residues on either the amino or carboxyl termini of the recited portion. Such additional flanking sequences are preferably sequences naturally found adjacent to the portion; i.e., contiguous sequence shown in SEQ ID NO:Y. The flanking sequence may, however, be sequences from a heterolgous polypeptide, such as from another protein described herein or from a heterologous polypeptide not described herein. In particular embodiments, epitope portions of a polypeptide of the invention comprise one, two, three, or more of the portions of SEQ ID NO:Y shown in column 7 of Table 1B.

[0233] Similarly, immunogenic epitopes can be used, for example, to induce antibodies according to methods well known in the art. See, for instance, Sutcliffe et al., supra; Wilson et al., supra; Chow et al., Proc. Natl. Acad. Sci. USA 82:910-914; and Bittle et al., J. Gen. Virol. 66:2347-2354 (1985). Preferred immunogenic epitopes include the immunogenic epitopes disclosed herein, as well as any combination of two, three, four, five or more of these immunogenic epitopes. The polypeptides comprising one or more immunogenic epitopes may be presented for eliciting an antibody response together with a carrier protein, such as an albumin, to an animal system (such as rabbit or mouse), or, if the polypeptide is of sufficient length (at least about 25 amino acids), the polypeptide may be presented without a carrier. However, immunogenic epitopes comprising as few as 8 to 10 amino acids have been shown to be sufficient to raise antibodies capable of binding to, at the very least, linear epitopes in a denatured polypeptide (e.g., in Western blotting).

[0234] Epitope-bearing polypeptides of the present invention may be used to induce antibodies according to methods well known in the art including, but not limited to, in vivo immunization, in vitro immunization, and phage display methods. See, e.g., Sutcliffe et al., supra; Wilson et al., supra, and Bittle et al., J. Gen. Virol., 66:2347-2354 (1985). If in vivo immunization is used, animals may be immunized with free peptide; however, anti-peptide antibody titer may be boosted by coupling the peptide to a macromolecular carrier, such as keyhole limpet hemacyanin (KLH) or tetanus toxoid. For instance, peptides containing cysteine residues may be coupled to a carrier using a linker such as maleimidobenzoyl-N-hydroxysuccinimide ester (MBS), while other peptides may be coupled to carriers using a more general linking agent such as glutaraldehyde. Animals such as rabbits, rats and mice are immunized with either free or carrier-coupled peptides, for instance, by intraperitoneal and/or intradermal injection of emulsions containing about 100 μg of peptide or carrier protein and Freund's adjuvant or any other adjuvant known for stimulating an immune response. Several booster injections may be needed, for instance, at intervals of about two weeks, to provide a useful titer of anti-peptide antibody which can be detected, for example, by ELISA assay using free peptide adsorbed to a solid surface. The titer of anti-peptide antibodies in serum from an immunized animal may be increased by selection of anti-peptide antibodies, for instance, by adsorption to the peptide on a solid support and elution of the selected antibodies according to methods well known in the art.

[0235] As one of skill in the art will appreciate, and as discussed above, the polypeptides of the present invention (e.g., those comprising an immunogenic or antigenic epitope) can be fused to heterologous polypeptide sequences. For example, polypeptides of the present invention (including fragments or variants thereof), may be fused with the constant domain of immunoglobulins (IgA, IgE, IgG, IgM), or portions thereof (CH1, CH2, CH3, or any combination thereof and portions thereof, resulting in chimeric polypeptides. By way of another non-limiting example, polypeptides and/or antibodies of the present invention (including fragments or variants thereof) may be fused with albumin (including but not limited to recombinant human serum albumin or fragments or variants thereof (see, e.g., U.S. Pat. No. 5,876,969, issued Mar. 2, 1999, EP Patent 0 413 622, and U.S. Pat. No. 5,766,883, issued Jun. 16, 1998, herein incorporated by reference in their entirety)). In a preferred embodiment, polypeptides and/or antibodies of the present invention (including fragments or variants thereof) are fused with the mature form of human serum albumin (i.e., amino acids 1-585 of human serum albumin as shown in FIGS. 1 and 2 of EP Patent 0 322 094) which is herein incorporated by reference in its entirety. In another preferred embodiment, polypeptides and/or antibodies of the present invention (including fragments or variants thereof) are fused with polypeptide fragments comprising, or alternatively consisting of, amino acid residues 1-z of human serum albumin, where z is an integer from 369 to 419, as described in U.S. Pat. No. 5,766,883 herein incorporated by reference in its entirety. Polypeptides and/or antibodies of the present invention (including fragments or variants thereof) may be fused to either the N- or C-terminal end of the heterologous protein (e.g., immunoglobulin Fc polypeptide or human serum albumin polypeptide). Polynucleotides encoding fusion proteins of the invention are also encompassed by the invention.

[0236] Such fusion proteins as those described above may facilitate purification and may increase half-life in vivo. This has been shown for chimeric proteins consisting of the first two domains of the human CD4-polypeptide and various domains of the constant regions of the heavy or light chains of mammalian immunoglobulins. See, e.g., EP 394,827; Traunecker et al., Nature, 331:84-86 (1988). Enhanced delivery of an antigen across the epithelial barrier to the immune system has been demonstrated for antigens (e.g., insulin) conjugated to an FcRn binding partner such as IgG or Fc fragments (see, e.g., PCT Publications WO 96/22024 and WO 99/04813). IgG fusion proteins that have a disulfide-linked dimeric structure due to the IgG portion desulfide bonds have also been found to be more efficient in binding and neutralizing other molecules than monomeric polypeptides or fragments thereof alone. See, e.g., Fountoulakis et al., J. Biochem., 270:3958-3964 (1995). Nucleic acids encoding the above epitopes can also be recombined with a gene of interest as an epitope tag (e.g., the hemagglutinin (HA) tag or flag tag) to aid in detection and purification of the expressed polypeptide. For example, a system described by Janknecht et al. allows for the ready purification of non-denatured fusion proteins expressed in human cell lines (Janknecht et al., 1991, Proc. Natl. Acad. Sci. USA 88:8972-897). In this system, the gene of interest is subcloned into a vaccinia recombination plasmid such that the open reading frame of the gene is translationally fused to an amino-terminal tag consisting of six histidine residues. The tag serves as a matrix binding domain for the fusion protein. Extracts from cells infected with the recombinant vaccinia virus are loaded onto Ni2+ nitriloacetic acid-agarose column and histidine-tagged proteins can be selectively eluted with imidazole-containing buffers.

Fusion Proteins

[0237] Any polypeptide of the present invention can be used to generate fusion proteins. For example, the polypeptide of the present invention, when fused to a second protein, can be used as an antigenic tag. Antibodies raised against the polypeptide of the present invention can be used to indirectly detect the second protein by binding to the polypeptide. Moreover, because secreted proteins target cellular locations based on trafficking signals, polypeptides of the present invention which are shown to be secreted can be used as targeting molecules once fused to other proteins.

[0238] Examples of domains that can be fused to polypeptides of the present invention include not only heterologous signal sequences, but also other heterologous functional regions. The fusion does not necessarily need to be direct, but may occur through linker sequences.

[0239] In certain preferred embodiments, proteins of the invention are fusion proteins comprising an amino acid sequence that is an N and/or C-terminal deletion of a polypeptide of the invention. In preferred embodiments, the invention is directed to a fusion protein comprising an amino acid sequence that is at least 90%, 95%, 96%, 97%, 98% or 99% identical to a polypeptide sequence of the invention. Polynucleotides encoding these proteins are also encompassed by the invention.

[0240] Moreover, fusion proteins may also be engineered to improve characteristics of the polypeptide of the present invention. For instance, a region of additional amino acids, particularly charged amino acids, may be added to the N-terminus of the polypeptide to improve stability and persistence during purification from the host cell or subsequent handling and storage. Also, peptide moieties may be added to the polypeptide to facilitate purification. Such regions may be removed prior to final preparation of the polypeptide. The addition of peptide moieties to facilitate handling of polypeptides are familiar and routine techniques in the art.

[0241] As one of skill in the art will appreciate that, as discussed above, polypeptides of the present invention, and epitope-bearing fragments thereof, can be combined with heterologous polypeptide sequences. For example, the polypeptides of the present invention may be fused with heterologous polypeptide sequences, for example, the polypeptides of the present invention may be fused with the constant domain of immunoglobulins (IgA, IgE, IgG, IgM) or portions thereof (CH1, CH2, CH3, and any combination thereof, including both entire domains and portions thereof), or albumin (including, but not limited to, native or recombinant human albumin or fragments or variants thereof (see, e.g., U.S. Pat. No. 5,876,969, issued Mar. 2, 1999, EP Patent 0 413 622, and U.S. Pat. No. 5,766,883, issued Jun. 16, 1998, herein incorporated by reference in their entirety)), resulting in chimeric polypeptides. For example, EP-A-O 464 533 (Canadian counterpart 2045869) discloses fusion proteins comprising various portions of constant region of immunoglobulin molecules together with another human protein or part thereof. In many cases, the Fc part in a fusion protein is beneficial in therapy and diagnosis, and thus can result in, for example, improved pharmacokinetic properties (EP-A 0232 262). Alternatively, deleting the Fc part after the fusion protein has been expressed, detected, and purified, would be desired. For example, the Fc portion may hinder therapy and diagnosis if the fusion protein is used as an antigen for immunizations. In drug discovery, for example, human proteins, such as hIL-5, have been fused with Fc portions for the purpose of high-throughput screening assays to identify antagonists of hIL-5. See, D. Bennett et al., J. Molecular Recognition 8:52-58 (1995); K. Johanson et al., J. Biol. Chem. 270:9459-9471 (1995).

[0242] Moreover, the polypeptides of the present invention can be fused to marker sequences, such as a polypeptide which facilitates purification of the fused polypeptide. In preferred embodiments, the marker amino acid sequence is a hexa-histidine peptide, such as the tag provided in a pQE vector (QIAGEN, Inc., 9259 Eton Avenue, Chatsworth, Calif., 91311), among others, many of which are commercially available. As described in Gentz et al., Proc. Natl. Acad. Sci. USA 86:821-824 (1989), for instance, hexa-histidine provides for convenient purification of the fusion protein. Another peptide tag useful for purification, the “HA” tag, corresponds to an epitope derived from the influenza hemagglutinin protein (Wilson et al., Cell 37:767 (1984)).

[0243] Additional fusion proteins of the invention may be generated through the techniques of gene-shuffling, motif-shuffling, exon-shuffling, and/or codon-shuffling (collectively referred to as “DNA shuffling”). DNA shuffling may be employed to modulate the activities of polypeptides of the invention, such methods can be used to generate polypeptides with altered activity, as well as agonists and antagonists of the polypeptides. See, generally, U.S. Pat. Nos. 5,605,793; 5,811,238; 5,830,721; 5,834,252; and 5,837,458, and Patten et al., Curr. Opinion Biotechnol. 8:724-33 (1997); Harayama, Trends Biotechnol. 16(2):76-82 (1998); Hansson, et al., J. Mol. Biol. 287:265-76 (1999); and Lorenzo and Blasco, Biotechniques 24(2):308-13 (1998) (each of these patents and publications are hereby incorporated by reference in its entirety). In one embodiment, alteration of polynucleotides corresponding to SEQ ID NO:X and the polypeptides encoded by these polynucleotides may be achieved by DNA shuffling. DNA shuffling involves the assembly of two or more DNA segments by homologous or site-specific recombination to generate variation in the polynucleotide sequence. In another embodiment, polynucleotides of the invention, or the encoded polypeptides, may be altered by being subjected to random mutagenesis by error-prone PCR, random nucleotide insertion or other methods prior to recombination. In another embodiment, one or more components, motifs, sections, parts, domains, fragments, etc., of a polynucleotide encoding a polypeptide of the invention may be recombined with one or more components, motifs, sections, parts, domains, fragments, etc. of one or more heterologous molecules.

Thus, any of these above fusions can be engineered using the polynucleotides or the polypeptides of the present invention.

[0244] Thus, any of these above fusions can be engineered using the polynucleotides or the polypeptides of the present invention.

Recombinant and Synthetic Production of Polypeptides of the Invention

[0245] The present invention also relates to vectors containing the polynucleotide of the present invention, host cells, and the production of polypeptides by synthetic and recombinant techniques. The vector may be, for example, a phage, plasmid, viral, or retroviral vector. Retroviral vectors may be replication competent or replication defective. In the latter case, viral propagation generally will occur only in complementing host cells.

[0246] The polynucleotides of the invention may be joined to a vector containing a selectable marker for propagation in a host. Generally, a plasmid vector is introduced in a precipitate, such as a calcium phosphate precipitate, or in a complex with a charged lipid. If the vector is a virus, it may be packaged in vitro using an appropriate packaging cell line and then transduced into host cells.

[0247] The polynucleotide insert should be operatively linked to an appropriate promoter, such as the phage lambda PL promoter, the E. coli lac, trp, phoA and tac promoters, the SV40 early and late promoters and promoters of retroviral LTRs, to name a few. Other suitable promoters will be known to the skilled artisan. The expression constructs will further contain sites for transcription initiation, termination, and, in the transcribed region, a ribosome binding site for translation. The coding portion of the transcripts expressed by the constructs will preferably include a translation initiating codon at the beginning and a termination codon (UAA, UGA or UAG) appropriately positioned at the end of the polypeptide to be translated.

[0248] As indicated, the expression vectors will preferably include at least one selectable marker. Such markers include dihydrofolate reductase, G418, glutamine synthase, or neomycin resistance for eukaryotic cell culture, and tetracycline, kanamycin or ampicillin resistance genes for culturing in E. coli and other bacteria. Representative examples of appropriate hosts include, but are not limited to, bacterial cells, such as E. coli, Streptomyces and Salmonella typhimurium cells; fungal cells, such as yeast cells (e.g., Saccharomyces cerevisiae or Pichia pastoris (ATCC Accession No. 201178)); insect cells such as Drosophila S2 and Spodoptera Sf9 cells; animal cells such as CHO, COS, 293, and Bowes melanoma cells; and plant cells. Appropriate culture mediums and conditions for the above-described host cells are known in the art.

[0249] Among vectors preferred for use in bacteria include pQE70, pQE60 and pQE-9, available from QIAGEN, Inc.; pBluescript vectors, Phagescript vectors, pNH8A, pNH16a, pNH18A, pNH46A, available from Stratagene Cloning Systems, Inc.; and ptrc99a, pKK223-3, pKK233-3, pDR540, pRIT5 available from Pharmacia Biotech, Inc. Among preferred eukaryotic vectors are pWLNEO, pSV2CAT, pOG44, pXT1 and pSG available from Stratagene; and pSVK3, pBPV, pMSG and pSVL available from Pharmacia. Preferred expression vectors for use in yeast systems include, but are not limited to pYES2, pYD1, pTEF1/Zeo, pYES2/GS, pPICZ, pGAPZ, pGAPZalph, pPIC9, pPIC3.5, pHIL-D2, pHIL-S1, pPIC3.5K, pPIC9K, and PA0815 (all available from Invitrogen, Carlbad, Calif.). Other suitable vectors will be readily apparent to the skilled artisan.

[0250] Vectors which use glutamine synthase (GS) or DHFR as the selectable markers can be amplified in the presence of the drugs methionine sulphoximine or methotrexate, respectively. An advantage of glutamine synthase based vectors are the availabilty of cell lines (e.g., the murine myeloma cell line, NS0) which are glutamine synthase negative. Glutamine synthase expression systems can also function in glutamine synthase expressing cells (e.g., Chinese Hamster Ovary (CHO) cells) by providing additional inhibitor to prevent the functioning of the endogenous gene. A glutamine synthase expression system and components thereof are detailed in PCT publications: WO87/04462; WO86/05807; WO89/01036; WO89/10404; and WO91/06657, which are hereby incorporated in their entireties by reference herein. Additionally, glutamine synthase expression vectors can be obtained from Lonza Biologics, Inc. (Portsmouth, N.H.). Expression and production of monoclonal antibodies using a GS expression system in murine myeloma cells is described in Bebbington et al., Bio/technology 10:169(1992) and in Biblia and Robinson Biotechnol. Prog. 11:1 (1995) which are herein incorporated by reference.

[0251] The present invention also relates to host cells containing the above-described vector constructs described herein, and additionally encompasses host cells containing nucleotide sequences of the invention that are operably associated with one or more heterologous control regions (e.g., promoter and/or enhancer) using techniques known of in the art. The host cell can be a higher eukaryotic cell, such as a mammalian cell (e.g., a human derived cell), or a lower eukaryotic cell, such as a yeast cell, or the host cell can be a prokaryotic cell, such as a bacterial cell. A host strain may be chosen which modulates the expression of the inserted gene sequences, or modifies and processes the gene product in the specific fashion desired. Expression from certain promoters can be elevated in the presence of certain inducers; thus expression of the genetically engineered polypeptide may be controlled. Furthermore, different host cells have characteristics and specific mechanisms for the translational and post-translational processing and modification (e.g., phosphorylation, cleavage) of proteins. Appropriate cell lines can be chosen to ensure the desired modifications and processing of the foreign protein expressed.

[0252] Introduction of the nucleic acids and nucleic acid constructs of the invention into the host cell can be effected by calcium phosphate transfection, DEAE-dextran mediated transfection, cationic lipid-mediated transfection, electroporation, transduction, infection, or other methods. Such methods are described in many standard laboratory manuals, such as Davis et al., Basic Methods In Molecular Biology (1986). It is specifically contemplated that the polypeptides of the present invention may in fact be expressed by a host cell lacking a recombinant vector.

[0253] In addition to encompassing host cells containing the vector constructs discussed herein, the invention also encompasses primary, secondary, and immortalized host cells of vertebrate origin, particularly mammalian origin, that have been engineered to delete or replace endogenous genetic material (e.g., the coding sequence), and/or to include genetic material (e.g., heterologous polynucleotide sequences) that is operably associated with polynucleotides of the invention, and which activates, alters, and/or amplifies endogenous polynucleotides. For example, techniques known in the art may be used to operably associate heterologous control regions (e.g., promoter and/or enhancer) and endogenous polynucleotide sequences via homologous recombination (see, e.g., U.S. Pat. No. 5,641,670, issued Jun. 24, 1997; International Publication Number WO 96/29411; International Publication Number WO 94/12650; Koller et al., Proc. Natl. Acad. Sci. USA 86:8932-8935 (1989); and Zijlstra et al., Nature 342:435-438 (1989), the disclosures of each of which are incorporated by reference in their entireties).

[0254] Polypeptides of the invention can be recovered and purified from recombinant cell cultures by well-known methods including ammonium sulfate or ethanol precipitation, acid extraction, anion or cation exchange chromatography, phosphocellulose chromatography, hydrophobic interaction chromatography, affinity chromatography, hydroxylapatite chromatography and lectin chromatography. Most preferably, high performance liquid chromatography (“HPLC”) is employed for purification. a recombinant vector.

[0255] Polypeptides of the present invention can also be recovered from: products purified from natural sources, including bodily fluids, tissues and cells, whether directly isolated or cultured; products of chemical synthetic procedures; and products produced by recombinant techniques from a prokaryotic or eukaryotic host, including, for example, bacterial, yeast, higher plant, insect, and mammalian cells. Depending upon the host employed in a recombinant production procedure, the polypeptides of the present invention may be glycosylated or may be non-glycosylated. In addition, polypeptides of the invention may also include an initial modified methionine residue, in some cases as a result of host-mediated processes. Thus, it is well known in the art that the N-terminal methionine encoded by the translation initiation codon generally is removed with high efficiency from any protein after translation in all eukaryotic cells. While the N-terminal methionine on most proteins also is efficiently removed in most prokaryotes, for some proteins, this prokaryotic removal process is inefficient, depending on the nature of the amino acid to which the N-terminal methionine is covalently linked.

[0256] In one embodiment, the yeast Pichia pastoris is used to express polypeptides of the invention in a eukaryotic system. Pichia pastoris is a methylotrophic yeast which can metabolize methanol as its sole carbon source. A main step in the methanol metabolization pathway is the oxidation of methanol to formaldehyde using O₂. This reaction is catalyzed by the enzyme alcohol oxidase. In order to metabolize methanol as its sole carbon source, Pichia pastoris must generate high levels of alcohol oxidase due, in part, to the relatively low affinity of alcohol oxidase for O₂. Consequently, in a growth medium depending on methanol as a main carbon source, the promoter region of one of the two alcohol oxidase genes (AOX1) is highly active. In the presence of methanol, alcohol oxidase produced from the AOX1 gene comprises up to approximately 30% of the total soluble protein in Pichia pastoris. See Ellis, S. B., et al., Mol. Cell. Biol. 5:1111-21 (1985); Koutz, P. J, et al., Yeast 5:167-77 (1989); Tschopp, J. F., et al., Nucl. Acids Res. 15:3859-76 (1987). Thus, a heterologous coding sequence, such as, for example, a polynucleotide of the present invention, under the transcriptional regulation of all or part of the AOX1 regulatory sequence is expressed at exceptionally high levels in Pichia yeast grown in the presence of methanol.

[0257] In one example, the plasmid vector pPIC9K is used to express DNA encoding a polypeptide of the invention, as set forth herein, in a Pichea yeast system essentially as described in “Pichia Protocols: Methods in Molecular Biology,” D. R. Higgins and J. Cregg, eds. The Humana Press, Totowa, N.J., 1998. This expression vector allows expression and secretion of a polypeptide of the invention by virtue of the strong AOX1 promoter linked to the Pichia pastoris alkaline phosphatase (PHO) secretory signal peptide (i.e., leader) located upstream of a multiple cloning site.

[0258] Many other yeast vectors could be used in place of pPIC9K, such as, pYES2, pYD1, pTEF1/Zeo, pYES2/GS, pPICZ, pGAPZ, pGAPZalpha, pPIC9, pPIC3.5, pHIL-D2, pHIL-S1, pPIC3.5K, and PAO815, as one skilled in the art would readily appreciate, as long as the proposed expression construct provides appropriately located signals for transcription, translation, secretion (if desired), and the like, including an in-frame AUG as required.

[0259] In another embodiment, high-level expression of a heterologous coding sequence, such as, for example, a polynucleotide of the present invention, may be achieved by cloning the heterologous polynucleotide of the invention into an expression vector such as, for example, pGAPZ or pGAPZalpha, and growing the yeast culture in the absence of methanol.

[0260] In addition to encompassing host cells containing the vector constructs discussed herein, the invention also encompasses primary, secondary, and immortalized host cells of vertebrate origin, particularly mammalian origin, that have been engineered to delete or replace endogenous genetic material (e.g., coding sequence), and/or to include genetic material (e.g., heterologous polynucleotide sequences) that is operably associated with polynucleotides of the invention, and which activates, alters, and/or amplifies endogenous polynucleotides. For example, techniques known in the art may be used to operably associate heterologous control regions (e.g., promoter and/or enhancer) and endogenous polynucleotide sequences via homologous recombination (see, e.g., U.S. Pat. No. 5,641,670, issued Jun. 24, 1997; International Publication No. WO 96/29411, published Sep. 26, 1996; International Publication No. WO 94/12650, published Aug. 4, 1994; Koller et al., Proc. Natl. Acad. Sci. USA 86:8932-8935 (1989); and Zijlstra et al., Nature 342:435-438 (1989), the disclosures of each of which are incorporated by reference in their entireties).

[0261] In addition, polypeptides of the invention can be chemically synthesized using techniques known in the art (e.g., see Creighton, 1983, Proteins: Structures and Molecular Principles, W.H. Freeman & Co., N.Y., and Hunkapiller et al., Nature, 310:105-111 (1984)). For example, a polypeptide corresponding to a fragment of a polypeptide can be synthesized by use of a peptide synthesizer. Furthermore, if desired, nonclassical amino acids or chemical amino acid analogs can be introduced as a substitution or addition into the polypeptide sequence. Non-classical amino acids include, but are not limited to, to the D-isomers of the common amino acids, 2,4-diaminobutyric acid, a-amino isobutyric acid, 4-aminobutyric acid, Abu, 2-amino butyric acid, g-Abu, e-Ahx, 6-amino hexanoic acid, Aib, 2-amino isobutyric acid, 3-amino propionic acid, ornithine, norleucine, norvaline, hydroxyproline, sarcosine, citrulline, homocitrulline, cysteic acid, t-butylglycine, t-butylalanine, phenylglycine, cyclohexylalanine, b-alanine, fluoro-amino acids, designer amino acids such as b-methyl amino acids, Ca-methyl amino acids, Na-methyl amino acids, and amino acid analogs in general. Furthermore, the amino acid can be D (dextrorotary) or L (levorotary).

[0262] The invention encompasses polypeptides of the present invention which are differentially modified during or after translation, e.g., by glycosylation, acetylation, phosphorylation, amidation, derivatization by known protecting/blocking groups, proteolytic cleavage, linkage to an antibody molecule or other cellular ligand, etc. Any of numerous chemical modifications may be carried out by known techniques, including but not limited, to specific chemical cleavage by cyanogen bromide, trypsin, chymotrypsin, papain, V8 protease, NaBH₄; acetylation, formylation, oxidation, reduction; metabolic synthesis in the presence of tunicamycin; etc.

[0263] Additional post-translational modifications encompassed by the invention include, for example, e.g., N-linked or O-linked carbohydrate chains, processing of N-terminal or C-terminal ends), attachment of chemical moieties to the amino acid backbone, chemical modifications of N-linked or O-linked carbohydrate chains, and addition or deletion of an N-terminal methionine residue as a result of procaryotic host cell expression. The polypeptides may also be modified with a detectable label, such as an enzymatic, fluorescent, isotopic or affinity label to allow for detection and isolation of the protein.

[0264] Examples of suitable enzymes include horseradish peroxidase, alkaline phosphatase, beta-galactosidase, or acetylcholinesterase; examples of suitable prosthetic group complexes include streptavidin/biotin and avidin/biotin; examples of suitable fluorescent materials include umbelliferone, fluorescein, fluorescein isothiocyanate, rhodamine, dichlorotriazinylamine fluorescein, dansyl chloride or phycoerythrin; an example of a luminescent material includes luminol; examples of bioluminescent materials include luciferase, luciferin, and aequorin; and examples of suitable radioactive material include iodine (¹²¹I, ¹²³I, ¹²⁵I, ¹³¹I) carbon (¹⁴C), sulfur (³⁵S), tritium (³H), indium (¹¹¹In, ¹¹²In, ^{113m}In, ^{115m}In), technetium (⁹⁹Tc, ^{99m}Tc), thallium (²⁰¹Ti), gallium (⁶⁸Ga, ⁶⁷Ga), palladium (¹⁰³Pd), molybdenum (⁹⁹Mo), xenon (¹³³Xe), fluorine (¹⁸F), ¹⁵³Sm, ¹⁷⁷Lu, ¹⁵⁹Gd, ¹⁴⁹Pm, ¹⁴⁰La, ¹⁷⁵Yb, ¹⁶⁶Ho, ⁹⁰Y, ⁴⁷Sc, ¹⁸⁶Re, ¹⁸⁸Re, ¹⁴²Pr, ¹⁰⁵Rh and ⁹⁷Ru.

[0265] In specific embodiments, a polypeptide of the present invention or fragment or variant thereof is attached to macrocyclic chelators that associate with radiometal ions, including but not limited to, ¹⁷⁷Lu, ⁹⁰y, ¹⁶⁶Ho, and ¹⁵³Sm, to polypeptides. In a preferred embodiment, the radiometal ion associated with the macrocyclic chelators is ¹¹¹In. In another preferred embodiment, the radiometal ion associated with the macrocyclic chelator is ⁹⁰Y. In specific embodiments, the macrocyclic chelator is 1,4,7,10-tetraazacyclododecane-N,N′,N″,N′″-tetraacetic acid (DOTA). In other specific embodiments, DOTA is attached to an antibody of the invention or fragment thereof via a linker molecule. Examples of linker molecules useful for conjugating DOTA to a polypeptide are commonly known in the art—see, for example, DeNardo et al., Clin Cancer Res. 4(10):2483-90 (1998); Peterson et al., Bioconjug. Chem. 10(4):553-7 (1999); and Zimmerman et al, Nucl. Med. Biol. 26(8):943-50 (1999); which are hereby incorporated by reference in their entirety.

[0266] As mentioned, the proteins of the invention may be modified by either natural processes, such as posttranslational processing, or by chemical modification techniques which are well known in the art. It will be appreciated that the same type of modification may be present in the same or varying degrees at several sites in a given polypeptide. Polypeptides of the invention may be branched, for example, as a result of ubiquitination, and they may be cyclic, with or without branching. Cyclic, branched, and branched cyclic polypeptides may result from posttranslation natural processes or may be made by synthetic methods. Modifications include acetylation, acylation, ADP-ribosylation, amidation, covalent attachment of flavin, covalent attachment of a heme moiety, covalent attachment of a nucleotide or nucleotide derivative, covalent attachment of a lipid or lipid derivative, covalent attachment of phosphotidylinositol, cross-linking, cyclization, disulfide bond formation, demethylation, formation of covalent cross-links, formation of cysteine, formation of pyroglutamate, formylation, gamma-carboxylation, glycosylation, GPI anchor formation, hydroxylation, iodination, methylation, myristoylation, oxidation, pegylation, proteolytic processing, phosphorylation, prenylation, racemization, selenoylation, sulfation, transfer-RNA mediated addition of amino acids to proteins such as arginylation, and ubiquitination. (See, for instance, PROTEINS—STRUCTURE AND MOLECULAR PROPERTIES, 2nd Ed., T. E. Creighton, W.H. Freeman and Company, New York (1993); POSTTRANSLATIONAL COVALENT MODIFICATION OF PROTEINS, B. C. Johnson, Ed., Academic Press, New York, pgs. 1-12 (1983); Seifter et al., Meth. Enzymol. 182:626-646 (1990); Rattan et al., Ann. N.Y. Acad. Sci. 663:48-62 (1992))

[0267] Also provided by the invention are chemically modified derivatives of the polypeptides of the invention which may provide additional advantages such as increased solubility, stability and circulating time of the polypeptide, or decreased immunogenicity (see U.S. Pat. No. 4,179,337). The chemical moieties for derivitization may be selected from water soluble polymers such as polyethylene glycol, ethylene glycol/propylene glycol copolymers, carboxymethylcellulose, dextran, polyvinyl alcohol and the like. The polypeptides may be modified at random positions within the molecule, or at predetermined positions within the molecule and may include one, two, three or more attached chemical moieties.

[0268] The polymer may be of any molecular weight, and may be branched or unbranched. For polyethylene glycol, the preferred molecular weight is between about 1 kDa and about 100 kDa (the term “about” indicating that in preparations of polyethylene glycol, some molecules will weigh more, some less, than the stated molecular weight) for ease in handling and manufacturing. Other sizes may be used, depending on the desired therapeutic profile (e.g., the duration of sustained release desired, the effects, if any on biological activity, the ease in handling, the degree or lack of antigenicity and other known effects of the polyethylene glycol to a therapeutic protein or analog). For example, the polyethylene glycol may have an average molecular weight of about 200, 500, 1000, 1500, 2000, 2500, 3000, 3500, 4000, 4500, 5000, 5500, 6000, 6500, 7000, 7500, 8000, 8500, 9000, 9500, 10,000, 10,500, 11,000, 11,500, 12,000, 12,500, 13,000, 13,500, 14,000, 14,500, 15,000, 15,500, 16,000, 16,500, 17,000, 17,500, 18,000, 18,500, 19,000, 19,500, 20,000, 25,000, 30,000, 35,000, 40,000, 45,000, 50,000, 55,000, 60,000, 65,000, 70,000, 75,000, 80,000, 85,000, 90,000, 95,000, or 100,000 kDa.

[0269] As noted above, the polyethylene glycol may have a branched structure. Branched polyethylene glycols are described, for example, in U.S. Pat. No. 5,643,575; Morpurgo et al., Appl. Biochem. Biotechnol. 56:59-72 (1996); Vorobjev et al., Nucleosides Nucleotides 18:2745-2750 (1999); and Caliceti et al., Bioconjug. Chem. 10:638-646 (1999), the disclosures of each of which are incorporated herein by reference.

[0270] The polyethylene glycol molecules (or other chemical moieties) should be attached to the protein with consideration of effects on functional or antigenic domains of the protein. There are a number of attachment methods available to those skilled in the art, such as, for example, the method disclosed in EP 0 401 384 (coupling PEG to G-CSF), herein incorporated by reference; see also Malik et al., Exp. Hematol. 20:1028-1035 (1992), reporting pegylation of GM-CSF using tresyl chloride. For example, polyethylene glycol may be covalently bound through amino acid residues via a reactive group, such as a free amino or carboxyl group. Reactive groups are those to which an activated polyethylene glycol molecule may be bound. The amino acid residues having a free amino group may include lysine residues and the N-terminal amino acid residues; those having a free carboxyl group may include aspartic acid residues glutamic acid residues and the C-terminal amino acid residue. Sulfhydryl groups may also be used as a reactive group for attaching the polyethylene glycol molecules. Preferred for therapeutic purposes is attachment at an amino group, such as attachment at the N-terminus or lysine group.

[0271] As suggested above, polyethylene glycol may be attached to proteins via linkage to any of a number of amino acid residues. For example, polyethylene glycol can be linked to proteins via covalent bonds to lysine, histidine, aspartic acid, glutamic acid, or cysteine residues. One or more reaction chemistries may be employed to attach polyethylene glycol to specific amino acid residues (e.g., lysine, histidine, aspartic acid, glutamic acid, or cysteine) of the protein or to more than one type of amino acid residue (e.g., lysine, histidine, aspartic acid, glutamic acid, cysteine and combinations thereof) of the protein.

[0272] One may specifically desire proteins chemically modified at the N-terminus. Using polyethylene glycol as an illustration of the present composition, one may select from a variety of polyethylene glycol molecules (by molecular weight, branching, etc.), the proportion of polyethylene glycol molecules to protein (polypeptide) molecules in the reaction mix, the type of pegylation reaction to be performed, and the method of obtaining the selected N-terminally pegylated protein. The method of obtaining the N-terminally pegylated preparation (i.e., separating this moiety from other monopegylated moieties if necessary) may be by purification of the N-terminally pegylated material from a population of pegylated protein molecules. Selective proteins chemically modified at the N-terminus modification may be accomplished by reductive alkylation which exploits differential reactivity of different types of primary amino groups (lysine versus the N-terminal) available for derivatization in a particular protein. Under the appropriate reaction conditions, substantially selective derivatization of the protein at the N-terminus with a carbonyl group containing polymer is achieved.

[0273] As indicated above, pegylation of the proteins of the invention may be accomplished by any number of means. For example, polyethylene glycol may be attached to the protein either directly or by an intervening linker. Linkerless systems for attaching polyethylene glycol to proteins are described in Delgado et al., Crit. Rev. Thera. Drug Carrier Sys. 9:249-304 (1992); Francis et al., Intern. J. of Hematol. 68:1-18 (1998); U.S. Pat. No. 4,002,531; U.S. Pat. No. 5,349,052; WO 95/06058; and WO 98/32466, the disclosures of each of which are incorporated herein by reference.

[0274] One system for attaching polyethylene glycol directly to amino acid residues of proteins without an intervening linker employs tresylated MPEG, which is produced by the modification of monmethoxy polyethylene glycol (MPEG) using tresylchloride (ClSO₂CH₂CF₃). Upon reaction of protein with tresylated MPEG, polyethylene glycol is directly attached to amine groups of the protein. Thus, the invention includes protein-polyethylene glycol conjugates produced by reacting proteins of the invention with a polyethylene glycol molecule having a 2,2,2-trifluoreothane sulphonyl group.

[0275] Polyethylene glycol can also be attached to proteins using a number of different intervening linkers. For example, U.S. Pat. No. 5,612,460, the entire disclosure of which is incorporated herein by reference, discloses urethane linkers for connecting polyethylene glycol to proteins. Protein-polyethylene glycol conjugates wherein the polyethylene glycol is attached to the protein by a linker can also be produced by reaction of proteins with compounds such as MPEG-succinimidylsuccinate, MPEG activated with 1,1′-carbonyldiimidazole, MPEG-2,4,5-trichloropenylcarbonate, MPEG-p-nitrophenolcarbonate, and various MPEG-succinate derivatives. A number of additional polyethylene glycol derivatives and reaction chemistries for attaching polyethylene glycol to proteins are described in International Publication No. WO 98/32466, the entire disclosure of which is incorporated herein by reference. Pegylated protein products produced using the reaction chemistries set out herein are included within the scope of the invention.

[0276] The number of polyethylene glycol moieties attached to each protein of the invention (i.e., the degree of substitution) may also vary. For example, the pegylated proteins of the invention may be linked, on average, to 1, 2, 3, 4, 5, 6, 7, 8, 9, 10, 12, 15, 17, 20, or more polyethylene glycol molecules. Similarly, the average degree of substitution within ranges such as 1-3, 2-4, 3-5, 4-6, 5-7, 6-8, 7-9, 8-10, 9-11, 10-12, 11-13, 12-14, 13-15, 14-16, 15-17, 16-18, 17-19, or 18-20 polyethylene glycol moieties per protein molecule. Methods for determining the degree of substitution are discussed, for example, in Delgado et al., Crit. Rev. Thera. Drug Carrier Sys. 9:249-304 (1992).

[0277] The polypeptides of the invention can be recovered and purified from chemical synthesis and recombinant cell cultures by standard methods which include, but are not limited to, ammonium sulfate or ethanol precipitation, acid extraction, anion or cation exchange chromatography, phosphocellulose chromatography, hydrophobic interaction chromatography, affinity chromatography, hydroxylapatite chromatography and lectin chromatography. Most preferably, high performance liquid chromatography (“HPLC”) is employed for purification. Well known techniques for refolding protein may be employed to regenerate active conformation when the polypeptide is denatured during isolation and/or purification.

[0278] The polypeptides of the invention may be in monomers or multimers (i.e., dimers, trimers, tetramers and higher multimers). Accordingly, the present invention relates to monomers and multimers of the polypeptides of the invention, their preparation, and compositions (preferably, Therapeutics) containing them. In specific embodiments, the polypeptides of the invention are monomers, dimers, trimers or tetramers. In additional embodiments, the multimers of the invention are at least dimers, at least trimers, or at least tetramers.

[0279] Multimers encompassed by the invention may be homomers or heteromers. As used herein, the term homomer refers to a multimer containing only polypeptides corresponding to a protein of the invention (e.g., the amino acid sequence of SEQ ID NO:Y, an amino acid sequence encoded by SEQ ID NO:X or the complement of SEQ ID NO:X, the amino acid sequence encoded by the portion of SEQ ID NO:X as defined in columns 8 and 9 of Table 2, and/or an amino acid sequence encoded by cDNA contained in Clone ID NO:Z (including fragments, variants, splice variants, and fusion proteins, corresponding to these as described herein)). These homomers may contain polypeptides having identical or different amino acid sequences. In a specific embodiment, a homomer of the invention is a multimer containing only polypeptides having an identical amino acid sequence. In another specific embodiment, a homomer of the invention is a multimer containing polypeptides having different amino acid sequences. In specific embodiments, the multimer of the invention is a homodimer (e.g., containing two polypeptides having identical or different amino acid sequences) or a homotrimer (e.g., containing three polypeptides having identical and/or different amino acid sequences). In additional embodiments, the homomeric multimer of the invention is at least a homodimer, at least a homotrimer, or at least a homotetramer.

[0280] As used herein, the term heteromer refers to a multimer containing one or more heterologous polypeptides (i.e., polypeptides of different proteins) in addition to the polypeptides of the invention. In a specific embodiment, the multimer of the invention is a heterodimer, a heterotrimer, or a heterotetramer. In additional embodiments, the heteromeric multimer of the invention is at least a heterodimer, at least a heterotrimer, or at least a heterotetramer.

[0281] Multimers of the invention may be the result of hydrophobic, hydrophilic, ionic and/or covalent associations and/or may be indirectly linked by, for example, liposome formation. Thus, in one embodiment, multimers of the invention, such as, for example, homodimers or homotrimers, are formed when polypeptides of the invention contact one another in solution. In another embodiment, heteromultimers of the invention, such as, for example, heterotrimers or heterotetramers, are formed when polypeptides of the invention contact antibodies to the polypeptides of the invention (including antibodies to the heterologous polypeptide sequence in a fusion protein of the invention) in solution. In other embodiments, multimers of the invention are formed by covalent associations with and/or between the polypeptides of the invention. Such covalent associations may involve one or more amino acid residues contained in the polypeptide sequence (e.g., that recited in SEQ ID NO:Y, encoded by the portion of SEQ ID NO:X as defined in columns 8 and 9 of Table 2, and/or encoded by the cDNA contained in Clone ID NO:Z). In one instance, the covalent associations are cross-linking between cysteine residues located within the polypeptide sequences which interact in the native (i.e., naturally occurring) polypeptide. In another instance, the covalent associations are the consequence of chemical or recombinant manipulation. Alternatively, such covalent associations may involve one or more amino acid residues contained in the heterologous polypeptide sequence in a fusion protein. In one example, covalent associations are between the heterologous sequence contained in a fusion protein of the invention (see, e.g., U.S. Pat. No. 5,478,925). In a specific example, the covalent associations are between the heterologous sequence contained in a Fc fusion protein of the invention (as described herein). In another specific example, covalent associations of fusion proteins of the invention are between heterologous polypeptide sequence from another protein that is capable of forming covalently associated multimers, such as for example, osteoprotegerin (see, e.g., International Publication NO: WO 98/49305, the contents of which are herein incorporated by reference in its entirety). In another embodiment, two or more polypeptides of the invention are joined through peptide linkers. Examples include those peptide linkers described in U.S. Pat. No. 5,073,627 (hereby incorporated by reference). Proteins comprising multiple polypeptides of the invention separated by peptide linkers may be produced using conventional recombinant DNA technology.

[0282] Another method for preparing multimer polypeptides of the invention involves use of polypeptides of the invention fused to a leucine zipper or isoleucine zipper polypeptide sequence. Leucine zipper and isoleucine zipper domains are polypeptides that promote multimerization of the proteins in which they are found. Leucine zippers were originally identified in several DNA-binding proteins (Landschulz et al., Science 240:1759, (1988)), and have since been found in a variety of different proteins. Among the known leucine zippers are naturally occurring peptides and derivatives thereof that dimerize or trimerize. Examples of leucine zipper domains suitable for producing soluble multimeric proteins of the invention are those described in PCT application WO 94/10308, hereby incorporated by reference. Recombinant fusion proteins comprising a polypeptide of the invention fused to a polypeptide sequence that dimerizes or trimerizes in solution are expressed in suitable host cells, and the resulting soluble multimeric fusion protein is recovered from the culture supernatant using techniques known in the art.

[0283] Trimeric polypeptides of the invention may offer the advantage of enhanced biological activity. Preferred leucine zipper moieties and isoleucine moieties are those that preferentially form trimers. One example is a leucine zipper derived from lung surfactant protein D (SPD), as described in Hoppe et al. (FEBS Letters 344:191, (1994)) and in U.S. patent application Ser. No. 08/446,922, hereby incorporated by reference. Other peptides derived from naturally occurring trimeric proteins may be employed in preparing trimeric polypeptides of the invention.

[0284] In another example, proteins of the invention are associated by interactions between Flag® polypeptide sequence contained in fusion proteins of the invention containing Flag® polypeptide sequence. In a further embodiment, proteins of the invention are associated by interactions between heterologous polypeptide sequence contained in Flag® fusion proteins of the invention and anti-Flag® antibody.

[0285] The multimers of the invention may be generated using chemical techniques known in the art. For example, polypeptides desired to be contained in the multimers of the invention may be chemically cross-linked using linker molecules and linker molecule length optimization techniques known in the art (see, e.g., U.S. Pat. No. 5,478,925, which is herein incorporated by reference in its entirety). Additionally, multimers of the invention may be generated using techniques known in the art to form one or more inter-molecule cross-links between the cysteine residues located within the sequence of the polypeptides desired to be contained in the multimer (see, e.g., U.S. Pat. No. 5,478,925, which is herein incorporated by reference in its entirety). Further, polypeptides of the invention may be routinely modified by the addition of cysteine or biotin to the C-terminus or N-terminus of the polypeptide and techniques known in the art may be applied to generate multimers containing one or more of these modified polypeptides (see, e.g., U.S. Pat. No. 5,478,925, which is herein incorporated by reference in its entirety). Additionally, techniques known in the art may be applied to generate liposomes containing the polypeptide components desired to be contained in the multimer of the invention (see, e.g., U.S. Pat. No. 5,478,925, which is herein incorporated by reference in its entirety).

[0286] Alternatively, multimers of the invention may be generated using genetic engineering techniques known in the art. In one embodiment, polypeptides contained in multimers of the invention are produced recombinantly using fusion protein technology described herein or otherwise known in the art (see, e.g., U.S. Pat. No. 5,478,925, which is herein incorporated by reference in its entirety). In a specific embodiment, polynucleotides coding for a homodimer of the invention are generated by ligating a polynucleotide sequence encoding a polypeptide of the invention to a sequence encoding a linker polypeptide and then further to a synthetic polynucleotide encoding the translated product of the polypeptide in the reverse orientation from the original C-terminus to the N-terminus (lacking the leader sequence) (see, e.g., U.S. Pat. No. 5,478,925, which is herein incorporated by reference in its entirety). In another embodiment, recombinant techniques described herein or otherwise known in the art are applied to generate recombinant polypeptides of the invention which contain a transmembrane domain (or hydrophobic or signal peptide) and which can be incorporated by membrane reconstitution techniques into liposomes (see, e.g., U.S. Pat. No. 5,478,925, which is herein incorporated by reference in its entirety).

Antibodies

[0287] Further polypeptides of the invention relate to antibodies and T-cell antigen receptors (TCR) which immunospecifically bind a polypeptide, polypeptide fragment, or variant of the invention (e.g., a polypeptide or fragment or variant of the amino acid sequence of SEQ ID NO:Y or a polypeptide encoded by the cDNA contained in Clone ID No:Z, and/or an epitope, of the present invention) as determined by immunoassays well known in the art for assaying specific antibody-antigen binding. Antibodies of the invention include, but are not limited to, polyclonal, monoclonal, multispecific, human, humanized or chimeric antibodies, single chain antibodies, Fab fragments, F(ab′) fragments, fragments produced by a Fab expression library, anti-idiotypic (anti-Id) antibodies (including, e.g., anti-Id antibodies to antibodies of the invention), intracellularly-made antibodies (i.e., intrabodies), and epitope-binding fragments of any of the above. The term “antibody,” as used herein, refers to immunoglobulin molecules and immunologically active portions of immunoglobulin molecules, i.e., molecules that contain an antigen binding site that immunospecifically binds an antigen. The immunoglobulin molecules of the invention can be of any type (e.g., IgG, IgE, IgM, IgD, IgA and IgY), class (e.g., IgG1, IgG2, IgG3, IgG4, IgA1 and IgA2) or subclass of immunoglobulin molecule. In preferred embodiments, the immunoglobulin molecules of the invention are IgG1. In other preferred embodiments, the immunoglobulin molecules of the invention are IgG4.

[0288] Most preferably the antibodies are human antigen-binding antibody fragments of the present invention and include, but are not limited to, Fab, Fab′ and F(ab′)2, Fd, single-chain Fvs (scFv), single-chain antibodies, disulfide-linked Fvs (sdFv) and fragments comprising either a VL or VH domain. Antigen-binding antibody fragments, including single-chain antibodies, may comprise the variable region(s) alone or in combination with the entirety or a portion of the following: hinge region, CH1, CH2, and CH3 domains. Also included in the invention are antigen-binding fragments also comprising any combination of variable region(s) with a hinge region, CH1, CH2, and CH3 domains. The antibodies of the invention may be from any animal origin including birds and mammals. Preferably, the antibodies are human, murine (e.g., mouse and rat), donkey, ship rabbit, goat, guinea pig, camel, horse, or chicken. As used herein, “human” antibodies include antibodies having the amino acid sequence of a human immunoglobulin and include antibodies isolated from human immunoglobulin libraries or from animals transgenic for one or more human immunoglobulin and that do not express endogenous immunoglobulins, as described infra and, for example in, U.S. Pat. No. 5,939,598 by Kucherlapati et al.

[0289] The antibodies of the present invention may be monospecific, bispecific, trispecific or of greater multispecificity. Multispecific antibodies may be specific for different epitopes of a polypeptide of the present invention or may be specific for both a polypeptide of the present invention as well as for a heterologous epitope, such as a heterologous polypeptide or solid support material. See, e.g., PCT publications WO 93/17715; WO 92/08802; WO 91/00360; WO 92/05793; Tutt, et al., J. Immunol. 147:60-69 (1991); U.S. Pat. Nos. 4,474,893; 4,714,681; 4,925,648; 5,573,920; 5,601,819; Kostelny et al., J. Immunol. 148:1547-1553 (1992).

[0290] Antibodies of the present invention may be described or specified in terms of the epitope(s) or portion(s) of a polypeptide of the present invention which they recognize or specifically bind. The epitope(s) or polypeptide portion(s) may be specified as described herein, e.g., by N-terminal and C-terminal positions, or by size in contiguous amino acid residues, or listed in the Tables and Figures. Preferred epitopes of the invention include the predicted epitopes shown in column 7 of Table 1B, as well as polynucleotides that encode these epitopes. Antibodies which specifically bind any epitope or polypeptide of the present invention may also be excluded. Therefore, the present invention includes antibodies that specifically bind polypeptides of the present invention, and allows for the exclusion of the same.

[0291] Antibodies of the present invention may also be described or specified in terms of their cross-reactivity. Antibodies that do not bind any other analog, ortholog, or homolog of a polypeptide of the present invention are included. Antibodies that bind polypeptides with at least 95%, at least 90%, at least 85%, at least 80%, at least 75%, at least 70%, at least 65%, at least 60%, at least 55%, and at least 50% identity (as calculated using methods known in the art and described herein) to a polypeptide of the present invention are also included in the present invention. In specific embodiments, antibodies of the present invention cross-react with murine, rat and/or rabbit homologs of human proteins and the corresponding epitopes thereof. Antibodies that do not bind polypeptides with less than 95%, less than 90%, less than 85%, less than 80%, less than 75%, less than 70%, less than 65%, less than 60%, less than 55%, and less than 50% identity (as calculated using methods known in the art and described herein) to a polypeptide of the present invention are also included in the present invention. In a specific embodiment, the above-described cross-reactivity is with respect to any single specific antigenic or immunogenic polypeptide, or combination(s) of 2, 3, 4, 5, or more of the specific antigenic and/or immunogenic polypeptides disclosed herein. Further included in the present invention are antibodies which bind polypeptides encoded by polynucleotides which hybridize to a polynucleotide of the present invention under stringent hybridization conditions (as described herein). Antibodies of the present invention may also be described or specified in terms of their binding affinity to a polypeptide of the invention. Preferred binding affinities include those with a dissociation constant or Kd less than 5×10⁻² M, 10⁻² M, 5×10⁻³ M, 10⁻³ M, 5×10⁻⁴ M, 10⁻⁴ M, 5×10⁻⁵ M, 10⁻⁵ M, 5×10⁻⁶ M, 10⁻⁶M, 5×10⁻⁷ M, 10⁻⁷ M, 5×10⁻⁸ M, 10⁻⁸ M, 5×10⁻⁹ M, 10⁻⁹ M, 5×10⁻¹⁰ M, 10⁻¹⁰ M, 5×10⁻¹¹ M, 10⁻¹¹ M, 5×10⁻¹² M, 10⁻¹² M, 5×10⁻¹³ M, 10⁻¹³ M, 5×10⁻¹⁴ M, 10⁻¹⁴ M, 5×10⁻¹⁵ M, or 10⁻¹⁵ M.

[0292] The invention also provides antibodies that competitively inhibit binding of an antibody to an epitope of the invention as determined by any method known in the art for determining competitive binding, for example, the immunoassays described herein. In preferred embodiments, the antibody competitively inhibits binding to the epitope by at least 95%, at least 90%, at least 85%, at least 80%, at least 75%, at least 70%, at least 60%, or at least 50%.

[0293] Antibodies of the present invention may act as agonists or antagonists of the polypeptides of the present invention. For example, the present invention includes antibodies which disrupt the receptor/ligand interactions with the polypeptides of the invention either partially or fully. Preferably, antibodies of the present invention bind an antigenic epitope disclosed herein, or a portion thereof. The invention features both receptor-specific antibodies and ligand-specific antibodies. The invention also features receptor-specific antibodies which do not prevent ligand binding but prevent receptor activation. Receptor activation (i.e., signaling) may be determined by techniques described herein or otherwise known in the art. For example, receptor activation can be determined by detecting the phosphorylation (e.g., tyrosine or serine/threonine) of the receptor or its substrate by immunoprecipitation followed by western blot analysis (for example, as described supra). In specific embodiments, antibodies are provided that inhibit ligand activity or receptor activity by at least 95%, at least 90%, at least 85%, at least 80%, at least 75%, at least 70%, at least 60%, or at least 50% of the activity in absence of the antibody.

[0294] The invention also features receptor-specific antibodies which both prevent ligand binding and receptor activation as well as antibodies that recognize the receptor-ligand complex, and, preferably, do not specifically recognize the unbound receptor or the unbound ligand. Likewise, included in the invention are neutralizing antibodies which bind the ligand and prevent binding of the ligand to the receptor, as well as antibodies which bind the ligand, thereby preventing receptor activation, but do not prevent the ligand from binding the receptor. Further included in the invention are antibodies which activate the receptor. These antibodies may act as receptor agonists, i.e., potentiate or activate either all or a subset of the biological activities of the ligand-mediated receptor activation, for example, by inducing dimerization of the receptor. The antibodies may be specified as agonists, antagonists or inverse agonists for biological activities comprising the specific biological activities of the peptides of the invention disclosed herein. The above antibody agonists can be made using methods known in the art. See, e.g., PCT publication WO 96/40281; U.S. Pat. No. 5,811,097; Deng et al., Blood 92(6):1981-1988 (1998); Chen et al., Cancer Res. 58(16):3668-3678 (1998); Harrop et al., J. Immunol. 161(4):1786-1794 (1998); Zhu et al., Cancer Res. 58(15):3209-3214 (1998); Yoon et al., J. Immunol. 160(7):3170-3179 (1998); Prat et al., J. Cell. Sci. 111(Pt2):237-247 (1998); Pitard et al., J. Immunol. Methods 205(2):177-190 (1997); Liautard et al., Cytokine 9(4):233-241 (1997); Carlson et al., J. Biol. Chem. 272(17):11295-11301 (1997); Taryman et al., Neuron 14(4):755-762 (1995); Muller et al., Structure 6(9):1153-1167 (1998); Bartunek et al., Cytokine 8(1):14-20 (1996) (which are all incorporated by reference herein in their entireties).

[0295] Antibodies of the present invention may be used, for example, to purify, detect, and target the polypeptides of the present invention, including both in vitro and in vivo diagnostic and therapeutic methods. For example, the antibodies have utility in immunoassays for qualitatively and quantitatively measuring levels of the polypeptides of the present invention in biological samples. See, e.g., Harlow et al., Antibodies: A Laboratory Manual, (Cold Spring Harbor Laboratory Press, 2nd ed. 1988); incorporated by reference herein in its entirety.

[0296] As discussed in more detail below, the antibodies of the present invention may be used either alone or in combination with other compositions. The antibodies may further be recombinantly fused to a heterologous polypeptide at the N- or C-terminus or chemically conjugated (including covalent and non-covalent conjugations) to polypeptides or other compositions. For example, antibodies of the present invention may be recombinantly fused or conjugated to molecules useful as labels in detection assays and effector molecules such as heterologous polypeptides, drugs, radionuclides, or toxins. See, e.g., PCT publications WO 92/08495; WO 91/14438; WO 89/12624; U.S. Pat. No. 5,314,995; and EP 396,387; the disclosures of which are incorporated herein by reference in their entireties.

[0297] The antibodies of the invention include derivatives that are modified, i.e, by the covalent attachment of any type of molecule to the antibody such that covalent attachment does not prevent the antibody from generating an anti-idiotypic response. For example, but not by way of limitation, the antibody derivatives include antibodies that have been modified, e.g., by glycosylation, acetylation, pegylation, phosphylation, amidation, derivatization by known protecting/blocking groups, proteolytic cleavage, linkage to a cellular ligand or other protein, etc. Any of numerous chemical modifications may be carried out by known techniques, including, but not limited to specific chemical cleavage, acetylation, formylation, metabolic synthesis of tunicamycin, etc. Additionally, the derivative may contain one or more non-classical amino acids.

[0298] The antibodies of the present invention may be generated by any suitable method known in the art. Polyclonal antibodies to an antigen-of-interest can be produced by various procedures well known in the art. For example, a polypeptide of the invention can be administered to various host animals including, but not limited to, rabbits, mice, rats, etc. to induce the production of sera containing polyclonal antibodies specific for the antigen. Various adjuvants may be used to increase the immunological response, depending on the host species, and include but are not limited to, Freund's (complete and incomplete), mineral gels such as aluminum hydroxide, surface active substances such as lysolecithin, pluronic polyols, polyanions, peptides, oil emulsions, keyhole limpet hemocyanins, dinitrophenol, and potentially useful human adjuvants such as BCG (bacille Calmette-Guerin) and corynebacterium parvum. Such adjuvants are also well known in the art.

[0299] Monoclonal antibodies can be prepared using a wide variety of techniques known in the art including the use of hybridoma, recombinant, and phage display technologies, or a combination thereof. For example, monoclonal antibodies can be produced using hybridoma techniques including those known in the art and taught, for example, in Harlow et al., Antibodies: A Laboratory Manual, (Cold Spring Harbor Laboratory Press, 2nd ed. 1988); Hammerling, et al., in: Monoclonal Antibodies and T-Cell Hybridomas 563-681 (Elsevier, N.Y., 1981) (said references incorporated by reference in their entireties). The term “monoclonal antibody” as used herein is not limited to antibodies produced through hybridoma technology. The term “monoclonal antibody” refers to an antibody that is derived from a single clone, including any eukaryotic, prokaryotic, or phage clone, and not the method by which it is produced.

[0300] Methods for producing and screening for specific antibodies using hybridoma technology are routine and well known in the art and are discussed in detail in the Examples. In a non-limiting example, mice can be immunized with a polypeptide of the invention or a cell expressing such peptide. Once an immune response is detected, e.g., antibodies specific for the antigen are detected in the mouse serum, the mouse spleen is harvested and splenocytes isolated. The splenocytes are then fused by well known techniques to any suitable myeloma cells, for example cells from cell line SP20 available from the ATCC. Hybridomas are selected and cloned by limited dilution. The hybridoma clones are then assayed by methods known in the art for cells that secrete antibodies capable of binding a polypeptide of the invention. Ascites fluid, which generally contains high levels of antibodies, can be generated by immunizing mice with positive hybridoma clones.

[0301] Accordingly, the present invention provides methods of generating monoclonal antibodies as well as antibodies produced by the method comprising culturing a hybridoma cell secreting an antibody of the invention wherein, preferably, the hybridoma is generated by fusing splenocytes isolated from a mouse immunized with an antigen of the invention with myeloma cells and then screening the hybridomas resulting from the fusion for hybridoma clones that secrete an antibody able to bind a polypeptide of the invention.

[0302] Another well known method for producing both polyclonal and monoclonal human B cell lines is transformation using Epstein Barr Virus (EBV). Protocols for generating EBV-transformed B cell lines are commonly known in the art, such as, for example, the protocol outlined in Chapter 7.22 of Current Protocols in Immunology, Coligan et al., Eds., 1994, John Wiley & Sons, NY, which is hereby incorporated in its entirety by reference. The source of B cells for transformation is commonly human peripheral blood, but B cells for transformation may also be derived from other sources including, but not limited to, lymph nodes, tonsil, spleen, tumor tissue, and infected tissues. Tissues are generally made into single cell suspensions prior to EBV transformation. Additionally, steps may be taken to either physically remove or inactivate T cells (e.g., by treatment with cyclosporin A) in B cell-containing samples, because T cells from individuals seropositive for anti-EBV antibodies can suppress B cell immortalization by EBV.

[0303] In general, the sample containing human B cells is innoculated with EBV, and cultured for 3-4 weeks. A typical source of EBV is the culture supernatant of the B95-8 cell line (ATCC #VR-1492). Physical signs of EBV transformation can generally be seen towards the end of the 3-4 week culture period. By phase-contrast microscopy, transformed cells may appear large, clear, hairy and tend to aggregate in tight clusters of cells. Initially, EBV lines are generally polyclonal. However, over prolonged periods of cell cultures, EBV lines may become monoclonal or polyclonal as a result of the selective outgrowth of particular B cell clones. Alternatively, polyclonal EBV transformed lines may be subcloned (e.g., by limiting dilution culture) or fused with a suitable fusion partner and plated at limiting dilution to obtain monoclonal B cell lines. Suitable fusion partners for EBV transformed cell lines include mouse myeloma cell lines (e.g., SP2/0, X63-Ag8.653), heteromyeloma cell lines (human×mouse; e.g, SPAM-8, SBC-H20, and CB-F7), and human cell lines (e.g., GM 1500, SKO-007, RPMI 8226, and KR-4). Thus, the present invention also provides a method of generating polyclonal or monoclonal human antibodies against polypeptides of the invention or fragments thereof, comprising EBV-transformation of human B cells.

[0304] Antibody fragments which recognize specific epitopes may be generated by known techniques. For example, Fab and F(ab′)2 fragments of the invention may be produced by proteolytic cleavage of immunoglobulin molecules, using enzymes such as papain (to produce Fab fragments) or pepsin (to produce F(ab′)2 fragments). F(ab′)2 fragments contain the variable region, the light chain constant region and the CH1 domain of the heavy chain.

[0305] For example, the antibodies of the present invention can also be generated using various phage display methods known in the art. In phage display methods, functional antibody domains are displayed on the surface of phage particles which carry the polynucleotide sequences encoding them. In a particular embodiment, such phage can be utilized to display antigen binding domains expressed from a repertoire or combinatorial antibody library (e.g., human or murine). Phage expressing an antigen binding domain that binds the antigen of interest can be selected or identified with antigen, e.g., using labeled antigen or antigen bound or captured to a solid surface or bead. Phage used in these methods are typically filamentous phage including fd and M13 binding domains expressed from phage with Fab, Fv or disulfide stabilized Fv antibody domains recombinantly fused to either the phage gene III or gene VIII protein. Examples of phage display methods that can be used to make the antibodies of the present invention include those disclosed in Brinkman et al., J. Immunol. Methods 182:41-50 (1995); Ames et al., J. Immunol. Methods 184:177-186 (1995); Kettleborough et al., Eur. J. Immunol. 24:952-958 (1994); Persic et al., Gene 187 9-18 (1997); Burton et al., Advances in Immunology 57:191-280 (1994); PCT application No. PCT/GB91/01134; PCT publications WO 90/02809; WO 91/10737; WO 92/01047; WO 92/18619; WO 93/11236; WO 95/15982; WO 95/20401; and U.S. Pat. Nos. 5,698,426; 5,223,409; 5,403,484; 5,580,717; 5,427,908; 5,750,753; 5,821,047; 5,571,698; 5,427,908; 5,516,637; 5,780,225; 5,658,727; 5,733,743 and 5,969,108; each of which is incorporated herein by reference in its entirety.

[0306] As described in the above references, after phage selection, the antibody coding regions from the phage can be isolated and used to generate whole antibodies, including human antibodies, or any other desired antigen binding fragment, and expressed in any desired host, including mammalian cells, insect cells, plant cells, yeast, and bacteria, e.g., as described in detail below. For example, techniques to recombinantly produce Fab, Fab′ and F(ab′)2 fragments can also be employed using methods known in the art such as those disclosed in PCT publication WO 92/22324; Mullinax et al., BioTechniques 12(6):864-869 (1992); and Sawai et al., AJRI 34:26-34 (1995); and Better et al., Science 240:1041-1043 (1988) (said references incorporated by reference in their entireties).

[0307] Examples of techniques which can be used to produce single-chain Fvs and antibodies include those described in U.S. Pat. Nos. 4,946,778 and 5,258,498; Huston et al., Methods in Enzymology 203:46-88 (1991); Shu et al., PNAS 90:7995-7999 (1993); and Skerra et al., Science 240:1038-1040 (1988). For some uses, including in vivo use of antibodies in humans and in vitro detection assays, it may be preferable to use chimeric, humanized, or human antibodies. A chimeric antibody is a molecule in which different portions of the antibody are derived from different animal species, such as antibodies having a variable region derived from a murine monoclonal antibody and a human immunoglobulin constant region. Methods for producing chimeric antibodies are known in the art. See e.g., Morrison, Science 229:1202 (1985); Oi et al., BioTechniques 4:214 (1986); Gillies et al., (1989) J. Immunol. Methods 125:191-202; U.S. Pat. Nos. 5,807,715; 4,816,567; and 4,816397, which are incorporated herein by reference in their entirety. Humanized antibodies are antibody molecules from non-human species antibody that binds the desired antigen having one or more complementarity determining regions (CDRs) from the non-human species and a framework regions from a human immunoglobulin molecule. Often, framework residues in the human framework regions will be substituted with the corresponding residue from the CDR donor antibody to alter, preferably improve, antigen binding. These framework substitutions are identified by methods well known in the art, e.g., by modeling of the interactions of the CDR and framework residues to identify framework residues important for antigen binding and sequence comparison to identify unusual framework residues at particular positions. (See, e.g., Queen et al., U.S. Pat. No. 5,585,089; Riechmann et al., Nature 332:323 (1988), which are incorporated herein by reference in their entireties.) Antibodies can be humanized using a variety of techniques known in the art including, for example, CDR-grafting (EP 239,400; PCT publication WO 91/09967; U.S. Pat. Nos. 5,225,539; 5,530,101; and 5,585,089), veneering or resurfacing (EP 592,106; EP 519,596; Padlan, Molecular Immunology 28(4/5):489-498 (1991); Studnicka et al., Protein Engineering 7(6):805-814 (1994); Roguska. et al., PNAS 91:969-973 (1994)), and chain shuffling (U.S. Pat. No. 5,565,332).

[0308] Completely human antibodies are particularly desirable for therapeutic treatment of human patients. Human antibodies can be made by a variety of methods known in the art including phage display methods described above using antibody libraries derived from human immunoglobulin sequences. See also, U.S. Pat. Nos. 4,444,887 and 4,716,111; and PCT publications WO 98/46645, WO 98/50433, WO 98/24893, WO 98/16654, WO 96/34096, WO 96/33735, and WO 91/10741; each of which is incorporated herein by reference in its entirety.

[0309] Human antibodies can also be produced using transgenic mice which are incapable of expressing functional endogenous immunoglobulins, but which can express human immunoglobulin genes. For example, the human heavy and light chain immunoglobulin gene complexes may be introduced randomly or by homologous recombination into mouse embryonic stem cells. Alternatively, the human variable region, constant region, and diversity region may be introduced into mouse embryonic stem cells in addition to the human heavy and light chain genes. The mouse heavy and light chain immunoglobulin genes may be rendered non-functional separately or simultaneously with the introduction of human immunoglobulin loci by homologous recombination. In particular, homozygous deletion of the JH region prevents endogenous antibody production. The modified embryonic stem cells are expanded and microinjected into blastocysts to produce chimeric mice. The chimeric mice are then bred to produce homozygous offspring which express human antibodies. The transgenic mice are immunized in the normal fashion with a selected antigen, e.g., all or a portion of a polypeptide of the invention. Monoclonal antibodies directed against the antigen can be obtained from the immunized, transgenic mice using conventional hybridoma technology. The human immunoglobulin transgenes harbored by the transgenic mice rearrange during B cell differentiation, and subsequently undergo class switching and somatic mutation. Thus, using such a technique, it is possible to produce therapeutically useful IgG, IgA, IgM and IgE antibodies. For an overview of this technology for producing human antibodies, see Lonberg and Huszar, Int. Rev. Immunol. 13:65-93 (1995). For a detailed discussion of this technology for producing human antibodies and human monoclonal antibodies and protocols for producing such antibodies, see, e.g., PCT publications WO 98/24893; WO 92/01047; WO 96/34096; WO 96/33735; European Patent No. 0 598 877; U.S. Pat. Nos. 5,413,923; 5,625,126; 5,633,425; 5,569,825; 5,661,016; 5,545,806; 5,814,318; 5,885,793; 5,916,771; 5,939,598; 6,075,181; and 6,114,598, which are incorporated by reference herein in their entirety. In addition, companies such as Abgenix, Inc. (Freemont, Calif.) and Genpharm (San Jose, Calif.) can be engaged to provide human antibodies directed against a selected antigen using technology similar to that described above.

[0310] Completely human antibodies which recognize a selected epitope can be generated using a technique referred to as “guided selection.” In this approach a selected non-human monoclonal antibody, e.g., a mouse antibody, is used to guide the selection of a completely human antibody recognizing the same epitope. (Jespers et al., Bio/technology 12:899-903 (1988)).

[0311] Further, antibodies to the polypeptides of the invention can, in turn, be utilized to generate anti-idiotype antibodies that “mimic” polypeptides of the invention using techniques well known to those skilled in the art. (See, e.g., Greenspan & Bona, FASEB J. 7(5):437-444; (1989) and Nissinoff, J. Immunol. 147(8):2429-2438 (1991)). For example, antibodies which bind to and competitively inhibit polypeptide multimerization and/or binding of a polypeptide of the invention to a ligand can be used to generate anti-idiotypes that “mimic” the polypeptide multimerization and/or binding domain and, as a consequence, bind to and neutralize polypeptide and/or its ligand. Such neutralizing anti-idiotypes or Fab fragments of such anti-idiotypes can be used in therapeutic regimens to neutralize polypeptide ligand(s)/receptor(s). For example, such anti-idiotypic antibodies can be used to bind a polypeptide of the invention and/or to bind its ligand(s)/receptor(s), and thereby block its biological activity. Alternatively, antibodies which bind to and enhance polypeptide multimerization and/or binding, and/or receptor/ligand multimerization, binding and/or signaling can be used to generate anti-idiotypes that function as agonists of a polypeptide of the invention and/or its ligand/receptor. Such agonistic anti-idiotypes or Fab fragments of such anti-idiotypes can be used in therapeutic regimens as agonists of the polypeptides of the invention or its ligand(s)/receptor(s). For example, such anti-idiotypic antibodies can be used to bind a polypeptide of the invention and/or to bind its ligand(s)/receptor(s), and thereby promote or enhance its biological activity.

[0312] Intrabodies of the invention can be produced using methods known in the art, such as those disclosed and reviewed in Chen et al., Hum. Gene Ther. 5:595-601 (1994); Marasco, W. A., Gene Ther. 4:11-15 (1997); Rondon and Marasco, Annu. Rev. Microbiol. 51:257-283 (1997); Proba et al., J. Mol. Biol. 275:245-253 (1998); Cohen et al., Oncogene 17:2445-2456 (1998); Ohage and Steipe, J. Mol. Biol. 291:1119-1128 (1999); Ohage et al., J. Mol. Biol. 291:1129-1134 (1999); Wirtz and Steipe, Protein Sci. 8:2245-2250 (1999); Zhu et al., J. Immunol. Methods 231:207-222 (1999); and references cited therein.

Polynucleotides Encoding Antibodies

[0313] The invention further provides polynucleotides comprising a nucleotide sequence encoding an antibody of the invention and fragments thereof. The invention also encompasses polynucleotides that hybridize under stringent or alternatively, under lower stringency hybridization conditions, e.g., as defined supra, to polynucleotides that encode an antibody, preferably, that specifically binds to a polypeptide of the invention, preferably, an antibody that binds to a polypeptide having the amino acid sequence of SEQ ID NO:Y, to a polypeptide encoded by a portion of SEQ ID NO:X as defined in columns 8 and 9 of Table 2, and/or to a polypeptide encoded by the cDNA contained in Clone ID NO:Z.

[0314] The polynucleotides may be obtained, and the nucleotide sequence of the polynucleotides determined, by any method known in the art. For example, if the nucleotide sequence of the antibody is known, a polynucleotide encoding the antibody may be assembled from chemically synthesized oligonucleotides (e.g., as described in Kutmeier et al., BioTechniques 17:242 (1994)), which, briefly, involves the synthesis of overlapping oligonucleotides containing portions of the sequence encoding the antibody, annealing and ligating of those oligonucleotides, and then amplification of the ligated oligonucleotides by PCR.

[0315] Alternatively, a polynucleotide encoding an antibody may be generated from nucleic acid from a suitable source. If a clone containing a nucleic acid encoding a particular antibody is not available, but the sequence of the antibody molecule is known, a nucleic acid encoding the immunoglobulin may be chemically synthesized or obtained from a suitable source (e.g., an antibody cDNA library, or a cDNA library generated from, or nucleic acid, preferably poly A+ RNA, isolated from, any tissue or cells expressing the antibody, such as hybridoma cells selected to express an antibody of the invention) by PCR amplification using synthetic primers hybridizable to the 3′ and 5′ ends of the sequence or by cloning using an oligonucleotide probe specific for the particular gene sequence to identify, e.g., a cDNA clone from a cDNA library that encodes the antibody. Amplified nucleic acids generated by PCR may then be cloned into replicable cloning vectors using any method well known in the art.

[0316] Once the nucleotide sequence and corresponding amino acid sequence of the antibody is determined, the nucleotide sequence of the antibody may be manipulated using methods well known in the art for the manipulation of nucleotide sequences, e.g., recombinant DNA techniques, site directed mutagenesis, PCR, etc. (see, for example, the techniques described in Sambrook et al., 1990, Molecular Cloning, A Laboratory Manual, 2d Ed., Cold Spring Harbor Laboratory, Cold Spring Harbor, N.Y. and Ausubel et al., eds., 1998, Current Protocols in Molecular Biology, John Wiley & Sons, NY, which are both incorporated by reference herein in their entireties), to generate antibodies having a different amino acid sequence, for example to create amino acid substitutions, deletions, and/or insertions.

[0317] In a specific embodiment, the amino acid sequence of the heavy and/or light chain variable domains may be inspected to identify the sequences of the complementarity determining regions (CDRs) by methods that are well know in the art, e.g., by comparison to known amino acid sequences of other heavy and light chain variable regions to determine the regions of sequence hypervariability. Using routine recombinant DNA techniques, one or more of the CDRs may be inserted within framework regions, e.g., into human framework regions to humanize a non-human antibody, as described supra. The framework regions may be naturally occurring or consensus framework regions, and preferably human framework regions (see, e.g., Chothia et al., J. Mol. Biol. 278: 457-479 (1998) for a listing of human framework regions). Preferably, the polynucleotide generated by the combination of the framework regions and CDRs encodes an antibody that specifically binds a polypeptide of the invention. Preferably, as discussed supra, one or more amino acid substitutions may be made within the framework regions, and, preferably, the amino acid substitutions improve binding of the antibody to its antigen. Additionally, such methods may be used to make amino acid substitutions or deletions of one or more variable region cysteine residues participating in an intrachain disulfide bond to generate antibody molecules lacking one or more intrachain disulfide bonds. Other alterations to the polynucleotide are encompassed by the present invention and within the skill of the art.

[0318] In addition, techniques developed for the production of “chimeric antibodies” (Morrison et al., Proc. Natl. Acad. Sci. 81:851-855 (1984); Neuberger et al., Nature 312:604-608 (1984); Takeda et al., Nature 314:452-454 (1985)) by splicing genes from a mouse antibody molecule of appropriate antigen specificity together with genes from a human antibody molecule of appropriate biological activity can be used. As described supra, a chimeric antibody is a molecule in which different portions are derived from different animal species, such as those having a variable region derived from a murine mAb and a human immunoglobulin constant region, e.g., humanized antibodies.

[0319] Alternatively, techniques described for the production of single chain antibodies (U.S. Pat. No. 4,946,778; Bird, Science 242:423-42 (1988); Huston et al., Proc. Natl. Acad. Sci. USA 85:5879-5883 (1988); and Ward et al., Nature 334:544-54 (1989)) can be adapted to produce single chain antibodies. Single chain antibodies are formed by linking the heavy and light chain fragments of the Fv region via an amino acid bridge, resulting in a single chain polypeptide. Techniques for the assembly of functional Fv fragments in E. coli may also be used (Skerra et al., Science 242:1038-1041 (1988)).

Methods of Producing Antibodies

[0320] The antibodies of the invention can be produced by any method known in the art for the synthesis of antibodies, in particular, by chemical synthesis or preferably, by recombinant expression techniques. Methods of producing antibodies include, but are not limited to, hybridoma technology, EBV transformation, and other methods discussed herein as well as through the use recombinant DNA technology, as discussed below.

[0321] Recombinant expression of an antibody of the invention, or fragment, derivative or analog thereof, (e.g., a heavy or light chain of an antibody of the invention or a single chain antibody of the invention), requires construction of an expression vector containing a polynucleotide that encodes the antibody. Once a polynucleotide encoding an antibody molecule or a heavy or light chain of an antibody, or portion thereof (preferably containing the heavy or light chain variable domain), of the invention has been obtained, the vector for the production of the antibody molecule may be produced by recombinant DNA technology using techniques well known in the art. Thus, methods for preparing a protein by expressing a polynucleotide containing an antibody encoding nucleotide sequence are described herein. Methods which are well known to those skilled in the art can be used to construct expression vectors containing antibody coding sequences and appropriate transcriptional and translational control signals. These methods include, for example, in vitro recombinant DNA techniques, synthetic techniques, and in vivo genetic recombination. The invention, thus, provides replicable vectors comprising a nucleotide sequence encoding an antibody molecule of the invention, or a heavy or light chain thereof, or a heavy or light chain variable domain, operably linked to a promoter. Such vectors may include the nucleotide sequence encoding the constant region of the antibody molecule (see, e.g., PCT Publication WO 86/05807; PCT Publication WO 89/01036; and U.S. Pat. No. 5,122,464) and the variable domain of the antibody may be cloned into such a vector for expression of the entire heavy or light chain.

[0322] The expression vector is transferred to a host cell by conventional techniques and the transfected cells are then cultured by conventional techniques to produce an antibody of the invention. Thus, the invention includes host cells containing a polynucleotide encoding an antibody of the invention, or a heavy or light chain thereof, or a single chain antibody of the invention, operably linked to a heterologous promoter. In preferred embodiments for the expression of double-chained antibodies, vectors encoding both the heavy and light chains may be co-expressed in the host cell for expression of the entire immunoglobulin molecule, as detailed below.

[0323] A variety of host-expression vector systems may be utilized to express the antibody molecules of the invention. Such host-expression systems represent vehicles by which the coding sequences of interest may be produced and subsequently purified, but also represent cells which may, when transformed or transfected with the appropriate nucleotide coding sequences, express an antibody molecule of the invention in situ. These include but are not limited to microorganisms such as bacteria (e.g., E. coli, B. subtilis) transformed with recombinant bacteriophage DNA, plasmid DNA or cosmid DNA expression vectors containing antibody coding sequences; yeast (e.g., Saccharomyces, Pichia) transformed with recombinant yeast expression vectors containing antibody coding sequences; insect cell systems infected with recombinant virus expression vectors (e.g., baculovirus) containing antibody coding sequences; plant cell systems infected with recombinant virus expression vectors (e.g., cauliflower mosaic virus, CaMV; tobacco mosaic virus, TMV) or transformed with recombinant plasmid expression vectors (e.g., Ti plasmid) containing antibody coding sequences; or mammalian cell systems (e.g., COS, CHO, BHK, 293, 3T3 cells) harboring recombinant expression constructs containing promoters derived from the genome of mammalian cells (e.g., metallothionein promoter) or from mammalian viruses (e.g., the adenovirus late promoter; the vaccinia virus 7.5K promoter). Preferably, bacterial cells such as Escherichia coli, and more preferably, eukaryotic cells, especially for the expression of whole recombinant antibody molecule, are used for the expression of a recombinant antibody molecule. For example, mammalian cells such as Chinese hamster ovary cells (CHO), in conjunction with a vector such as the major intermediate early gene promoter element from human cytomegalovirus is an effective expression system for antibodies (Foecking et al., Gene 45:101 (1986); Cockett et al., Bio/Technology 8:2 (1990)).

[0324] In bacterial systems, a number of expression vectors may be advantageously selected depending upon the use intended for the antibody molecule being expressed. For example, when a large quantity of such a protein is to be produced, for the generation of pharmaceutical compositions of an antibody molecule, vectors which direct the expression of high levels of fusion protein products that are readily purified may be desirable. Such vectors include, but are not limited, to the E. coli expression vector pUR278 (Ruther et al., EMBO J. 2:1791 (1983)), in which the antibody coding sequence may be ligated individually into the vector in frame with the lac Z coding region so that a fusion protein is produced; pIN vectors (Inouye & Inouye, Nucleic Acids Res. 13:3101-3109 (1985); Van Heeke & Schuster, J. Biol. Chem. 24:5503-5509 (1989)); and the like. pGEX vectors may also be used to express foreign polypeptides as fusion proteins with glutathione S-transferase (GST). In general, such fusion proteins are soluble and can easily be purified from lysed cells by adsorption and binding to matrix glutathione-agarose beads followed by elution in the presence of free glutathione. The pGEX vectors are designed to include thrombin or factor Xa protease cleavage sites so that the cloned target gene product can be released from the GST moiety.

[0325] In an insect system, Autographa californica nuclear polyhedrosis virus (AcNPV) is used as a vector to express foreign genes. The virus grows in Spodoptera frugiperda cells. The antibody coding sequence may be cloned individually into non-essential regions (for example the polyhedrin gene) of the virus and placed under control of an AcNPV promoter (for example the polyhedrin promoter).

[0326] In mammalian host cells, a number of viral-based expression systems may be utilized. In cases where an adenovirus is used as an expression vector, the antibody coding sequence of interest may be ligated to an adenovirus transcription/translation control complex, e.g., the late promoter and tripartite leader sequence. This chimeric gene may then be inserted in the adenovirus genome by in vitro or in vivo recombination. Insertion in a non-essential region of the viral genome (e.g., region E1 or E3) will result in a recombinant virus that is viable and capable of expressing the antibody molecule in infected hosts. (e.g., see Logan & Shenk, Proc. Natl. Acad. Sci. USA 81:355-359 (1984)). Specific initiation signals may also be required for efficient translation of inserted antibody coding sequences. These signals include the ATG initiation codon and adjacent sequences. Furthermore, the initiation codon must be in phase with the reading frame of the desired coding sequence to ensure translation of the entire insert. These exogenous translational control signals and initiation codons can be of a variety of origins, both natural and synthetic. The efficiency of expression may be enhanced by the inclusion of appropriate transcription enhancer elements, transcription terminators, etc. (see Bittner et al., Methods in Enzymol. 153:51-544 (1987)).

[0327] In addition, a host cell strain may be chosen which modulates the expression of the inserted sequences, or modifies and processes the gene product in the specific fashion desired. Such modifications (e.g., glycosylation) and processing (e.g., cleavage) of protein products may be important for the function of the protein. Different host cells have characteristic and specific mechanisms for the post-translational processing and modification of proteins and gene products. Appropriate cell lines or host systems can be chosen to ensure the correct modification and processing of the foreign protein expressed. To this end, eukaryotic host cells which possess the cellular machinery for proper processing of the primary transcript, glycosylation, and phosphorylation of the gene product may be used. Such mammalian host cells include but are not limited to CHO, VERY, BHK, Hela, COS, MDCK, 293, 3T3, WI38, and in particular, breast cancer cell lines such as, for example, BT483, Hs578T, HTB2, BT20 and T47D, and normal mammary gland cell line such as, for example, CRL7030 and Hs578Bst.

[0328] For long-term, high-yield production of recombinant proteins, stable expression is preferred. For example, cell lines which stably express the antibody molecule may be engineered. Rather than using expression vectors which contain viral origins of replication, host cells can be transformed with DNA controlled by appropriate expression control elements (e.g., promoter, enhancer, sequences, transcription terminators, polyadenylation sites, etc.), and a selectable marker. Following the introduction of the foreign DNA, engineered cells may be allowed to grow for 1-2 days in an enriched media, and then are switched to a selective media. The selectable marker in the recombinant plasmid confers resistance to the selection and allows cells to stably integrate the plasmid into their chromosomes and grow to form foci which in turn can be cloned and expanded into cell lines. This method may advantageously be used to engineer cell lines which express the antibody molecule. Such engineered cell lines may be particularly useful in screening and evaluation of compounds that interact directly or indirectly with the antibody molecule.

[0329] A number of selection systems may be used, including but not limited to the herpes simplex virus thymidine kinase (Wigler et al., Cell 11:223 (1977)), hypoxanthine-guanine phosphoribosyltransferase (Szybalska & Szybalski, Proc. Natl. Acad. Sci. USA 48:202 (1992)), and adenine phosphoribosyltransferase (Lowy et al., Cell 22:817 (1980)) genes can be employed in tk-, hgprt- or aprt-cells, respectively. Also, antimetabolite resistance can be used as the basis of selection for the following genes: dhfr, which confers resistance to methotrexate (Wigler et al., Natl. Acad. Sci. USA 77:357 (1980); O'Hare et al., Proc. Natl. Acad. Sci. USA 78:1527 (1981)); gpt, which confers resistance to mycophenolic acid (Mulligan & Berg, Proc. Natl. Acad. Sci. USA 78:2072 (1981)); neo, which confers resistance to the aminoglycoside G-418 Clinical Pharmacy 12:488-505; Wu and Wu, Biotherapy 3:87-95 (1991); Tolstoshev, Ann. Rev. Pharmacol. Toxicol. 32:573-596 (1993); Mulligan, Science 260:926-932 (1993); and Morgan and Anderson, Ann. Rev. Biochem. 62:191-217 (1993); May, 1993, TIB TECH 11(5):155-215 (1993)); and hygro, which confers resistance to hygromycin (Santerre et al., Gene 30:147 (1984)). Methods commonly known in the art of recombinant DNA technology may be routinely applied to select the desired recombinant clone, and such methods are described, for example, in Ausubel et al. (eds.), Current Protocols in Molecular Biology, John Wiley & Sons, NY (1993); Kriegler, Gene Transfer and Expression, A Laboratory Manual, Stockton Press, NY (1990); and in Chapters 12 and 13, Dracopoli et al. (eds), Current Protocols in Human Genetics, John Wiley & Sons, NY (1994); Colberre-Garapin et al., J. Mol. Biol. 150:1 (1981), which are incorporated by reference herein in their entireties.

[0330] The expression levels of an antibody molecule can be increased by vector amplification (for a review, see Bebbington and Hentschel, The use of vectors based on gene amplification for the expression of cloned genes in mammalian cells in DNA cloning, Vol. 3. (Academic Press, New York, 1987)). When a marker in the vector system expressing antibody is amplifiable, increase in the level of inhibitor present in culture of host cell will increase the number of copies of the marker gene. Since the amplified region is associated with the antibody gene, production of the antibody will also increase (Crouse et al., Mol. Cell. Biol. 3:257 (1983)).

[0331] Vectors which use glutamine synthase (GS) or DHFR as the selectable markers can be amplified in the presence of the drugs methionine sulphoximine or methotrexate, respectively. An advantage of glutamine synthase based vectors are the availabilty of cell lines (e.g., the murine myeloma cell line, NS0) which are glutamine synthase negative. Glutamine synthase expression systems can also function in glutamine synthase expressing cells (e.g. Chinese Hamster Ovary (CHO) cells) by providing additional inhibitor to prevent the functioning of the endogenous gene. A glutamine synthase expression system and components thereof are detailed in PCT publications: WO87/04462; WO86/05807; WO89/01036; WO89/10404; and WO91/06657 which are incorporated in their entireties by reference herein. Additionally, glutamine synthase expression vectors that may be used according to the present invention are commercially available from suplliers, including, for example Lonza Biologics, Inc. (Portsmouth, N.H.). Expression and production of monoclonal antibodies using a GS expression system in murine myeloma cells is described in Bebbington et al., Bio/technology 10:169(1992) and in Biblia and Robinson Biotechnol. Prog. 11:1 (1995) which are incorporated in their entirities by reference herein.

[0332] The host cell may be co-transfected with two expression vectors of the invention, the first vector encoding a heavy chain derived polypeptide and the second vector encoding a light chain derived polypeptide. The two vectors may contain identical selectable markers which enable equal expression of heavy and light chain polypeptides. Alternatively, a single vector may be used which encodes, and is capable of expressing, both heavy and light chain polypeptides. In such situations, the light chain should be placed before the heavy chain to avoid an excess of toxic free heavy chain (Proudfoot, Nature 322:52 (1986); Kohler, Proc. Natl. Acad. Sci. USA 77:2197 (1980)). The coding sequences for the heavy and light chains may comprise cDNA or genomic DNA.

[0333] Once an antibody molecule of the invention has been produced by an animal, chemically synthesized, or recombinantly expressed, it may be purified by any method known in the art for purification of an immunoglobulin molecule, for example, by chromatography (e.g., ion exchange, affinity, particularly by affinity for the specific antigen after Protein A, and sizing column chromatography), centrifugation, differential solubility, or by any other standard technique for the purification of proteins. In addition, the antibodies of the present invention or fragments thereof can be fused to heterologous polypeptide sequences described herein or otherwise known in the art, to facilitate purification.

[0334] The present invention encompasses antibodies recombinantly fused or chemically conjugated (including both covalently and non-covalently conjugations) to a polypeptide (or portion thereof, preferably at least 10, 20, 30, 40, 50, 60, 70, 80, 90 or 100 amino acids of the polypeptide) of the present invention to generate fusion proteins. The fusion does not necessarily need to be direct, but may occur through linker sequences. The antibodies may be specific for antigens other than polypeptides (or portion thereof, preferably at least 10, 20, 30, 40, 50, 60, 70, 80, 90 or 100 amino acids of the polypeptide) of the present invention. For example, antibodies may be used to target the polypeptides of the present invention to particular cell types, either in vitro or in vivo, by fusing or conjugating the polypeptides of the present invention to antibodies specific for particular cell surface receptors. Antibodies fused or conjugated to the polypeptides of the present invention may also be used in in vitro immunoassays and purification methods using methods known in the art. See e.g., Harbor et al., supra, and PCT publication WO 93/21232; EP 439,095; Naramura et al., Immunol. Lett. 39:91-99 (1994); U.S. Pat. No. 5,474,981; Gillies et al., PNAS 89:1428-1432 (1992); Fell et al., J. Immunol. 146:2446-2452 (1991), which are incorporated by reference in their entireties.

[0335] The present invention further includes compositions comprising the polypeptides of the present invention fused or conjugated to antibody domains other than the variable regions. For example, the polypeptides of the present invention may be fused or conjugated to an antibody Fc region, or portion thereof. The antibody portion fused to a polypeptide of the present invention may comprise the constant region, hinge region, CH1 domain, CH2 domain, and CH3 domain or any combination of whole domains or portions thereof. The polypeptides may also be fused or conjugated to the above antibody portions to form multimers. For example, Fc portions fused to the polypeptides of the present invention can form dimers through disulfide bonding between the Fc portions. Higher multimeric forms can be made by fusing the polypeptides to portions of IgA and IgM. Methods for fusing or conjugating the polypeptides of the present invention to antibody portions are known in the art. See, e.g., U.S. Pat. Nos. 5,336,603; 5,622,929; 5,359,046; 5,349,053; 5,447,851; 5,112,946; EP 307,434; EP 367,166; PCT publications WO 96/04388; WO 91/06570; Ashkenazi et al., Proc. Natl. Acad. Sci. USA 88:10535-10539 (1991); Zheng et al., J. Immunol. 154:5590-5600 (1995); and Vil et al., Proc. Natl. Acad. Sci. USA 89:11337-11341 (1992) (said references incorporated by reference in their entireties).

[0336] As discussed, supra, the polypeptides corresponding to a polypeptide, polypeptide fragment, or a variant of SEQ ID NO:Y may be fused or conjugated to the above antibody portions to increase the in vivo half life of the polypeptides or for use in immunoassays using methods known in the art. Further, the polypeptides corresponding to SEQ ID NO:Y may be fused or conjugated to the above antibody portions to facilitate purification. One reported example describes chimeric proteins consisting of the first two domains of the human CD4-polypeptide and various domains of the constant regions of the heavy or light chains of mammalian immunoglobulins. See EP 394,827; and Traunecker et al., Nature 331:84-86 (1988). The polypeptides of the present invention fused or conjugated to an antibody having disulfide-linked dimeric structures (due to the IgG) may also be more efficient in binding and neutralizing other molecules, than the monomeric secreted protein or protein fragment alone. See, for example, Fountoulakis et al., J. Biochem. 270:3958-3964 (1995). In many cases, the Fc part in a fusion protein is beneficial in therapy and diagnosis, and thus can result in, for example, improved pharmacokinetic properties. See, for example, EP A 232,262. Alternatively, deleting the Fc part after the fusion protein has been expressed, detected, and purified, would be desired. For example, the Fc portion may hinder therapy and diagnosis if the fusion protein is used as an antigen for immunizations. In drug discovery, for example, human proteins, such as hIL-5, have been fused with Fc portions for the purpose of high-throughput screening assays to identify antagonists of hIL-5. (See, Bennett et al., J. Molecular Recognition 8:52-58 (1995); Johanson et al., J. Biol. Chem. 270:9459-9471 (1995)).

[0337] Moreover, the antibodies or fragments thereof of the present invention can be fused to marker sequences, such as a peptide to facilitate purification. In preferred embodiments, the marker amino acid sequence is a hexa-histidine peptide, such as the tag provided in a pQE vector (QIAGEN, Inc., 9259 Eton Avenue, Chatsworth, Calif., 91311), among others, many of which are commercially available. As described in Gentz et al., Proc. Natl. Acad. Sci. USA 86:821-824 (1989), for instance, hexa-histidine provides for convenient purification of the fusion protein. Other peptide tags useful for purification include, but are not limited to, the “HA” tag, which corresponds to an epitope derived from the influenza hemagglutinin protein (Wilson et al., Cell 37:767 (1984)) and the “flag” tag.

[0338] The present invention further encompasses antibodies or fragments thereof conjugated to a diagnostic or therapeutic agent. The antibodies can be used diagnostically to, for example, monitor the development or progression of a tumor as part of a clinical testing procedure to, e.g., determine the efficacy of a given treatment regimen. Detection can be facilitated by coupling the antibody to a detectable substance. Examples of detectable substances include various enzymes, prosthetic groups, fluorescent materials, luminescent materials, bioluminescent materials, radioactive materials, positron emitting metals using various positron emission tomographies, and nonradioactive paramagnetic metal ions. The detectable substance may be coupled or conjugated either directly to the antibody (or fragment thereof) or indirectly, through an intermediate (such as, for example, a linker known in the art) using techniques known in the art. See, for example, U.S. Pat. No. 4,741,900 for metal ions which can be conjugated to antibodies for use as diagnostics according to the present invention. Examples of suitable enzymes include horseradish peroxidase, alkaline phosphatase, beta-galactosidase, or acetylcholinesterase; examples of suitable prosthetic group complexes include streptavidin/biotin and avidin/biotin; examples of suitable fluorescent materials include umbelliferone, fluorescein, fluorescein isothiocyanate, rhodamine, dichlorotriazinylamine fluorescein, dansyl chloride or phycoerythrin; an example of a luminescent material includes luminol; examples of bioluminescent materials include luciferase, luciferin, and aequorin; and examples of suitable radioactive material include 125I, 131I, 111In or 99Tc.

[0339] Further, an antibody or fragment thereof may be conjugated to a therapeutic moiety such as a cytotoxin, e.g., a cytostatic or cytocidal agent, a therapeutic agent or a radioactive metal ion, e.g., alpha-emitters such as, for example, 213Bi. A cytotoxin or cytotoxic agent includes any agent that is detrimental to cells. Examples include paclitaxol, cytochalasin B, gramicidin D, ethidium bromide, emetine, mitomycin, etoposide, tenoposide, vincristine, vinblastine, colchicin, doxorubicin, daunorubicin, dihydroxy anthracin dione, mitoxantrone, mithramycin, actinomycin D, 1-dehydrotestosterone, glucocorticoids, procaine, tetracaine, lidocaine, propranolol, and puromycin and analogs or homologs thereof. Therapeutic agents include, but are not limited to, antimetabolites (e.g., methotrexate, 6-mercaptopurine, 6-thioguanine, cytarabine, 5-fluorouracil decarbazine), alkylating agents (e.g., mechlorethamine, thioepa chlorambucil, melphalan, carmustine (BSNU) and lomustine (CCNU), cyclothosphamide, busulfan, dibromomannitol, streptozotocin, mitomycin C, and cis-dichlorodiamine platinum (II) (DDP) cisplatin), anthracyclines (e.g., daunorubicin (formerly daunomycin) and doxorubicin), antibiotics (e.g., dactinomycin (formerly actinomycin), bleomycin, mithramycin, and anthramycin (AMC)), and anti-mitotic agents (e.g., vincristine and vinblastine).

[0340] The conjugates of the invention can be used for modifying a given biological response, the therapeutic agent or drug moiety is not to be construed as limited to classical chemical therapeutic agents. For example, the drug moiety may be a protein or polypeptide possessing a desired biological activity. Such proteins may include, for example, a toxin such as abrin, ricin A, pseudomonas exotoxin, or diphtheria toxin; a protein such as tumor necrosis factor, a-interferon, β-interferon, nerve growth factor, platelet derived growth factor, tissue plasminogen activator, an apoptotic agent, e.g., TNF-alpha, TNF-beta, AIM I (See, International Publication No. WO 97/33899), AIM II (See, International Publication No. WO 97/34911), Fas Ligand (Takahashi et al., Int. Immunol., 6:1567-1574 (1994)), VEGI (See, International Publication No. WO 99/23105), a thrombotic agent or an anti-angiogenic agent, e.g., angiostatin or endostatin; or, biological response modifiers such as, for example, lymphokines, interleukin-1 (“IL-1”), interleukin-2 (“IL-2”), interleukin-6 (“IL-6”), granulocyte macrophage colony stimulating factor (“GM-CSF”), granulocyte colony stimulating factor (“G-CSF”), or other growth factors.

[0341] Antibodies may also be attached to solid supports, which are particularly useful for immunoassays or purification of the target antigen. Such solid supports include, but are not limited to, glass, cellulose, polyacrylamide, nylon, polystyrene, polyvinyl chloride or polypropylene.

[0342] Techniques for conjugating such therapeutic moiety to antibodies are well known. See, for example, Amon et al., “Monoclonal Antibodies For Immunotargeting Of Drugs In Cancer Therapy”, in Monoclonal Antibodies And Cancer Therapy, Reisfeld et al. (eds.), pp. 243-56 (Alan R. Liss, Inc. 1985); Hellstrom et al., “Antibodies For Drug Delivery”, in Controlled Drug Delivery (2nd Ed.), Robinson et al. (eds.), pp. 623-53 (Marcel Dekker, Inc. 1987); Thorpe, “Antibody Carriers Of Cytotoxic Agents In Cancer Therapy: A Review”, in Monoclonal Antibodies '84: Biological And Clinical Applications, Pinchera et al. (eds.), pp. 475-506 (1985); “Analysis, Results, And Future Prospective Of The Therapeutic Use Of Radiolabeled Antibody In Cancer Therapy”, in Monoclonal Antibodies For Cancer Detection And Therapy, Baldwin et al. (eds.), pp. 303-16 (Academic Press 1985), and Thorpe et al., “The Preparation And Cytotoxic Properties Of Antibody-Toxin Conjugates”, Immunol. Rev. 62:119-58 (1982).

[0343] Alternatively, an antibody can be conjugated to a second antibody to form an antibody heteroconjugate as described by Segal in U.S. Pat. No. 4,676,980, which is incorporated herein by reference in its entirety.

[0344] An antibody, with or without a therapeutic moiety conjugated to it, administered alone or in combination with cytotoxic factor(s) and/or cytokine(s) can be used as a therapeutic.

Immunophenotyping

[0345] The antibodies of the invention may be utilized for immunophenotyping of cell lines and biological samples. Translation products of the gene of the present invention may be useful as cell-specific markers, or more specifically as cellular markers that are differentially expressed at various stages of differentiation and/or maturation of particular cell types. Monoclonal antibodies directed against a specific epitope, or combination of epitopes, will allow for the screening of cellular populations expressing the marker. Various techniques can be utilized using monoclonal antibodies to screen for cellular populations expressing the marker(s), and include magnetic separation using antibody-coated magnetic beads, “panning” with antibody attached to a solid matrix (i.e., plate), and flow cytometry (See, e.g., U.S. Pat. No. 5,985,660; and Morrison et al., Cell, 96:737-49 (1999)).

[0346] These techniques allow for the screening of particular populations of cells, such as might be found with hematological malignancies (i.e. minimal residual disease (MRD) in acute leukemic patients) and “non-self” cells in transplantations to prevent Graft-versus-Host Disease (GVHD). Alternatively, these techniques allow for the screening of hematopoietic stem and progenitor cells capable of undergoing proliferation and/or differentiation, as might be found in human umbilical cord blood.

Assays for Antibody Binding

[0347] The antibodies of the invention may be assayed for immunospecific binding by any method known in the art. The immunoassays which can be used include but are not limited to competitive and non-competitive assay systems using techniques such as western blots, radioimmunoassays, ELISA (enzyme linked immunosorbent assay), “sandwich” immunoassays, immunoprecipitation assays, precipitin reactions, gel diffusion precipitin reactions, immunodiffusion assays, agglutination assays, complement-fixation assays, immunoradiometric assays, fluorescent immunoassays, and protein A immunoassays, to name but a few. Such assays are routine and well known in the art (see, e.g., Ausubel et al, eds, 1994, Current Protocols in Molecular Biology, Vol. 1, John Wiley & Sons, Inc., New York, which is incorporated by reference herein in its entirety). Exemplary immunoassays are described briefly below (but are not intended by way of limitation).

[0348] Immunoprecipitation protocols generally comprise lysing a population of cells in a lysis buffer such as RIPA buffer (1% NP-40 or Triton X-100, 1% sodium deoxycholate, 0.1% SDS, 0.15 M NaCl, 0.01 M sodium phosphate at pH 7.2, 1% Trasylol) supplemented with protein phosphatase and/or protease inhibitors (e.g., EDTA, PMSF, aprotinin, sodium vanadate), adding the antibody of interest to the cell lysate, incubating for a period of time (e.g., 1-4 hours) at 4° C., adding protein A and/or protein G sepharose beads to the cell lysate, incubating for about an hour or more at 4° C., washing the beads in lysis buffer and resuspending the beads in SDS/sample buffer. The ability of the antibody of interest to immunoprecipitate a particular antigen can be assessed by, e.g., western blot analysis. One of skill in the art would be knowledgeable as to the parameters that can be modified to increase the binding of the antibody to an antigen and decrease the background (e.g., pre-clearing the cell lysate with sepharose beads). For further discussion regarding immunoprecipitation protocols see, e.g., Ausubel et al., eds., (1994), Current Protocols in Molecular Biology, Vol. 1, John Wiley & Sons, Inc., New York, section 10.16.1.

[0349] Western blot analysis generally comprises preparing protein samples, electrophoresis of the protein samples in a polyacrylamide gel (e.g., 8%-20% SDS-PAGE depending on the molecular weight of the antigen), transferring the protein sample from the polyacrylamide gel to a membrane such as nitrocellulose, PVDF or nylon, blocking the membrane in blocking solution (e.g., PBS with 3% BSA or non-fat milk), washing the membrane in washing buffer (e.g., PBS-Tween 20), blocking the membrane with primary antibody (the antibody of interest) diluted in blocking buffer, washing the membrane in washing buffer, blocking the membrane with a secondary antibody (which recognizes the primary antibody, e.g., an anti-human antibody) conjugated to an enzymatic substrate (e.g., horseradish peroxidase or alkaline phosphatase) or radioactive molecule (e.g., 32P or 125I) diluted in blocking buffer, washing the membrane in wash buffer, and detecting the presence of the antigen. One of skill in the art would be knowledgeable as to the parameters that can be modified to increase the signal detected and to reduce the background noise. For further discussion regarding western blot protocols see, e.g., Ausubel et al, eds, (1994), Current Protocols in Molecular Biology, Vol. 1, John Wiley & Sons, Inc., New York, section 10.8.1.

[0350] ELISAs comprise preparing antigen, coating the well of a 96 well microtiter plate with the antigen, adding the antibody of interest conjugated to a detectable compound such as an enzymatic substrate (e.g., horseradish peroxidase or alkaline phosphatase) to the well and incubating for a period of time, and detecting the presence of the antigen. In ELISAs the antibody of interest does not have to be conjugated to a detectable compound; instead, a second antibody (which recognizes the antibody of interest) conjugated to a detectable compound may be added to the well. Further, instead of coating the well with the antigen, the antibody may be coated to the well. In this case, a second antibody conjugated to a detectable compound may be added following the addition of the antigen of interest to the coated well. One of skill in the art would be knowledgeable as to the parameters that can be modified to increase the signal detected as well as other variations of ELISAs known in the art. For further discussion regarding ELISAs see, e.g., Ausubel et al, eds, (1994), Current Protocols in Molecular Biology, Vol. 1, John Wiley & Sons, Inc., New York, section 11.2.1.

[0351] The binding affinity of an antibody to an antigen and the off-rate of an antibody-antigen interaction can be determined by competitive binding assays. One example of a competitive binding assay is a radioimmunoassay comprising the incubation of labeled antigen (e.g., 3H or 125I) with the antibody of interest in the presence of increasing amounts of unlabeled antigen, and the detection of the antibody bound to the labeled antigen. The affinity of the antibody of interest for a particular antigen and the binding off-rates can be determined from the data by scatchard plot analysis. Competition with a second antibody can also be determined using radioimmunoassays. In this case, the antigen is incubated with antibody of interest conjugated to a labeled compound (e.g., 3H or 125I) in the presence of increasing amounts of an unlabeled second antibody.

[0352] Antibodies of the invention may be characterized using immunocytochemisty methods on cells (e.g., mammalian cells, such as CHO cells) transfected with a vector enabling the expression of an antigen or with vector alone using techniques commonly known in the art. Antibodies that bind antigen transfected cells, but not vector-only transfected cells, are antigen specific.

Therapeutic Uses

[0353] Table 1D: In preferred embodiments, the present invention encompasses a method of treating a disease or disorder listed in the “Preferred Indications” column of Table 1D; comprising administering to a patient in which such treatment, prevention, or amelioration is desired a protein, nucleic acid, or antibody of the invention (or fragment or variant thereof) represented by Table 1A and Table 1D (in the same row as the disease or disorder to be treated is listed in the “Preferred Indications” column of Table 1D) in an amount effective to treat, prevent, or ameliorate the disease or disorder.

[0354] As indicated in Table 1 D, the polynucleotides, polypeptides, agonists, or antagonists of the present invention (including antibodies) can be used in assays to test for one or more biological activities. If these polynucleotides and polypeptides do exhibit activity in a particular assay, it is likely that these molecules may be involved in the diseases associated with the biological activity. Thus, the polynucleotides or polypeptides, or agonists or antagonists thereof (including antibodies) could be used to treat the associated disease.

[0355] The present invention encompasses methods of preventing, treating, diagnosing, or ameliorating a disease or disorder. In preferred embodiments, the present invention encompasses a method of treating a disease or disorder listed in the “Preferred Indications” column of Table 1D; comprising administering to a patient in which such treatment, prevention, or amelioration is desired a protein, nucleic acid, or antibody of the invention (or fragment or variant thereof) in an amount effective to treat, prevent, diagnose, or ameliorate the disease or disorder. The first and seccond columns of Table 1D show the “Gene No.” and “cDNA Clone ID No.”, respectively, indicating certain nucleic acids and proteins (or antibodies against the same) of the invention (including polynucleotide, polypeptide, and antibody fragments or variants thereof) that may be used in preventing, treating, diagnosing, or ameliorating the disease(s) or disorder(s) indicated in the corresponding row in Column 3 of Table 1D.

[0356] In another embodiment, the present invention also encompasses methods of preventing, treating, diagnosing, or ameliorating a disease or disorder listed in the “Preferred Indications” column of Table 1D; comprising administering to a patient combinations of the proteins, nucleic acids, or antibodies of the invention (or fragments or variants thereof), sharing similar indications as shown in the corresponding rows in Column 3 of Table 1D.

[0357] The “Preferred Indication” column describes diseases, disorders, and/or conditions that may be treated, prevented, diagnosed, or ameliorated by a protein, nucleic acid, or antibody of the invention (or fragment or variant thereof).

[0358] The recitation of “Cancer” in the “Preferred Indication” column indicates that the corresponding nucleic acid and protein, or antibody against the same, of the invention (or fragment or variant thereof) may be used for example, to diagnose, treat, prevent, and/or ameliorate diseases and/or disorders relating to neoplastic diseases (e.g., leukemias, cancers, and/or as described below under “Hyperproliferative Disorders”).

[0359] In specific embodiments, a protein, nucleic acid, or antibody of the invention (or fragment or variant thereof) having a “Cancer” recitation in the “Preferred Indication” column of Table 1D may be used for example, to diagnose, treat, prevent, and/or ameliorate a neoplasm located in a tissue selected from the group consisting of: colon, abdomen, bone, breast, digestive system, liver, pancreas, prostate, peritoneum, lung, blood (e.g., leukemia), endocrine glands (adrenal, parathyroid, pituitary, testicles, ovary, thymus, thyroid), uterus, eye, head and neck, nervous (central and peripheral), lymphatic system, pelvic, skin, soft tissue, spleen, thoracic, and urogenital.

[0360] In specific embodiments, a protein, nucleic acid, or antibody of the invention (or fragment or variant thereof) having a “Cancer” recitation in the “Preferred Indication” column of Table 1D, may be used for example, to diagnose, treat, prevent, and/or ameliorate a pre-neoplastic condition, selected from the group consisting of: hyperplasia (e.g., endometrial hyperplasia and/or as described in the section entitled “Hyperproliferative Disorders”), metaplasia (e.g., connective tissue metaplasia, atypical metaplasia, and/or as described in the section entitled “Hyperproliferative Disorders”), and/or dysplasia (e.g., cervical dysplasia, and bronchopulmonary dysplasia).

[0361] In another specific embodiment, a protein, nucleic acid, or antibody of the invention (or fragment or variant thereof) having a “Cancer” recitation in the “Preferred Indication” column of Table 1D, may be used for example, to diagnose, treat, prevent, and/or ameliorate a benign dysproliferative disorder selected from the group consisting of: benign tumors, fibrocystic conditions, tissue hypertrophy, and/or as described in the section entitled “Hyperproliferative Disorders”.

[0362] The recitation of “Immune/Hematopoietic” in the “Preferred Indication” column indicates that the corresponding nucleic acid and protein, or antibody against the same, of the invention (or fragment or variant thereof), may be used for example, to diagnose, treat, prevent, and/or ameliorate diseases and/or disorders relating to neoplastic diseases (e.g., as described below under “Hyperproliferative Disorders”), blood disorders (e.g., as described below under “Immune Activity” “Cardiovascular Disorders” and/or “Blood-Related Disorders”), and infections (e.g., as described below under “Infectious Disease”).

[0363] In specific embodiments, a protein, nucleic acid, or antibody of the invention (or fragment or variant thereof) having the “Immune/Hematopoietic” recitation in the “Preferred Indication” column of Table 1D, may be used for example, to diagnose, treat, prevent, and/or ameliorate a disease or disorder selected from the group consisting of: anemia, pancytopenia, leukopenia, thrombocytopenia, leukemias, Hodgkin's disease, non-Hodgkin's lymphoma, acute lymphocytic anemia (ALL), plasmacytomas, multiple myeloma, Burkitt's lymphoma, arthritis, asthma, AIDS, autoimmune disease, rheumatoid arthritis, granulomatous disease, immune deficiency, inflammatory bowel disease, sepsis, neutropenia, neutrophilia, psoriasis, immune reactions to transplanted organs and tissues, systemic lupus erythematosis, hemophilia, hypercoagulation, diabetes mellitus, endocarditis, meningitis, Lyme Disease, and allergies.

[0364] The recitation of “Reproductive” in the “Preferred Indication” column indicates that the corresponding nucleic acid and protein, or antibody against the same, of the invention (or fragment or variant thereof), may be used for example, to diagnose, treat, prevent, and/or ameliorate diseases and/or disorders relating to neoplastic diseases (e.g., as described below under “Hyperproliferative Disorders”), and disorders of the reproductive system (e.g., as described below under “Reproductive System Disorders”).

[0365] In specific embodiments, a protein, nucleic acid, or antibody of the invention (or fragment or variant thereof) having a “Reproductive” recitation in the “Preferred Indication” column of Table 1D, may be used for example, to diagnose, treat, prevent, and/or ameliorate a disease or disorder selected from the group consisting of: cryptorchism, prostatitis, inguinal hernia, varicocele, leydig cell tumors, verrucous carcinoma, prostatitis, malacoplakia, Peyronie's disease, penile carcinoma, squamous cell hyperplasia, dysmenorrhea, ovarian adenocarcinoma, Turner's syndrome, mucopurulent cervicitis, Sertoli-leydig tumors, ovarian cancer, uterine cancer, pelvic inflammatory disease, testicular cancer, prostate cancer, Klinefelter's syndrome, Young's syndrome, premature ejaculation, diabetes mellitus, cystic fibrosis, Kartagener's syndrome, testicular atrophy, testicular feminization, anorchia, ectopic testis, epididymitis, orchitis, gonorrhea, syphilis, testicular torsion, vasitis nodosa, germ cell tumors, stromal tumors, dysmenorrhea, retroverted uterus, endometriosis, fibroids, adenomyosis, anovulatory bleeding, amenorrhea, Cushing's syndrome, hydatidiform moles, Asherman's syndrome, premature menopause, precocious puberty, uterine polyps, dysfunctional uterine bleeding, cervicitis, chronic cervicitis, mucopurulent cervicitis, cervical dysplasia, cervical polyps, Nabothian cysts, cervical erosion, cervical incompetence, cervical neoplasms, pseudohermaphroditism, and premenstrual syndrome.

[0366] The recitation of “Musculoskeletal” in the “Preferred Indication” column indicates that the corresponding nucleic acid and protein, or antibody against the same, of the invention (or fragment or variant thereof), may be used for example, to diagnose, treat, prevent, and/or ameliorate diseases and/or disorders relating to neoplastic diseases (e.g., as described below under “Hyperproliferative Disorders”), and disorders of the immune system (e.g., as described below under “Immune Activity”).

[0367] In specific embodiments, a protein, nucleic acid, or antibody of the invention (or fragment or variant thereof) having a “Musculoskeletal” recitation in the “Preferred Indication” column of Table 1D, may be used for example, to diagnose, treat, prevent, and/or ameliorate a disease or disorder selected from the group consisting of: bone cancers (e.g., osteochondromas, benign chondromas, chondroblastoma, chondromyxoid fibromas, osteoid osteomas, giant cell tumors, multiple myeloma, osteosarcomas), Paget's Disease, rheumatoid arthritis, systemic lupus erythematosus, osteomyelitis, Lyme Disease, gout, bursitis, tendonitis, osteoporosis, osteoarthritis, muscular dystrophy, mitochondrial myopathy, cachexia, and multiple sclerosis.

[0368] The recitation of “Cardiovascular” in the “Preferred Indication” column indicates that the corresponding nucleic acid and protein, or antibody against the same, of the invention (or fragment or variant thereof), may be used for example, to diagnose, treat, prevent, and/or ameliorate diseases and/or disorders relating to neoplastic diseases (e.g., as described below under “Hyperproliferative Disorders”), and disorders of the cardiovascular system (e.g., as described below under “Cardiovascular Disorders”).

[0369] In specific embodiments, a protein, nucleic acid, or antibody of the invention (or fragment or variant thereof) having a “Cardiovascular” recitation in the “Preferred Indication” column of Table 1D, may be used for example, to diagnose, treat, prevent, and/or ameliorate a disease or disorder selected from the group consisting of: myxomas, fibromas, rhabdomyomas, cardiovascular abnormalities (e.g., congenital heart defects, cerebral arteriovenous malformations, septal defects), heart disease (e.g., heart failure, congestive heart disease, arrhythmia, tachycardia, fibrillation, pericardial Disease, endocarditis), cardiac arrest, heart valve disease (e.g., stenosis, regurgitation, prolapse), vascular disease (e.g., hypertension, coronary artery disease, angina, aneurysm, arteriosclerosis, peripheral vascular disease), hyponatremia, hypematremia, hypokalemia, and hyperkalemia.

[0370] The recitation of “Mixed Fetal” in the “Preferred Indication” column indicates that the corresponding nucleic acid and protein, or antibody against the same, of the invention (or fragment or variant thereof), may be used for example, to diagnose, treat, prevent, and/or ameliorate diseases and/or disorders relating to neoplastic diseases (e.g., as described below under “Hyperproliferative Disorders”).

[0371] In specific embodiments, a protein, nucleic acid, or antibody of the invention (or fragment or variant thereof) having a “Mixed Fetal” recitation in the “Preferred Indication” column of Table 1D, may be used for example, to diagnose, treat, prevent, and/or ameliorate a disease or disorder selected from the group consisting of: spina bifida, hydranencephaly, neurofibromatosis, fetal alcohol syndrome, diabetes mellitus, PKU, Down's syndrome, Patau syndrome, Edwards syndrome, Turner syndrome, Apert syndrome, Carpenter syndrome, Conradi syndrome, Crouzon syndrome, cutis laxa, Comelia de Lange syndrome, Ellis-van Creveld syndrome, Holt-Oram syndrome, Kartagener syndrome, Meckel-Gruber syndrome, Noonan syndrome, Pallister-Hall syndrome, Rubinstein-Taybi syndrome, Scimitar syndrome, Smith-Lemli-Opitz syndrome, thromocytopenia-absent radius (TAR) syndrome, Treacher Collins syndrome, Williams syndrome, Hirschsprung's disease, Meckel's diverticulum, polycystic kidney disease, Turner's syndrome, and gonadal dysgenesis, Klippel-Feil syndrome, Ostogenesis imperfecta, muscular dystrophy, Tay-Sachs disease, Wilm's tumor, neuroblastoma, and retinoblastoma.

[0372] The recitation of “Excretory” in the “Preferred Indication” column indicates that the corresponding nucleic acid and protein, or antibody against the same, of the invention (or fragment or variant thereof), may be used for example, to diagnose, treat, prevent, and/or ameliorate diseases and/or disorders relating to neoplastic diseases (e.g., as described below under “Hyperproliferative Disorders”) and renal disorders (e.g., as described below under “Renal Disorders”).

[0373] In specific embodiments, a protein, nucleic acid, or antibody of the invention (or fragment or variant thereof) having a “Excretory” recitation in the “Preferred Indication” column of Table 1D, may be used for example, to diagnose, treat, prevent, and/or ameliorate a disease or disorder selected from the group consisting of: bladder cancer, prostate cancer, benign prostatic hyperplasia, bladder disorders (e.g., urinary incontinence, urinary retention, urinary obstruction, urinary tract Infections, interstitial cystitis, prostatitis, neurogenic bladder, hematuria), renal disorders (e.g., hydronephrosis, proteinuria, renal failure, pyelonephritis, urolithiasis, reflux nephropathy, and unilateral obstructive uropathy).

[0374] The recitation of “Neural/Sensory” in the “Preferred Indication” column indicates that the corresponding nucleic acid and protein, or antibody against the same, of the invention (or fragment or variant thereof), may be used for example, to diagnose, treat, prevent, and/or ameliorate diseases and/or disorders relating to neoplastic diseases (e.g., as described below under “Hyperproliferative Disorders”) and diseases or disorders of the nervous system (e.g., as described below under “Neural Activity and Neurological Diseases”).

[0375] In specific embodiments, a protein, nucleic acid, or antibody of the invention (or fragment or variant thereof) having a “Neural/Sensory” recitation in the “Preferred Indication” column of Table 1D, may be used for example, to diagnose, treat, prevent, and/or ameliorate a disease or disorder selected from the group consisting of: brain cancer (e.g., brain stem glioma, brain tumors, central nervous system (Primary) lymphoma, central nervous system lymphoma, cerebellar astrocytoma, and cerebral astrocytoma, neurodegenerative disorders (e.g., Alzheimer's Disease, Creutzfeldt-Jakob Disease, Parkinson's Disease, and Idiopathic Presenile Dementia), encephalomyelitis, cerebral malaria, meningitis, metabolic brain diseases (e.g., phenylketonuria and pyruvate carboxylase deficiency), cerebellar ataxia, ataxia telangiectasia, and AIDS Dementia Complex, schizophrenia, attention deficit disorder, hyperactive attention deficit disorder, autism, and obsessive compulsive disorders.

[0376] The recitation of “Respiratory” in the “Preferred Indication” column indicates that the corresponding nucleic acid and protein, or antibody against the same, of the invention (or fragment or variant thereof), may be used for example, to diagnose, treat, prevent, and/or ameliorate diseases and/or disorders relating to neoplastic diseases (e.g., as described below under “Hyperproliferative Disorders”) and diseases or disorders of the respiratory system (e.g., as described below under “Respiratory Disorders”).

[0377] In specific embodiments, a protein, nucleic acid, or antibody of the invention (or fragment or variant thereof) having a “Respiratory” recitation in the “Preferred Indication” column of Table 1D, may be used for example, to diagnose, treat, prevent, and/or ameliorate a disease or disorder selected from the group consisting of: cancers of the respiratory system such as larynx cancer, pharynx cancer, trachea cancer, epiglottis cancer, lung cancer, squamous cell carcinomas, small cell (oat cell) carcinomas, large cell carcinomas, and adenocarcinomas. Allergic reactions, cystic fibrosis, sarcoidosis, histiocytosis X, infiltrative lung diseases (e.g., pulmonary fibrosis and lymphoid interstitial pneumonia), obstructive airway diseases (e.g., asthma, emphysema, chronic or acute bronchitis), occupational lung diseases (e.g., silicosis and asbestosis), pneumonia, and pleurisy.

[0378] The recitation of “Endocrine” in the “Preferred Indication” column indicates that the corresponding nucleic acid and protein, or antibody against the same, of the invention (or fragment or variant thereof), may be used for example, to diagnose, treat, prevent, and/or ameliorate diseases and/or disorders relating to neoplastic diseases (e.g., as described below under “Hyperproliferative Disorders”) and diseases or disorders of the respiratory system (e.g., as described below under “Respiratory Disorders”), renal disorders (e.g., as described below under “Renal Disorders”), and disorders of the endocrine system (e.g., as described below under “Endocrine Disorders”.

[0379] In specific embodiments, a protein, nucleic acid, or antibody of the invention (or fragment or variant thereof) having an “Endocrine” recitation in the “Preferred Indication” column of Table 1D, may be used for example, to diagnose, treat, prevent, and/or ameliorate a disease or disorder selected from the group consisting of: cancers of endocrine tissues and organs (e.g., cancers of the hypothalamus, pituitary gland, thyroid gland, parathyroid glands, pancreas, adrenal glands, ovaries, and testes), diabetes (e.g., diabetes insipidus, type I and type II diabetes mellitus), obesity, disorders related to pituitary glands (e.g., hyperpituitarism, hypopituitarism, and pituitary dwarfism), hypothyroidism, hyperthyroidism, goiter, reproductive disorders (e.g. male and female infertility), disorders related to adrenal glands (e.g., Addison's Disease, corticosteroid deficiency, and Cushing's Syndrome), kidney cancer (e.g., hypemephroma, transitional cell cancer, and Wilm's tumor), diabetic nephropathy, interstitial nephritis, polycystic kidney disease, glomerulonephritis (e.g., IgM mesangial proliferative glomerulonephritis and glomerulonephritis caused by autoimmune disorders; such as Goodpasture's syndrome), and nephrocalcinosis.

[0380] The recitation of “Digestive” in the “Preferred Indication” column indicates that the corresponding nucleic acid and protein, or antibody against the same, of the invention (or fragment or variant thereof), may be used for example, to diagnose, treat, prevent, and/or ameliorate diseases and/or disorders relating to neoplastic diseases (e.g., as described below under “Hyperproliferative Disorders”) and diseases or disorders of the gastrointestinal system (e.g., as described below under “Gastrointestinal Disorders”.

[0381] In specific embodiments, a protein, nucleic acid, or antibody of the invention (or fragment or variant thereof) having a “Digestive” recitation in the “Preferred Indication” column of Table 1D, may be used for example, to diagnose, treat, prevent, and/or ameliorate a disease or disorder selected from the group consisting of: ulcerative colitis, appendicitis, Crohn's disease, hepatitis, hepatic encephalopathy, portal hypertension, cholelithiasis, cancer of the digestive system (e.g., biliary tract cancer, stomach cancer, colon cancer, gastric cancer, pancreatic cancer, cancer of the bile duct, tumors of the colon (e.g., polyps or cancers), and cirrhosis), pancreatitis, ulcerative disease, pyloric stenosis, gastroenteritis, gastritis, gastric atropy, benign tumors of the duodenum, distension, irritable bowel syndrome, malabsorption, congenital disorders of the small intestine, bacterial and parasitic infection, megacolon, Hirschsprung's disease, aganglionic megacolon, acquired megacolon, colitis, anorectal disorders (e.g., anal fistulas, hemorrhoids), congenital disorders of the liver (e.g., Wilson's disease, hemochromatosis, cystic fibrosis, biliary atresia, and alpha1-antitrypsin deficiency), portal hypertension, cholelithiasis, and jaundice.

[0382] The recitation of “Connective/Epithelial” in the “Preferred Indication” column indicates that the corresponding nucleic acid and protein, or antibody against the same, of the invention (or fragment or variant thereof), may be used for example, to diagnose, treat, prevent, and/or ameliorate diseases and/or disorders relating to neoplastic diseases (e.g., as described below under “Hyperproliferative Disorders”), cellular and genetic abnormalities (e.g., as described below under “Diseases at the Cellular Level”), angiogenesis (e.g., as described below under “Anti-Angiogenesis Activity”), and or to promote or inhibit regeneration (e.g., as described below under “Regeneration”), and wound healing (e.g., as described below under “Wound Healing and Epithelial Cell Proliferation”). In specific embodiments, a protein, nucleic acid, or antibody of the invention (or fragment or variant thereof) having a “Connective/Epithelial” recitation in the “Preferred Indication” column of Table 1D, may be used for example, to diagnose, treat, prevent, and/or ameliorate a disease or disorder selected from the group consisting of: connective tissue metaplasia, mixed connective tissue disease, focal epithelial hyperplasia, epithelial metaplasia, mucoepithelial dysplasia, graft v. host disease, polymyositis, cystic hyperplasia, cerebral dysplasia, tissue hypertrophy, Alzheimer's disease, lymphoproliferative disorder, Waldenstron's macroglobulinemia, Crohn's disease, pernicious anemia, idiopathic Addison's disease, glomerulonephritis, bullous pemphigoid, Sjogren's syndrome, diabetes mellitus, cystic fibrosis, osteoblastoma, osteoclastoma, osteosarcoma, chondrosarcoma, osteoporosis, osteocarthritis, periodontal disease, wound healing, relapsing polychondritis, vasculitis, polyarteritis nodosa, Wegener's granulomatosis, cellulitis, rheumatoid arthritis, psoriatic arthritis, discoid lupus erythematosus, systemic lupus erythematosus, scleroderma, CREST syndrome, Sjogren's syndrome, polymyositis, dermatomyositis, mixed connective tissue disease, relapsing polychondritis, vasculitis, Henoch-Schonlein syndrome, erythema nodosum, polyarteritis nodosa, temporal (giant cell) arteritis, Takayasu's arteritis, Wegener's granulomatosis, Reiter's syndrome, Behcet's syndrome, ankylosing spondylitis, cellulitis, keloids, Ehier Danlos syndrome, Marfan syndrome, pseudoxantoma elasticum, osteogenese imperfecta, chondrodysplasias, epidermolysis bullosa, Alport syndrome, and cutis laxa.

[0383] The present invention is further directed to antibody-based therapies which involve administering antibodies of the invention to an animal, preferably a mammal, and most preferably a human, patient for treating one or more of the disclosed diseases, disorders, or conditions. Therapeutic compounds of the invention include, but are not limited to, antibodies of the invention (including fragments, analogs and derivatives thereof as described herein) and nucleic acids encoding antibodies of the invention (including fragments, analogs and derivatives thereof and anti-idiotypic antibodies as described herein). The antibodies of the invention can be used to treat, inhibit or prevent diseases, disorders or conditions associated with aberrant expression and/or activity of a polypeptide of the invention, including, but not limited to, any one or more of the diseases, disorders, or conditions described herein. The treatment and/or prevention of diseases, disorders, or conditions associated with aberrant expression and/or activity of a polypeptide of the invention includes, but is not limited to, alleviating symptoms associated with those diseases, disorders or conditions. Antibodies of the invention may be provided in pharmaceutically acceptable compositions as known in the art or as described herein.

[0384] In a specific and preferred embodiment, the present invention is directed to antibody-based therapies which involve administering antibodies of the invention to an animal, preferably a mammal, and most preferably a human, patient for treating one or more diseases, disorders, or conditions, including but not limited to: neural disorders, immune system disorders, muscular disorders, reproductive disorders, gastrointestinal disorders, pulmonary disorders, cardiovascular disorders, renal disorders, proliferative disorders, and/or cancerous diseases and conditions., and/or as described elsewhere herein. Therapeutic compounds of the invention include, but are not limited to, antibodies of the invention (e.g., antibodies directed to the full length protein expressed on the cell surface of a mammalian cell; antibodies directed to an epitope of a polypeptide of the invention (such as, for example, a predicted linear epitope shown in column 7 of Table 1B; or a conformational epitope, including fragments, analogs and derivatives thereof as described herein) and nucleic acids encoding antibodies of the invention (including fragments, analogs and derivatives thereof and anti-idiotypic antibodies as described herein). The antibodies of the invention can be used to treat, inhibit or prevent diseases, disorders or conditions associated with aberrant expression and/or activity of a polypeptide of the invention, including, but not limited to, any one or more of the diseases, disorders, or conditions described herein. The treatment and/or prevention of diseases, disorders, or conditions associated with aberrant expression and/or activity of a polypeptide of the invention includes, but is not limited to, alleviating symptoms associated with those diseases, disorders or conditions. Antibodies of the invention may be provided in pharmaceutically acceptable compositions as known in the art or as described herein.

[0385] A summary of the ways in which the antibodies of the present invention may be used therapeutically includes binding polynucleotides or polypeptides of the present invention locally or systemically in the body or by direct cytotoxicity of the antibody, e.g. as mediated by complement (CDC) or by effector cells (ADCC). Some of these approaches are described in more detail below. Armed with the teachings provided herein, one of ordinary skill in the art will know how to use the antibodies of the present invention for diagnostic, monitoring or therapeutic purposes without undue experimentation.

[0386] The antibodies of this invention may be advantageously utilized in combination with other monoclonal or chimeric antibodies, or with lymphokines or hematopoietic growth factors (such as, e.g., IL-2, IL-3 and IL-7), for example, which serve to increase the number or activity of effector cells which interact with the antibodies.

[0387] The antibodies of the invention may be administered alone or in combination with other types of treatments (e.g., radiation therapy, chemotherapy, hormonal therapy, immunotherapy and anti-tumor agents). Generally, administration of products of a species origin or species reactivity (in the case of antibodies) that is the same species as that of the patient is preferred. Thus, in a preferred embodiment, human antibodies, fragments derivatives, analogs, or nucleic acids, are administered to a human patient for therapy or prophylaxis.

[0388] It is preferred to use high affinity and/or potent in vivo inhibiting and/or neutralizing antibodies against polypeptides or polynucleotides of the present invention, fragments or regions thereof, for both immunoassays directed to and therapy of disorders related to polynucleotides or polypeptides, including fragments thereof, of the present invention. Such antibodies, fragments, or regions, will preferably have an affinity for polynucleotides or polypeptides of the invention, including fragments thereof. Preferred binding affinities include those with a dissociation constant or Kd less than 5×10⁻² M, 10⁻² M, 5×10⁻³ M, 10⁻³ M, 5×10⁻⁴ M, 10⁻⁴ M, 5×10⁻⁵ M, 10⁻⁵ M, 5×10⁻⁶ M, 10⁻⁶ M, 5×10⁻⁷M, 10⁻⁷ M, 5×10⁻⁸ M, 10⁻⁸ M, 5×10⁻⁹ M, 10⁻⁹ M, 5×10⁻¹⁰M, 10⁻¹⁰ M, 5×10⁻¹¹ M, 10⁻¹¹ M, 5×10⁻¹² M, 10⁻¹² M, 5×10⁻¹³ M, 10⁻¹³ M, 5×10⁻¹⁴ M, 10⁻¹⁴ M, 5×10⁻¹⁵ M, and 10⁻¹⁵ M.

Gene Therapy

[0389] In a specific embodiment, nucleic acids comprising sequences encoding antibodies or functional derivatives thereof, are administered to treat, inhibit or prevent a disease or disorder associated with aberrant expression and/or activity of a polypeptide of the invention, by way of gene therapy. Gene therapy refers to therapy performed by the administration to a subject of an expressed or expressible nucleic acid. In this embodiment of the invention, the nucleic acids produce their encoded protein that mediates a therapeutic effect.

[0390] Any of the methods for gene therapy available in the art can be used according to the present invention. Exemplary methods are described below.

[0391] For general reviews of the methods of gene therapy, see Goldspiel et al., Clinical Pharmacy 12:488-505 (1993); Wu and Wu, Biotherapy 3:87-95 (1991); Tolstoshev, Ann. Rev. Pharmacol. Toxicol. 32:573-596 (1993); Mulligan, Science 260:926-932 (1993); and Morgan and Anderson, Ann. Rev. Biochem. 62:191-217 (1993); May, TIBTECH 11(5):155-215 (1993). Methods commonly known in the art of recombinant DNA technology which can be used are described in Ausubel et al. (eds.), Current Protocols in Molecular Biology, John Wiley & Sons, NY (1993); and Kriegler, Gene Transfer and Expression, A Laboratory Manual, Stockton Press, NY (1990).

[0392] In a preferred embodiment, the compound comprises nucleic acid sequences encoding an antibody, said nucleic acid sequences being part of expression vectors that express the antibody or fragments or chimeric proteins or heavy or light chains thereof in a suitable host. In particular, such nucleic acid sequences have promoters operably linked to the antibody coding region, said promoter being inducible or constitutive, and, optionally, tissue-specific. In another particular embodiment, nucleic acid molecules are used in which the antibody coding sequences and any other desired sequences are flanked by regions that promote homologous recombination at a desired site in the genome, thus providing for intrachromosomal expression of the antibody encoding nucleic acids (Koller and Smithies, Proc. Natl. Acad. Sci. USA 86:8932-8935 (1989); Zijlstra et al., Nature 342:435-438 (1989). In specific embodiments, the expressed antibody molecule is a single chain antibody; alternatively, the nucleic acid sequences include sequences encoding both the heavy and light chains, or fragments thereof, of the antibody.

[0393] Delivery of the nucleic acids into a patient may be either direct, in which case the patient is directly exposed to the nucleic acid or nucleic acid-carrying vectors, or indirect, in which case, cells are first transformed with the nucleic acids in vitro, then transplanted into the patient. These two approaches are known, respectively, as in vivo or ex vivo gene therapy.

[0394] In a specific embodiment, the nucleic acid sequences are directly administered in vivo, where it is expressed to produce the encoded product. This can be accomplished by any of numerous methods known in the art, e.g., by constructing them as part of an appropriate nucleic acid expression vector and administering it so that they become intracellular, e.g., by infection using defective or attenuated retrovirals or other viral vectors (see U.S. Pat. No. 4,980,286), or by direct injection of naked DNA, or by use of microparticle bombardment (e.g., a gene gun; Biolistic, Dupont), or coating with lipids or cell-surface receptors or transfecting agents, encapsulation in liposomes, microparticles, or microcapsules, or by administering them in linkage to a peptide which is known to enter the nucleus, by administering it in linkage to a ligand subject to receptor-mediated endocytosis (see, e.g., Wu and Wu, J. Biol. Chem. 262:4429-4432 (1987)) (which can be used to target cell types specifically expressing the receptors), etc. In another embodiment, nucleic acid-ligand complexes can be formed in which the ligand comprises a fusogenic viral peptide to disrupt endosomes, allowing the nucleic acid to avoid lysosomal degradation. In yet another embodiment, the nucleic acid can be targeted in vivo for cell specific uptake and expression, by targeting a specific receptor (see, e.g., PCT Publications WO 92/06180; WO 92/22635; WO92/20316; WO93/14188, WO 93/20221). Alternatively, the nucleic acid can be introduced intracellularly and incorporated within host cell DNA for expression, by homologous recombination (Koller and Smithies, Proc. Natl. Acad. Sci. USA 86:8932-8935 (1989); Zijlstra et al., Nature 342:435-438 (1989)).

[0395] In a specific embodiment, viral vectors that contains nucleic acid sequences encoding an antibody of the invention are used. For example, a retroviral vector can be used (see Miller et al., Meth. Enzymol. 217:581-599 (1993)). These retroviral vectors contain the components necessary for the correct packaging of the viral genome and integration into the host cell DNA. The nucleic acid sequences encoding the antibody to be used in gene therapy are cloned into one or more vectors, which facilitates delivery of the gene into a patient. More detail about retroviral vectors can be found in Boesen et al., Biotherapy 6:291-302 (1994), which describes the use of a retroviral vector to deliver the mdr1 gene to hematopoietic stem cells in order to make the stem cells more resistant to chemotherapy. Other references illustrating the use of retroviral vectors in gene therapy are: Clowes et al., J. Clin. Invest. 93:644-651 (1994); Kiem et al., Blood 83:1467-1473 (1994); Salmons and Gunzberg, Human Gene Therapy 4:129-141 (1993); and Grossman and Wilson, Curr. Opin. in Genetics and Devel. 3:110-114 (1993).

[0396] Adenoviruses are other viral vectors that can be used in gene therapy. Adenoviruses are especially attractive vehicles for delivering genes to respiratory epithelia. Adenoviruses naturally infect respiratory epithelia where they cause a mild disease. Other targets for adenovirus-based delivery systems are liver, the central nervous system, endothelial cells, and muscle. Adenoviruses have the advantage of being capable of infecting non-dividing cells. Kozarsky and Wilson, Current Opinion in Genetics and Development 3:499-503 (1993) present a review of adenovirus-based gene therapy. Bout et al., Human Gene Therapy 5:3-10 (1994) demonstrated the use of adenovirus vectors to transfer genes to the respiratory epithelia of rhesus monkeys. Other instances of the use of adenoviruses in gene therapy can be found in Rosenfeld et al., Science 252:431-434 (1991); Rosenfeld et al., Cell 68:143-155 (1992); Mastrangeli et al., J. Clin. Invest. 91:225-234 (1993); PCT Publication WO94/12649; and Wang, et al., Gene Therapy 2:775-783 (1995). In a preferred embodiment, adenovirus vectors are used.

[0397] Adeno-associated virus (AAV) has also been proposed for use in gene therapy (Walsh et al., Proc. Soc. Exp. Biol. Med. 204:289-300 (1993); U.S. Pat. No. 5,436,146).

[0398] Another approach to gene therapy involves transferring a gene to cells in tissue culture by such methods as electroporation, lipofection, calcium phosphate mediated transfection, or viral infection. Usually, the method of transfer includes the transfer of a selectable marker to the cells. The cells are then placed under selection to isolate those cells that have taken up and are expressing the transferred gene. Those cells are then delivered to a patient.

[0399] In this embodiment, the nucleic acid is introduced into a cell prior to administration in vivo of the resulting recombinant cell. Such introduction can be carried out by any method known in the art, including but not limited to transfection, electroporation, microinjection, infection with a viral or bacteriophage vector containing the nucleic acid sequences, cell fusion, chromosome-mediated gene transfer, microcell-mediated gene transfer, spheroplast fusion, etc. Numerous techniques are known in the art for the introduction of foreign genes into cells (see, e.g., Loeffler and Behr, Meth. Enzymol. 217:599-618 (1993); Cohen et al., Meth. Enzymol. 217:618-644 (1993); Cline, Pharmac. Ther. 29:69-92m (1985) and may be used in accordance with the present invention, provided that the necessary developmental and physiological functions of the recipient cells are not disrupted. The technique should provide for the stable transfer of the nucleic acid to the cell, so that the nucleic acid is expressible by the cell and preferably heritable and expressible by its cell progeny.

[0400] The resulting recombinant cells can be delivered to a patient by various methods known in the art. Recombinant blood cells (e.g., hematopoietic stem or progenitor cells) are preferably administered intravenously. The amount of cells envisioned for use depends on the desired effect, patient state, etc., and can be determined by one skilled in the art.

[0401] Cells into which a nucleic acid can be introduced for purposes of gene therapy encompass any desired, available cell type, and include but are not limited to epithelial cells, endothelial cells, keratinocytes, fibroblasts, muscle cells, hepatocytes; blood cells such as T lymphocytes, B lymphocytes, monocytes, macrophages, neutrophils, eosinophils, megakaryocytes, granulocytes; various stem or progenitor cells, in particular hematopoietic stem or progenitor cells, e.g., as obtained from bone marrow, umbilical cord blood, peripheral blood, fetal liver, etc.

[0402] In a preferred embodiment, the cell used for gene therapy is autologous to the patient.

[0403] In an embodiment in which recombinant cells are used in gene therapy, nucleic acid sequences encoding an antibody are introduced into the cells such that they are expressible by the cells or their progeny, and the recombinant cells are then administered in vivo for therapeutic effect. In a specific embodiment, stem or progenitor cells are used. Any stem and/or progenitor cells which can be isolated and maintained in vitro can potentially be used in accordance with this embodiment of the present invention (see e.g. PCT Publication WO 94/08598; Stemple and Anderson, Cell 71:973-985 (1992); Rheinwald, Meth. Cell Bio. 21A:229 (1980); and Pittelkow and Scott, Mayo Clinic Proc. 61:771 (1986)).

[0404] In a specific embodiment, the nucleic acid to be introduced for purposes of gene therapy comprises an inducible promoter operably linked to the coding region, such that expression of the nucleic acid is controllable by the presence or absence of an appropriate inducer of transcription.

Demonstration of Therapeutic or Prophylactic Activity

[0405] The compounds or pharmaceutical compositions of the invention are preferably tested in vitro, and then in vivo for the desired therapeutic or prophylactic activity, prior to use in humans. For example, in vitro assays to demonstrate the therapeutic or prophylactic utility of a compound or pharmaceutical composition include, the effect of a compound on a cell line or a patient tissue sample. The effect of the compound or composition on the cell line and/or tissue sample can be determined utilizing techniques known to those of skill in the art including, but not limited to, rosette formation assays and cell lysis assays. In accordance with the invention, in vitro assays which can be used to determine whether administration of a specific compound is indicated, include in vitro cell culture assays in which a patient tissue sample is grown in culture, and exposed to or otherwise administered a compound, and the effect of such compound upon the tissue sample is observed.

Therapeutic/Prophylactic Administration and Composition

[0406] The invention provides methods of treatment, inhibition and prophylaxis by administration to a subject of an effective amount of a compound or pharmaceutical composition of the invention, preferably a polypeptide or antibody of the invention. In a preferred embodiment, the compound is substantially purified (e.g., substantially free from substances that limit its effect or produce undesired side-effects). The subject is preferably an animal, including but not limited to animals such as cows, pigs, horses, chickens, cats, dogs, etc., and is preferably a mammal, and most preferably human.

[0407] Formulations and methods of administration that can be employed when the compound comprises a nucleic acid or an immunoglobulin are described above; additional appropriate formulations and routes of administration can be selected from among those described herein below.

[0408] Various delivery systems are known and can be used to administer a compound of the invention, e.g., encapsulation in liposomes, microparticles, microcapsules, recombinant cells capable of expressing the compound, receptor-mediated endocytosis (see, e.g., Wu and Wu, J. Biol. Chem. 262:4429-4432 (1987)), construction of a nucleic acid as part of a retroviral or other vector, etc. Methods of introduction include but are not limited to intradermal, intramuscular, intraperitoneal, intravenous, subcutaneous, intranasal, epidural, and oral routes. The compounds or compositions may be administered by any convenient route, for example by infusion or bolus injection, by absorption through epithelial or mucocutaneous linings (e.g., oral mucosa, rectal and intestinal mucosa, etc.) and may be administered together with other biologically active agents. Administration can be systemic or local. In addition, it may be desirable to introduce the pharmaceutical compounds or compositions of the invention into the central nervous system by any suitable route, including intraventricular and intrathecal injection; intraventricular injection may be facilitated by an intraventricular catheter, for example, attached to a reservoir, such as an Ommaya reservoir. Pulmonary administration can also be employed, e.g., by use of an inhaler or nebulizer, and formulation with an aerosolizing agent.

[0409] In a specific embodiment, it may be desirable to administer the pharmaceutical compounds or compositions of the invention locally to the area in need of treatment; this may be achieved by, for example, and not by way of limitation, local infusion during surgery, topical application, e.g., in conjunction with a wound dressing after surgery, by injection, by means of a catheter, by means of a suppository, or by means of an implant, said implant being of a porous, non-porous, or gelatinous material, including membranes, such as sialastic membranes, or fibers. Preferably, when administering a protein, including an antibody, of the invention, care must be taken to use materials to which the protein does not absorb.

[0410] In another embodiment, the compound or composition can be delivered in a vesicle, in particular a liposome (see Langer, Science 249:1527-1533 (1990); Treat et al., in Liposomes in the Therapy of Infectious Disease and Cancer, Lopez-Berestein and Fidler (eds.), Liss, New York, pp. 353-365 (1989); Lopez-Berestein, ibid., pp. 317-327; see generally ibid.)

[0411] In yet another embodiment, the compound or composition can be delivered in a controlled release system. In one embodiment, a pump may be used (see Langer, supra; Sefton, CRC Crit. Ref. Biomed. Eng. 14:201 (1987); Buchwald et al., Surgery 88:507 (1980); Saudek et al., N. Engl. J. Med. 321:574 (1989)). In another embodiment, polymeric materials can be used (see Medical Applications of Controlled Release, Langer and Wise (eds.), CRC Pres., Boca Raton, Fla. (1974); Controlled Drug Bioavailability, Drug Product Design and Performance, Smolen and Ball (eds.), Wiley, New York (1984); Ranger and Peppas, J., Macromol. Sci. Rev. Macromol. Chem. 23:61 (1983); see also Levy et al., Science 228:190 (1985); During et al., Ann. Neurol. 25:351 (1989); Howard et al., J. Neurosurg. 71:105 (1989)). In yet another embodiment, a controlled release system can be placed in proximity of the therapeutic target, e.g., the brain, thus requiring only a fraction of the systemic dose (see, e.g., Goodson, in Medical Applications of Controlled Release, supra, vol. 2, pp. 115-138 (1984)).

[0412] Other controlled release systems are discussed in the review by Langer (Science 249:1527-1533 (1990)).

[0413] In a specific embodiment where the compound of the invention is a nucleic acid encoding a protein, the nucleic acid can be administered in vivo to promote expression of its encoded protein, by constructing it as part of an appropriate nucleic acid expression vector and administering it so that it becomes intracellular, e.g., by use of a retroviral vector (see U.S. Pat. No. 4,980,286), or by direct injection, or by use of microparticle bombardment (e.g., a gene gun; Biolistic, Dupont), or coating with lipids or cell-surface receptors or transfecting agents, or by administering it in linkage to a homeobox-like peptide which is known to enter the nucleus (see e.g., Joliot et al., Proc. Natl. Acad. Sci. USA 88:1864-1868 (1991)), etc. Alternatively, a nucleic acid can be introduced intracellularly and incorporated within host cell DNA for expression, by homologous recombination.

[0414] The present invention also provides pharmaceutical compositions. Such compositions comprise a therapeutically effective amount of a compound, and a pharmaceutically acceptable carrier. In a specific embodiment, the term “pharmaceutically acceptable” means approved by a regulatory agency of the Federal or a state government or listed in the U.S. Pharmacopeia or other generally recognized pharmacopeia for use in animals, and more particularly in humans. The term “carrier” refers to a diluent, adjuvant, excipient, or vehicle with which the therapeutic is administered. Such pharmaceutical carriers can be sterile liquids, such as water and oils, including those of petroleum, animal, vegetable or synthetic origin, such as peanut oil, soybean oil, mineral oil, sesame oil and the like. Water is a preferred carrier when the pharmaceutical composition is administered intravenously. Saline solutions and aqueous dextrose and glycerol solutions can also be employed as liquid carriers, particularly for injectable solutions. Suitable pharmaceutical excipients include starch, glucose, lactose, sucrose, gelatin, malt, rice, flour, chalk, silica gel, sodium stearate, glycerol monostearate, talc, sodium chloride, dried skim milk, glycerol, propylene, glycol, water, ethanol and the like. The composition, if desired, can also contain minor amounts of wetting or emulsifying agents, or pH buffering agents. These compositions can take the form of solutions, suspensions, emulsion, tablets, pills, capsules, powders, sustained-release formulations and the like. The composition can be formulated as a suppository, with traditional binders and carriers such as triglycerides. Oral formulation can include standard carriers such as pharmaceutical grades of mannitol, lactose, starch, magnesium stearate, sodium saccharine, cellulose, magnesium carbonate, etc. Examples of suitable pharmaceutical carriers are described in “Remington's Pharmaceutical Sciences” by E. W. Martin. Such compositions will contain a therapeutically effective amount of the compound, preferably in purified form, together with a suitable amount of carrier so as to provide the form for proper administration to the patient. The formulation should suit the mode of administration.

[0415] In a preferred embodiment, the composition is formulated in accordance with routine procedures as a pharmaceutical composition adapted for intravenous administration to human beings. Typically, compositions for intravenous administration are solutions in sterile isotonic aqueous buffer. Where necessary, the composition may also include a solubilizing agent and a local anesthetic such as lignocaine to ease pain at the site of the injection. Generally, the ingredients are supplied either separately or mixed together in unit dosage form, for example, as a dry lyophilized powder or water free concentrate in a hermetically sealed container such as an ampoule or sachette indicating the quantity of active agent. Where the composition is to be administered by infusion, it can be dispensed with an infusion bottle containing sterile pharmaceutical grade water or saline. Where the composition is administered by injection, an ampoule of sterile water for injection or saline can be provided so that the ingredients may be mixed prior to administration.

[0416] The compounds of the invention can be formulated as neutral or salt forms. Pharmaceutically acceptable salts include those formed with anions such as those derived from hydrochloric, phosphoric, acetic, oxalic, tartaric acids, etc., and those formed with cations such as those derived from sodium, potassium, ammonium, calcium, ferric hydroxides, isopropylamine, triethylamine, 2-ethylamino ethanol, histidine, procaine, etc.

[0417] The amount of the compound of the invention which will be effective in the treatment, inhibition and prevention of a disease or disorder associated with aberrant expression and/or activity of a polypeptide of the invention can be determined by standard clinical techniques. In addition, in vitro assays may optionally be employed to help identify optimal dosage ranges. The precise dose to be employed in the formulation will also depend on the route of administration, and the seriousness of the disease or disorder, and should be decided according to the judgment of the practitioner and each patient's circumstances. Effective doses may be extrapolated from dose-response curves derived from in vitro or animal model test systems.

[0418] For antibodies, the dosage administered to a patient is typically 0.1 mg/kg to 100 mg/kg of the patient's body weight. Preferably, the dosage administered to a patient is between 0.1 mg/kg and 20 mg/kg of the patient's body weight, more preferably 1 mg/kg to 10 mg/kg of the patient's body weight. Generally, human antibodies have a longer half-life within the human body than antibodies from other species due to the immune response to the foreign polypeptides. Thus, lower dosages of human antibodies and less frequent administration is often possible. Further, the dosage and frequency of administration of antibodies of the invention may be reduced by enhancing uptake and tissue penetration (e.g., into the brain) of the antibodies by modifications such as, for example, lipidation.

[0419] The invention also provides a pharmaceutical pack or kit comprising one or more containers filled with one or more of the ingredients of the pharmaceutical compositions of the invention. Optionally associated with such container(s) can be a notice in the form prescribed by a governmental agency regulating the manufacture, use or sale of pharmaceuticals or biological products, which notice reflects approval by the agency of manufacture, use or sale for human administration.

Diagnosis and Imaging

[0420] Labeled antibodies, and derivatives and analogs thereof, which specifically bind to a polypeptide of interest can be used for diagnostic purposes to detect, diagnose, or monitor diseases, disorders, and/or conditions associated with the aberrant expression and/or activity of a polypeptide of the invention. The invention provides for the detection of aberrant expression of a polypeptide of interest, comprising (a) assaying the expression of the polypeptide of interest in cells or body fluid of an individual using one or more antibodies specific to the polypeptide interest and (b) comparing the level of gene expression with a standard gene expression level, whereby an increase or decrease in the assayed polypeptide gene expression level compared to the standard expression level is indicative of aberrant expression.

[0421] The invention provides a diagnostic assay for diagnosing a disorder, comprising (a) assaying the expression of the polypeptide of interest in cells or body fluid of an individual using one or more antibodies specific to the polypeptide interest and (b) comparing the level of gene expression with a standard gene expression level, whereby an increase or decrease in the assayed polypeptide gene expression level compared to the standard expression level is indicative of a particular disorder. With respect to cancer, the presence of a relatively high amount of transcript in biopsied tissue from an individual may indicate a predisposition for the development of the disease, or may provide a means for detecting the disease prior to the appearance of actual clinical symptoms. A more definitive diagnosis of this type may allow health professionals to employ preventative measures or aggressive treatment earlier thereby preventing the development or further progression of the cancer.

[0422] Antibodies of the invention can be used to assay protein levels in a biological sample using classical immunohistological methods known to those of skill in the art (e.g., see Jalkanen et al., J. Cell. Biol. 101:976-985 (1985); Jalkanen et al., J. Cell. Biol. 105:3087-3096 (1987)). Other antibody-based methods useful for detecting protein gene expression include immunoassays, such as the enzyme linked immunosorbent assay (ELISA) and the radioimmunoassay (RIA). Suitable antibody assay labels are known in the art and include enzyme labels, such as, glucose oxidase; radioisotopes, such as iodine (125I, 121I), carbon (14C), sulfur (35S), tritium (3H), indium (112In), and technetium 99Tc); luminescent labels, such as luminol; and fluorescent labels, such as fluorescein and rhodamine, and biotin.

[0423] One facet of the invention is the detection and diagnosis of a disease or disorder associated with aberrant expression of a polypeptide of interest in an animal, preferably a mammal and most preferably a human. In one embodiment, diagnosis comprises: a) administering (for example, parenterally, subcutaneously, or intraperitoneally) to a subject an effective amount of a labeled molecule which specifically binds to the polypeptide of interest; b) waiting for a time interval following the administering for permitting the labeled molecule to preferentially concentrate at sites in the subject where the polypeptide is expressed (and for unbound labeled molecule to be cleared to background level); c) determining background level; and d) detecting the labeled molecule in the subject, such that detection of labeled molecule above the background level indicates that the subject has a particular disease or disorder associated with aberrant expression of the polypeptide of interest. Background level can be determined by various methods including, comparing the amount of labeled molecule detected to a standard value previously determined for a particular system.

[0424] It will be understood in the art that the size of the subject and the imaging system used will determine the quantity of imaging moiety needed to produce diagnostic images. In the case of a radioisotope moiety, for a human subject, the quantity of radioactivity injected will normally range from about 5 to 20 millicuries of 99 mTc. The labeled antibody or antibody fragment will then preferentially accumulate at the location of cells which contain the specific protein. In vivo tumor imaging is described in S. W. Burchiel et al., “Immunopharmacokinetics of Radiolabeled Antibodies and Their Fragments.” (Chapter 13 in Tumor Imaging: The Radiochemical Detection of Cancer, S. W. Burchiel and B. A. Rhodes, eds., Masson Publishing Inc. (1982)).

[0425] Depending on several variables, including the type of label used and the mode of administration, the time interval following the administration for permitting the labeled molecule to preferentially concentrate at sites in the subject and for unbound labeled molecule to be cleared to background level is 6 to 48 hours or 6 to 24 hours or 6 to 12 hours. In another embodiment the time interval following administration is 5 to 20 days or 5 to 10 days.

[0426] In an embodiment, monitoring of the disease or disorder is carried out by repeating the method for diagnosing the disease or disease, for example, one month after initial diagnosis, six months after initial diagnosis, one year after initial diagnosis, etc.

[0427] Presence of the labeled molecule can be detected in the patient using methods known in the art for in vivo scanning. These methods depend upon the type of label used. Skilled artisans will be able to determine the appropriate method for detecting a particular label. Methods and devices that may be used in the diagnostic methods of the invention include, but are not limited to, computed tomography (CT), whole body scan such as position emission tomography (PET), magnetic resonance imaging (MRI), and sonography.

[0428] In a specific embodiment, the molecule is labeled with a radioisotope and is detected in the patient using a radiation responsive surgical instrument (Thurston et al., U.S. Pat. No. 5,441,050). In another embodiment, the molecule is labeled with a fluorescent compound and is detected in the patient using a fluorescence responsive scanning instrument. In another embodiment, the molecule is labeled with a positron emitting metal and is detected in the patent using positron emission-tomography. In yet another embodiment, the molecule is labeled with a paramagnetic label and is detected in a patient using magnetic resonance imaging (MRI).

Kits

[0429] The present invention provides kits that can be used in the above methods. In one embodiment, a kit comprises an antibody of the invention, preferably a purified antibody, in one or more containers. In a specific embodiment, the kits of the present invention contain a substantially isolated polypeptide comprising an epitope which is specifically immunoreactive with an antibody included in the kit. Preferably, the kits of the present invention further comprise a control antibody which does not react with the polypeptide of interest. In another specific embodiment, the kits of the present invention contain a means for detecting the binding of an antibody to a polypeptide of interest (e.g., the antibody may be conjugated to a detectable substrate such as a fluorescent compound, an enzymatic substrate, a radioactive compound or a luminescent compound, or a second antibody which recognizes the first antibody may be conjugated to a detectable substrate).

[0430] In another specific embodiment of the present invention, the kit is a diagnostic kit for use in screening serum containing antibodies specific against proliferative and/or cancerous polynucleotides and polypeptides. Such a kit may include a control antibody that does not react with the polypeptide of interest. Such a kit may include a substantially isolated polypeptide antigen comprising an epitope which is specifically immunoreactive with at least one anti-polypeptide antigen antibody. Further, such a kit includes means for detecting the binding of said antibody to the antigen (e.g., the antibody may be conjugated to a fluorescent compound such as fluorescein or rhodamine which can be detected by flow cytometry). In specific embodiments, the kit may include a recombinantly produced or chemically synthesized polypeptide antigen. The polypeptide antigen of the kit may also be attached to a solid support.

[0431] In a more specific embodiment the detecting means of the above-described kit includes a solid support to which said polypeptide antigen is attached. Such a kit may also include a non-attached reporter-labeled anti-human antibody. In this embodiment, binding of the antibody to the polypeptide antigen can be detected by binding of the said reporter-labeled antibody.

[0432] In an additional embodiment, the invention includes a diagnostic kit for use in screening serum containing antigens of the polypeptide of the invention. The diagnostic kit includes a substantially isolated antibody specifically immunoreactive with polypeptide or polynucleotide antigens, and means for detecting the binding of the polynucleotide or polypeptide antigen to the antibody. In one embodiment, the antibody is attached to a solid support. In a specific embodiment, the antibody may be a monoclonal antibody. The detecting means of the kit may include a second, labeled monoclonal antibody. Alternatively, or in addition, the detecting means may include a labeled, competing antigen.

[0433] In one diagnostic configuration, test serum is reacted with a solid phase reagent having a surface-bound antigen obtained by the methods of the present invention. After binding with specific antigen antibody to the reagent and removing unbound serum components by washing, the reagent is reacted with reporter-labeled anti-human antibody to bind reporter to the reagent in proportion to the amount of bound anti-antigen antibody on the solid support. The reagent is again washed to remove unbound labeled antibody, and the amount of reporter associated with the reagent is determined. Typically, the reporter is an enzyme which is detected by incubating the solid phase in the presence of a suitable fluorometric, luminescent or calorimetric substrate (Sigma, St. Louis, Mo.).

[0434] The solid surface reagent in the above assay is prepared by known techniques for attaching protein material to solid support material, such as polymeric beads, dip sticks, 96-well plate or filter material. These attachment methods generally include non-specific adsorption of the protein to the support or covalent attachment of the protein, typically through a free amine group, to a chemically reactive group on the solid support, such as an activated carboxyl, hydroxyl, or aldehyde group. Alternatively, streptavidin coated plates can be used in conjunction with biotinylated antigen(s).

[0435] Thus, the invention provides an assay system or kit for carrying out this diagnostic method. The kit generally includes a support with surface-bound recombinant antigens, and a reporter-labeled anti-human antibody for detecting surface-bound anti-antigen antibody.

Uses of the Polynucleotides

[0436] Each of the polynucleotides identified herein can be used in numerous ways as reagents. The following description should be considered exemplary and utilizes known techniques.

[0437] The polynucleotides of the present invention are useful for chromosome identification. There exists an ongoing need to identify new chromosome markers, since few chromosome marking reagents, based on actual sequence data (repeat polymorphisms), are presently available. Each sequence is specifically targeted to and can hybridize with a particular location on an individual human chromosome, thus each polynucleotide of the present invention can routinely be used as a chromosome marker using techniques known in the art. Table 1B, column 9 provides the chromosome location of some of the polynucleotides of the invention.

[0438] Briefly, sequences can be mapped to chromosomes by preparing PCR primers (preferably at least 15 bp (e.g., 15-25 bp) from the sequences shown in SEQ ID NO:X. Primers can optionally be selected using computer analysis so that primers do not span more than one predicted exon in the genomic DNA. These primers are then used for PCR screening of somatic cell hybrids containing individual human chromosomes. Only those hybrids containing the human gene corresponding to SEQ ID NO:X will yield an amplified fragment.

[0439] Similarly, somatic hybrids provide a rapid method of PCR mapping the polynucleotides to particular chromosomes. Three or more clones can be assigned per day using a single thermal cycler. Moreover, sublocalization of the polynucleotides can be achieved with panels of specific chromosome fragments. Other gene mapping strategies that can be used include in situ hybridization, prescreening with labeled flow-sorted chromosomes, preselection by hybridization to construct chromosome specific-cDNA libraries, and computer mapping techniques (See, e.g., Shuler, Trends Biotechnol 16:456-459 (1998) which is hereby incorporated by reference in its entirety).

[0440] Precise chromosomal location of the polynucleotides can also be achieved using fluorescence in situ hybridization (FISH) of a metaphase chromosomal spread. This technique uses polynucleotides as short as 500 or 600 bases; however, polynucleotides 2,000 bp are preferred. For a review of this technique, see Verma et al., “Human Chromosomes: a Manual of Basic Techniques,” Pergamon Press, New York (1988).

[0441] For chromosome mapping, the polynucleotides can be used individually (to mark a single chromosome or a single site on that chromosome) or in panels (for marking multiple sites and/or multiple chromosomes).

[0442] Thus, the present invention also provides a method for chromosomal localization which involves (a) preparing PCR primers from the polynucleotide sequences in Table 1B and/or Table 2 and SEQ ID NO:X and (b) screening somatic cell hybrids containing individual chromosomes.

[0443] The polynucleotides of the present invention would likewise be useful for radiation hybrid mapping, HAPPY mapping, and long range restriction mapping. For a review of these techniques and others known in the art, see, e.g. Dear, “Genome Mapping: A Practical Approach,” IRL Press at Oxford University Press, London (1997); Aydin, J. Mol. Med. 77:691-694 (1999); Hacia et al., Mol. Psychiatry 3:483-492 (1998); Herrick et al., Chromosome Res. 7:409-423 (1999); Hamilton et al., Methods Cell Biol. 62:265-280 (2000); and/or Ott, J. Hered. 90:68-70 (1999) each of which is hereby incorporated by reference in its entirety.

[0444] Once a polynucleotide has been mapped to a precise chromosomal location, the physical position of the polynucleotide can be used in linkage analysis. Linkage analysis establishes coinheritance between a chromosomal location and presentation of a particular disease. (Disease mapping data are found, for example, in V. McKusick, Mendelian Inheritance in Man (available on line through Johns Hopkins University Welch Medical Library)). Column 10 of Table 1B provides an OMIM reference identification number of diseases associated with the cytologic band disclosed in column 9 of Table 1B, as determined using techniques described herein and by reference to Table 5. Assuming 1 megabase mapping resolution and one gene per 20 kb, a cDNA precisely localized to a chromosomal region associated with the disease could be one of 50-500 potential causative genes.

[0445] Thus, once coinheritance is established, differences in a polynucleotide of the invention and the corresponding gene between affected and unaffected individuals can be examined. First, visible structural alterations in the chromosomes, such as deletions or translocations, are examined in chromosome spreads or by PCR. If no structural alterations exist, the presence of point mutations are ascertained. Mutations observed in some or all affected individuals, but not in normal individuals, indicates that the mutation may cause the disease. However, complete sequencing of the polypeptide and the corresponding gene from several normal individuals is required to distinguish the mutation from a polymorphism. If a new polymorphism is identified, this polymorphic polypeptide can be used for further linkage analysis.

[0446] Furthermore, increased or decreased expression of the gene in affected individuals as compared to unaffected individuals can be assessed using the polynucleotides of the invention. Any of these alterations (altered expression, chromosomal rearrangement, or mutation) can be used as a diagnostic or prognostic marker. Diagnostic and prognostic methods, kits and reagents encompassed by the present invention are briefly described below and more thoroughly elsewhere herein (see e.g., the sections labeled “Antibodies”, “Diagnostic Assays”, and “Methods for Detecting Diseases”).

[0447] Thus, the invention also provides a diagnostic method useful during diagnosis of a disorder, involving measuring the expression level of polynucleotides of the present invention in cells or body fluid from an individual and comparing the measured gene expression level with a standard level of polynucleotide expression level, whereby an increase or decrease in the gene expression level compared to the standard is indicative of a disorder. Additional non-limiting examples of diagnostic methods encompassed by the present invention are more thoroughly described elsewhere herein (see, e.g., Example 12).

[0448] In still another embodiment, the invention includes a kit for analyzing samples for the presence of proliferative and/or cancerous polynucleotides derived from a test subject. In a general embodiment, the kit includes at least one polynucleotide probe containing a nucleotide sequence that will specifically hybridize with a polynucleotide of the invention and a suitable container. In a specific embodiment, the kit includes two polynucleotide probes defining an internal region of the polynucleotide of the invention, where each probe has one strand containing a 31′ mer-end internal to the region. In a further embodiment, the probes may be useful as primers for polymerase chain reaction amplification.

[0449] Where a diagnosis of a related disorder, including, for example, diagnosis of a tumor, has already been made according to conventional methods, the present invention is useful as a prognostic indicator, whereby patients exhibiting enhanced or depressed polynucleotide of the invention expression will experience a worse clinical outcome relative to patients expressing the gene at a level nearer the standard level.

[0450] By “measuring the expression level of polynucleotides of the invention” is intended qualitatively or quantitatively measuring or estimating the level of the polypeptide of the invention or the level of the mRNA encoding the polypeptide of the invention in a first biological sample either directly (e.g., by determining or estimating absolute protein level or mRNA level) or relatively (e.g., by comparing to the polypeptide level or mRNA level in a second biological sample). Preferably, the polypeptide level or mRNA level in the first biological sample is measured or estimated and compared to a standard polypeptide level or mRNA level, the standard being taken from a second biological sample obtained from an individual not having the related disorder or being determined by averaging levels from a population of individuals not having a related disorder. As will be appreciated in the art, once a standard polypeptide level or mRNA level is known, it can be used repeatedly as a standard for comparison.

[0451] By “biological sample” is intended any biological sample obtained from an individual, body fluid, cell line, tissue culture, or other source which contains polypeptide of the present invention or the corresponding mRNA. As indicated, biological samples include body fluids (such as semen, lymph, vaginal pool, sera, plasma, urine, synovial fluid and spinal fluid) which contain the polypeptide of the present invention, and tissue sources found to express the polypeptide of the present invention. Methods for obtaining tissue biopsies and body fluids from mammals are well known in the art. Where the biological sample is to include mRNA, a tissue biopsy is the preferred source.

[0452] The method(s) provided above may preferably be applied in a diagnostic method and/or kits in which polynucleotides and/or polypeptides of the invention are attached to a solid support. In one exemplary method, the support may be a “gene chip” or a “biological chip” as described in U.S. Pat. Nos. 5,837,832, 5,874,219, and 5,856,174. Further, such a gene chip with polynucleotides of the invention attached may be used to identify polymorphisms between the isolated polynucleotide sequences of the invention, with polynucleotides isolated from a test subject. The knowledge of such polymorphisms (i.e. their location, as well as, their existence) would be beneficial in identifying disease loci for many disorders, such as for example, in neural disorders, immune system disorders, muscular disorders, reproductive disorders, gastrointestinal disorders, pulmonary disorders, digestive disorders, metabolic disorders, cardiovascular disorders, renal disorders, proliferative disorders, and/or cancerous diseases and conditions. Such a method is described in U.S. Pat. Nos. 5,858,659 and 5,856,104. The US Patents referenced supra are hereby incorporated by reference in their entirety herein.

[0453] The present invention encompasses polynucleotides of the present invention that are chemically synthesized, or reproduced as peptide nucleic acids (PNA), or according to other methods known in the art. The use of PNAs would serve as the preferred form if the polynucleotides of the invention are incorporated onto a solid support, or gene chip. For the purposes of the present invention, a peptide nucleic acid (PNA) is a polyamide type of DNA analog and the monomeric units for adenine, guanine, thymine and cytosine are available commercially (Perceptive Biosystems). Certain components of DNA, such as phosphorus, phosphorus oxides, or deoxyribose derivatives, are not present in PNAs. As disclosed by Nielsen et al., Science 254, 1497 (1991); and Egholm et al., Nature 365, 666 (1993), PNAs bind specifically and tightly to complementary DNA strands and are not degraded by nucleases. In fact, PNA binds more strongly to DNA than DNA itself does. This is probably because there is no electrostatic repulsion between the two strands, and also the polyamide backbone is more flexible. Because of this, PNA/DNA duplexes bind under a wider range of stringency conditions than DNA/DNA duplexes, making it easier to perform multiplex hybridization. Smaller probes can be used than with DNA due to the strong binding. In addition, it is more likely that single base mismatches can be determined with PNA/DNA hybridization because a single mismatch in a PNA/DNA 15-mer lowers the melting point (T.sub.m) by 8°-20° C., vs. 4°-16° C. for the DNA/DNA 15-mer duplex. Also, the absence of charge groups in PNA means that hybridization can be done at low ionic strengths and reduce possible interference by salt during the analysis.

[0454] The compounds of the present invention have uses which include, but are not limited to, detecting cancer in mammals. In particular the invention is useful during diagnosis of pathological cell proliferative neoplasias which include, but are not limited to: acute myelogenous leukemias including acute monocytic leukemia, acute myeloblastic leukemia, acute promyelocytic leukemia, acute myelomonocytic leukemia, acute erythroleukemia, acute megakaryocytic leukemia, and acute undifferentiated leukemia, etc.; and chronic myelogenous leukemias including chronic myelomonocytic leukemia, chronic granulocytic leukemia, etc. Preferred mammals include monkeys, apes, cats, dogs, cows, pigs, horses, rabbits and humans. Particularly preferred are humans.

[0455] Pathological cell proliferative disorders are often associated with inappropriate activation of proto-oncogenes. (Gelmann, E. P. et al., “The Etiology of Acute Leukemia: Molecular Genetics and Viral Oncology,” in Neoplastic Diseases of the Blood, Vol 1., Wiernik, P. H. et al. eds., 161-182 (1985)). Neoplasias are now believed to result from the qualitative alteration of a normal cellular gene product, or from the quantitative modification of gene expression by insertion into the chromosome of a viral sequence, by chromosomal translocation of a gene to a more actively transcribed region, or by some other mechanism. (Gelmann et al., supra) It is likely that mutated or altered expression of specific genes is involved in the pathogenesis of some leukemias, among other tissues and cell types. (Gelmann et al., supra) Indeed, the human counterparts of the oncogenes involved in some animal neoplasias have been amplified or translocated in some cases of human leukemia and carcinoma. (Gelmann et al., supra)

[0456] For example, c-myc expression is highly amplified in the non-lymphocytic leukemia cell line HL-60. When HL-60 cells are chemically induced to stop proliferation, the level of c-myc is found to be downregulated. (International Publication Number WO 91/15580). However, it has been shown that exposure of HL-60 cells to a DNA construct that is complementary to the 5′ end of c-myc or c-myb blocks translation of the corresponding mRNAs which downregulates expression of the c-myc or c-myb proteins and causes arrest of cell proliferation and differentiation of the treated cells. (International Publication Number WO 91/15580; Wickstrom et al., Proc. Natl. Acad. Sci. 85:1028 (1988); Anfossi et al., Proc. Natl. Acad. Sci. 86:3379 (1989)). However, the skilled artisan would appreciate the present invention's usefulness is not be limited to treatment, prevention, and/or prognosis of proliferative disorders of cells and tissues of hematopoietic origin, in light of the numerous cells and cell types of varying origins which are known to exhibit proliferative phenotypes.

[0457] In addition to the foregoing, a polynucleotide of the present invention can be used to control gene expression through triple helix formation or through antisense DNA or RNA. Antisense techniques are discussed, for example, in Okano, J. Neurochem. 56: 560 (1991); “Oligodeoxynucleotides as Antisense Inhibitors of Gene Expression, CRC Press, Boca Raton, Fla. (1988). Triple helix formation is discussed in, for instance Lee et al., Nucleic Acids Research 6: 3073 (1979); Cooney et al., Science 241: 456 (1988); and Dervan et al., Science 251: 1360 (1991). Both methods rely on binding of the polynucleotide to a complementary DNA or RNA. For these techniques, preferred polynucleotides are usually oligonucleotides 20 to 40 bases in length and complementary to either the region of the gene involved in transcription (triple helix—see Lee et al., Nucl. Acids Res. 6:3073 (1979); Cooney et al., Science 241:456 (1988); and Dervan et al., Science 251:1360 (1991)) or to the mRNA itself (antisense—Okano, J. Neurochem. 56:560 (1991); Oligodeoxy-nucleotides as Antisense Inhibitors of Gene Expression, CRC Press, Boca Raton, Fla. (1988)). Triple helix formation optimally results in a shut-off of RNA transcription from DNA, while antisense RNA hybridization blocks translation of an mRNA molecule into polypeptide. The oligonucleotide described above can also be delivered to cells such that the antisense RNA or DNA may be expressed in vivo to inhibit production of polypeptide of the present invention antigens. Both techniques are effective in model systems, and the information disclosed herein can be used to design antisense or triple helix polynucleotides in an effort to treat disease, and in particular, for the treatment of proliferative diseases and/or conditions. Non-limiting antisense and triple helix methods encompassed by the present invention are more thoroughly described elsewhere herein (see, e.g., the section labeled “Antisense and Ribozyme (Antagonists)”).

[0458] Polynucleotides of the present invention are also useful in gene therapy. One goal of gene therapy is to insert a normal gene into an organism having a defective gene, in an effort to correct the genetic defect. The polynucleotides disclosed in the present invention offer a means of targeting such genetic defects in a highly accurate manner. Another goal is to insert a new gene that was not present in the host genome, thereby producing a new trait in the host cell. Additional non-limiting examples of gene therapy methods encompassed by the present invention are more thoroughly described elsewhere herein (see, e.g., the sections labeled “Gene Therapy Methods”, and Examples 16, 17 and 18).

[0459] The polynucleotides are also useful for identifying individuals from minute biological samples. The United States military, for example, is considering the use of restriction fragment length polymorphism (RFLP) for identification of its personnel. In this technique, an individual's genomic DNA is digested with one or more restriction enzymes, and probed on a Southern blot to yield unique bands for identifying personnel. This method does not suffer from the current limitations of “Dog Tags” which can be lost, switched, or stolen, making positive identification difficult. The polynucleotides of the present invention can be used as additional DNA markers for RFLP.

[0460] The polynucleotides of the present invention can also be used as an alternative to RFLP, by determining the actual base-by-base DNA sequence of selected portions of an individual's genome. These sequences can be used to prepare PCR primers for amplifying and isolating such selected DNA, which can then be sequenced. Using this technique, individuals can be identified because each individual will have a unique set of DNA sequences. Once an unique ID database is established for an individual, positive identification of that individual, living or dead, can be made from extremely small tissue samples.

[0461] Forensic biology also benefits from using DNA-based identification techniques as disclosed herein. DNA sequences taken from very small biological samples such as tissues, e.g., hair or skin, or body fluids, e.g., blood, saliva, semen, synovial fluid, amniotic fluid, breast milk, lymph, pulmonary sputum or surfactant, urine, fecal matter, etc., can be amplified using PCR. In one prior art technique, gene sequences amplified from polymorphic loci, such as DQa class II HLA gene, are used in forensic biology to identify individuals. (Erlich, H., PCR Technology, Freeman and Co. (1992)). Once these specific polymorphic loci are amplified, they are digested with one or more restriction enzymes, yielding an identifying set of bands on a Southern blot probed with DNA corresponding to the DQa class II HLA gene. Similarly, polynucleotides of the present invention can be used as polymorphic markers for forensic purposes.

[0462] There is also a need for reagents capable of identifying the source of a particular tissue. Such need arises, for example, in forensics when presented with tissue of unknown origin. Appropriate reagents can comprise, for example, DNA probes or primers prepared from the sequences of the present invention, specific to tissues, including but not limited to those shown in Table 1B. Panels of such reagents can identify tissue by species and/or by organ type. In a similar fashion, these reagents can be used to screen tissue cultures for contamination. Additional non-limiting examples of such uses are further described herein.

[0463] The polynucleotides of the present invention are also useful as hybridization probes for differential identification of the tissue(s) or cell type(s) present in a biological sample. Similarly, polypeptides and antibodies directed to polypeptides of the present invention are useful to provide immunological probes for differential identification of the tissue(s) (e.g., immunohistochemistry assays) or cell type(s) (e.g., immunocytochemistry assays). In addition, for a number of disorders of the above tissues or cells, significantly higher or lower levels of gene expression of the polynucleotides/polypeptides of the present invention may be detected in certain tissues (e.g., tissues expressing polypeptides and/or polynucleotides of the present invention, for example, those disclosed in column 8 of Table 1B, and/or cancerous and/or wounded tissues) or bodily fluids (e.g., semen, lymph, vaginal pool, serum, plasma, urine, synovial fluid or spinal fluid) taken from an individual having such a disorder, relative to a “standard” gene expression level, i.e., the expression level in healthy tissue from an individual not having the disorder.

[0464] Thus, the invention provides a diagnostic method of a disorder, which involves: (a) assaying gene expression level in cells or body fluid of an individual; (b) comparing the gene expression level with a standard gene expression level, whereby an increase or decrease in the assayed gene expression level compared to the standard expression level is indicative of a disorder.

[0465] In the very least, the polynucleotides of the present invention can be used as molecular weight markers on Southern gels, as diagnostic probes for the presence of a specific mRNA in a particular cell type, as a probe to “subtract-out” known sequences in the process of discovering novel polynucleotides, for selecting and making oligomers for attachment to a “gene chip” or other support, to raise anti-DNA antibodies using DNA immunization techniques, and as an antigen to elicit an immune response.

Uses of the Polypeptides

[0466] Each of the polypeptides identified herein can be used in numerous ways. The following description should be considered exemplary and utilizes known techniques.

[0467] Polypeptides and antibodies directed to polypeptides of the present invention are useful to provide immunological probes for differential identification of the tissue(s) (e.g., immunohistochemistry assays such as, for example, ABC immunoperoxidase (Hsu et al., J. Histochem. Cytochem. 29:577-580 (1981)) or cell type(s) (e.g., immunocytochemistry assays).

[0468] Antibodies can be used to assay levels of polypeptides encoded by polynucleotides of the invention in a biological sample using classical immunohistological methods known to those of skill in the art (e.g., see Jalkanen, et al., J. Cell. Biol. 101:976-985 (1985); Jalkanen, et al., J. Cell. Biol. 105:3087-3096 (1987)). Other antibody-based methods useful for detecting protein gene expression include immunoassays, such as the enzyme linked immunosorbent assay (ELISA) and the radioimmunoassay (RIA). Suitable antibody assay labels are known in the art and include enzyme labels, such as, glucose oxidase; radioisotopes, such as iodine (¹³¹I, ¹²⁵I, ¹²³I, ¹²¹I), carbon (¹⁴C), sulfur (³⁵S), tritium (³H), indium (^{115m}In, ^{113m}In, ¹¹²In, ¹¹¹In), and technetium (⁹⁹Tc, ^{99m}Tc), thallium (²⁰¹Ti), gallium (⁶⁸Ga, ⁶⁷Ga), palladium (¹⁰³Pd), molybdenum (⁹⁹Mo), xenon (¹³³Xe), fluorine (¹⁸F), ¹⁵³Sm, ¹⁷⁷Lu, ¹⁵⁹Gd, ¹⁴⁹Pm, ¹⁴⁰La, ¹⁷⁵Yb, ¹⁶⁶Ho, ⁹⁰Y, ⁴⁷Sc, ¹⁸⁶Re, ¹⁸⁸Re, ¹⁴²Pr, ¹⁰⁵Rh, ⁹⁷Ru; luminescent labels, such as luminol; and fluorescent labels, such as fluorescein and rhodamine, and biotin.

[0469] In addition to assaying levels of polypeptide of the present invention in a biological sample, proteins can also be detected in vivo by imaging. Antibody labels or markers for in vivo imaging of protein include those detectable by X-radiography, NMR or ESR. For X-radiography, suitable labels include radioisotopes such as barium or cesium, which emit detectable radiation but are not overtly harmful to the subject. Suitable markers for NMR and ESR include those with a detectable characteristic spin, such as deuterium, which may be incorporated into the antibody by labeling of nutrients for the relevant hybridoma.

[0470] A protein-specific antibody or antibody fragment which has been labeled with an appropriate detectable imaging moiety, such as a radioisotope (for example, ¹³¹I, ¹¹²In, ^{99m}Tc, (¹³¹I, ¹²⁵I, ¹²³I, ¹²¹I), carbon (¹⁴C), sulfur (³⁵S), tritium (³H), indium (^{115m}In, ^{113m}In, ¹¹²In, ¹¹¹In), and technetium (⁹⁹Tc, ^{99m}Tc), thallium (²⁰¹Ti), gallium (⁶⁸Ga, ⁶⁷Ga), palladium (¹⁰³Pd), molybdenum (⁹⁹Mo), xenon (¹³³Xe), fluorine (¹⁸F, ¹⁵³Sm, ¹⁷⁷Lu, ¹⁵⁹Gd, ¹⁴⁹Pm, ¹⁴⁰La, ¹⁷⁵Yb, ¹⁶⁶Ho, ⁹⁰Y, ⁴⁷Sc, ¹⁸⁶Re, ¹⁸⁸Re, ¹⁴²Pr, ¹⁰⁵Rh, ⁹⁷Ru), a radio-opaque substance, or a material detectable by nuclear magnetic resonance, is introduced (for example, parenterally, subcutaneously or intraperitoneally) into the mammal to be examined for immune system disorder. It will be understood in the art that the size of the subject and the imaging system used will determine the quantity of imaging moiety needed to produce diagnostic images. In the case of a radioisotope moiety, for a human subject, the quantity of radioactivity injected will normally range from about 5 to 20 millicuries of ^{99m}Tc. The labeled antibody or antibody fragment will then preferentially accumulate at the location of cells which express the polypeptide encoded by a polynucleotide of the invention. In vivo tumor imaging is described in S. W. Burchiel et al., “Immunopharmacokinetics of Radiolabeled Antibodies and Their Fragments” (Chapter 13 in Tumor Imaging: The Radiochemical Detection of Cancer, S. W. Burchiel and B. A. Rhodes, eds., Masson Publishing Inc. (1982)).

[0471] In one embodiment, the invention provides a method for the specific delivery of compositions of the invention to cells by administering polypeptides of the invention (e.g., polypeptides encoded by polynucleotides of the invention and/or antibodies) that are associated with heterologous polypeptides or nucleic acids. In one example, the invention provides a method for delivering a therapeutic protein into the targeted cell. In another example, the invention provides a method for delivering a single stranded nucleic acid (e.g., antisense or ribozymes) or double stranded nucleic acid (e.g., DNA that can integrate into the cell's genome or replicate episomally and that can be transcribed) into the targeted cell.

[0472] In another embodiment, the invention provides a method for the specific destruction of cells (e.g., the destruction of tumor cells) by administering polypeptides of the invention in association with toxins or cytotoxic prodrugs.

[0473] By “toxin” is meant one or more compounds that bind and activate endogenous cytotoxic effector systems, radioisotopes, holotoxins, modified toxins, catalytic subunits of toxins, or any molecules or enzymes not normally present in or on the surface of a cell that under defined conditions cause the cell's death. Toxins that may be used according to the methods of the invention include, but are not limited to, radioisotopes known in the art, compounds such as, for example, antibodies (or complement fixing containing portions thereof) that bind an inherent or induced endogenous cytotoxic effector system, thymidine kinase, endonuclease, RNAse, alpha toxin, ricin, abrin, Pseudomonas exotoxin A, diphtheria toxin, saporin, momordin, gelonin, pokeweed antiviral protein, alpha-sarcin and cholera toxin. “Toxin” also includes a cytostatic or cytocidal agent, a therapeutic agent or a radioactive metal ion, e.g., alpha-emitters such as, for example, ²¹³Bi, or other radioisotopes such as, for example, ¹⁰³Pd, ¹³³Xe, ¹³¹I, ⁶⁸Ge, ⁵⁷Co, ⁶⁵Zn, ⁸⁵Sr, ³²P, ³⁵S, ⁹⁰Y, ¹⁵³Sm, ¹⁵³Gd, ¹⁶⁹Yb, ⁵¹Cr, ⁵⁴M, ⁷⁵Se, ¹¹³Sn, ⁹⁰Yttrium, ¹¹⁷Tin, ¹⁸⁶Rhenium, ¹⁶⁶Holmium, and ¹⁸⁸Rhenium; luminescent labels, such as luminol; and fluorescent labels, such as fluorescein and rhodamine, and biotin. In a specific embodiment, the invention provides a method for the specific destruction of cells (e.g., the destruction of tumor cells) by administering polypeptides of the invention or antibodies of the invention in association with the radioisotope ⁹⁰Y. In another specific embodiment, the invention provides a method for the specific destruction of cells (e.g., the destruction of tumor cells) by administering polypeptides of the invention or antibodies of the invention in association with the radioisotope ¹¹¹In. In a further specific embodiment, the invention provides a method for the specific destruction of cells (e.g., the destruction of tumor cells) by administering polypeptides of the invention or antibodies of the invention in association with the radioisotope ¹³¹I.

[0474] Techniques known in the art may be applied to label polypeptides of the invention (including antibodies). Such techniques include, but are not limited to, the use of bifunctional conjugating agents (see e.g., U.S. Pat. Nos. 5,756,065; 5,714,631; 5,696,239; 5,652,361; 5,505,931; 5,489,425; 5,435,990; 5,428,139; 5,342,604; 5,274,119; 4,994,560; and 5,808,003; the contents of each of which are hereby incorporated by reference in its entirety).

[0475] Thus, the invention provides a diagnostic method of a disorder, which involves (a) assaying the expression level of a polypeptide of the present invention in cells or body fluid of an individual; and (b) comparing the assayed polypeptide expression level with a standard polypeptide expression level, whereby an increase or decrease in the assayed polypeptide expression level compared to the standard expression level is indicative of a disorder. With respect to cancer, the presence of a relatively high amount of transcript in biopsied tissue from an individual may indicate a predisposition for the development of the disease, or may provide a means for detecting the disease prior to the appearance of actual clinical symptoms. A more definitive diagnosis of this type may allow health professionals to employ preventative measures or aggressive treatment earlier thereby preventing the development or further progression of the cancer.

[0476] Moreover, polypeptides of the present invention can be used to treat or prevent diseases or conditions such as, for example, neural disorders, immune system disorders, muscular disorders, reproductive disorders, gastrointestinal disorders, pulmonary disorders, cardiovascular disorders, renal disorders, proliferative disorders, and/or cancerous diseases and conditions. For example, patients can be administered a polypeptide of the present invention in an effort to replace absent or decreased levels of the polypeptide (e.g., insulin), to supplement absent or decreased levels of a different polypeptide (e.g., hemoglobin S for hemoglobin B, SOD, catalase, DNA repair proteins), to inhibit the activity of a polypeptide (e.g., an oncogene or tumor supressor), to activate the activity of a polypeptide (e.g., by binding to a receptor), to reduce the activity of a membrane bound receptor by competing with it for free ligand (e.g., soluble TNF receptors used in reducing inflammation), or to bring about a desired response (e.g., blood vessel growth inhibition, enhancement of the immune response to proliferative cells or tissues).

[0477] Similarly, antibodies directed to a polypeptide of the present invention can also be used to treat disease (as described supra, and elsewhere herein). For example, administration of an antibody directed to a polypeptide of the present invention can bind, and/or neutralize the polypeptide, and/or reduce overproduction of the polypeptide. Similarly, administration of an antibody can activate the polypeptide, such as by binding to a polypeptide bound to a membrane (receptor).

[0478] At the very least, the polypeptides of the present invention can be used as molecular weight markers on SDS-PAGE gels or on molecular sieve gel filtration columns using methods well known to those of skill in the art. Polypeptides can also be used to raise antibodies, which in turn are used to measure protein expression from a recombinant cell, as a way of assessing transformation of the host cell. Moreover, the polypeptides of the present invention can be used to test the biological activities described herein.

Diagnostic Assays

[0479] The compounds of the present invention are useful for diagnosis, treatment, prevention and/or prognosis of various disorders in mammals, preferably humans. Such disorders include, but are not limited to, those described for Table 1D and as indicated in the “Preferred Indications” column of Table 1D, and also herein under the section heading “Biological Activities”.

[0480] For a number of disorders, substantially altered (increased or decreased) levels of gene expression can be detected in tissues, cells or bodily fluids (e.g., sera, plasma, urine, semen, synovial fluid or spinal fluid) taken from an individual having such a disorder, relative to a “standard” gene expression level, that is, the expression level in tissues or bodily fluids from an individual not having the disorder. Thus, the invention provides a diagnostic method useful during diagnosis of a disorder, which involves measuring the expression level of the gene encoding the polypeptide in tissues, cells or body fluid from an individual and comparing the measured gene expression level with a standard gene expression level, whereby an increase or decrease in the gene expression level(s) compared to the standard is indicative of a disorder. These diagnostic assays may be performed in vivo or in vitro, such as, for example, on blood samples, biopsy tissue or autopsy tissue.

[0481] The present invention is also useful as a prognostic indicator, whereby patients exhibiting enhanced or depressed gene expression will experience a worse clinical outcome relative to patients expressing the gene at a level nearer the standard level.

[0482] In certain embodiments, a polypeptide of the invention, or polynucleotides, antibodies, agonists, or antagonists corresponding to that polypeptide, may be used to diagnose and/or prognose diseases and/or disorders associated with the tissue(s) in which the polypeptide of the invention is expressed, including one, two, three, four, five, or more tissues disclosed in Table 1B, column 8 (Tissue Distribution Library Code).

[0483] By “assaying the expression level of the gene encoding the polypeptide” is intended qualitatively or quantitatively measuring or estimating the level of the polypeptide of the invention or the level of the mRNA encoding the polypeptide of the invention in a first biological sample either directly (e.g., by determining or estimating absolute protein level or mRNA level) or relatively (e.g., by comparing to the polypeptide level or mRNA level in a second biological sample). Preferably, the polypeptide expression level or mRNA level in the first biological sample is measured or estimated and compared to a standard polypeptide level or mRNA level, the standard being taken from a second biological sample obtained from an individual not having the disorder or being determined by averaging levels from a population of individuals not having the disorder. As will be appreciated in the art, once a standard polypeptide level or mRNA level is known, it can be used repeatedly as a standard for comparison.

[0484] By “biological sample” is intended any biological sample obtained from an individual, cell line, tissue culture, or other source containing polypeptides of the invention (including portions thereof) or mRNA. As indicated, biological samples include body fluids (such as sera, plasma, urine, synovial fluid and spinal fluid) and tissue sources found to express the full length or fragments thereof of a polypeptide or mRNA. Methods for obtaining tissue biopsies and body fluids from mammals are well known in the art. Where the biological sample is to include mRNA, a tissue biopsy is the preferred source.

[0485] Total cellular RNA can be isolated from a biological sample using any suitable technique such as the single-step guanidinium-thiocyanate-phenol-chloroform method described in Chomczynski and Sacchi, Anal. Biochem. 162:156-159 (1987). Levels of mRNA encoding the polypeptides of the invention are then assayed using any appropriate method. These include Northern blot analysis, S1 nuclease mapping, the polymerase chain reaction (PCR), reverse transcription in combination with the polymerase chain reaction (RT-PCR), and reverse transcription in combination with the ligase chain reaction (RT-LCR).

[0486] The present invention also relates to diagnostic assays such as quantitative and diagnostic assays for detecting levels of polypeptides of the invention, in a biological sample (e.g., cells and tissues), including determination of normal and abnormal levels of polypeptides. Thus, for instance, a diagnostic assay in accordance with the invention for detecting over-expression of polypeptides of the invention compared to normal control tissue samples may be used to detect the presence of tumors. Assay techniques that can be used to determine levels of a polypeptide, such as a polypeptide of the present invention in a sample derived from a host are well-known to those of skill in the art. Such assay methods include radioimmunoassays, competitive-binding assays, Western Blot analysis and ELISA assays. Assaying polypeptide levels in a biological sample can occur using any art-known method.

[0487] Assaying polypeptide levels in a biological sample can occur using antibody-based techniques. For example, polypeptide expression in tissues can be studied with classical immunohistological methods (Jalkanen et al., J. Cell. Biol. 101:976-985 (1985); Jalkanen, M., et al., J. Cell. Biol. 105:3087-3096 (1987)). Other antibody-based methods useful for detecting polypeptide gene expression include immunoassays, such as the enzyme linked immunosorbent assay (ELISA) and the radioimmunoassay (RIA). Suitable antibody assay labels are known in the art and include enzyme labels, such as, glucose oxidase, and radioisotopes, such as iodine (¹²⁵I, ¹²¹I), carbon (¹⁴C), sulfur (³⁵S), tritium (³H), indium (¹¹²In), and technetium (^{99m}Tc), and fluorescent labels, such as fluorescein and rhodamine, and biotin.

[0488] The tissue or cell type to be analyzed will generally include those which are known, or suspected, to express the gene of inteest (such as, for example, cancer). The protein isolation methods employed herein may, for example, be such as those described in Harlow and Lane (Harlow, E. and Lane, D., 1988, “Antibodies: A Laboratory Manual”, Cold Spring Harbor Laboratory Press, Cold Spring Harbor, N.Y.), which is incorporated herein by reference in its entirety. The isolated cells can be derived from cell culture or from a patient. The analysis of cells taken from culture may be a necessary step in the assessment of cells that could be used as part of a cell-based gene therapy technique or, alternatively, to test the effect of compounds on the expression of the gene.

[0489] For example, antibodies, or fragments of antibodies, such as those described herein, may be used to quantitatively or qualitatively detect the presence of gene products or conserved variants or peptide fragments thereof. This can be accomplished, for example, by immunofluorescence techniques employing a fluorescently labeled antibody coupled with light microscopic, flow cytometric, or fluorimetric detection.

[0490] In a preferred embodiment, antibodies, or fragments of antibodies directed to any one or all of the predicted epitope domains of the polypeptides of the invention (shown in column 7 of Table 1B) may be used to quantitatively or qualitatively detect the presence of gene products or conserved variants or peptide fragments thereof. This can be accomplished, for example, by immunofluorescence techniques employing a fluorescently labeled antibody coupled with light microscopic, flow cytometric, or fluorimetric detection.

[0491] In an additional preferred embodiment, antibodies, or fragments of antibodies directed to a conformational epitope of a polypeptide of the invention may be used to quantitatively or qualitatively detect the presence of gene products or conserved variants or peptide fragments thereof. This can be accomplished, for example, by immunofluorescence techniques employing a fluorescently labeled antibody coupled with light microscopic, flow cytometric, or fluorimetric detection.

[0492] The antibodies (or fragments thereof), and/or polypeptides of the present invention may, additionally, be employed histologically, as in immunofluorescence, immunoelectron microscopy or non-immunological assays, for in situ detection of gene products or conserved variants or peptide fragments thereof. In situ detection may be accomplished by removing a histological specimen from a patient, and applying thereto a labeled antibody or polypeptide of the present invention. The antibody (or fragment thereof) or polypeptide is preferably applied by overlaying the labeled antibody (or fragment) onto a biological sample. Through the use of such a procedure, it is possible to determine not only the presence of the gene product, or conserved variants or peptide fragments, or polypeptide binding, but also its distribution in the examined tissue. Using the present invention, those of ordinary skill will readily perceive that any of a wide variety of histological methods (such as staining procedures) can be modified in order to achieve such in situ detection.

[0493] Immunoassays and non-immunoassays for gene products or conserved variants or peptide fragments thereof will typically comprise incubating a sample, such as a biological fluid, a tissue extract, freshly harvested cells, or lysates of cells which have been incubated in cell culture, in the presence of a detectably labeled antibody capable of binding gene products or conserved variants or peptide fragments thereof, and detecting the bound antibody by any of a number of techniques well-known in the art.

[0494] The biological sample may be brought in contact with and immobilized onto a solid phase support or carrier such as nitrocellulose, or other solid support which is capable of immobilizing cells, cell particles or soluble proteins. The support may then be washed with suitable buffers followed by treatment with the detectably labeled antibody or detectable polypeptide of the invention. The solid phase support may then be washed with the buffer a second time to remove unbound antibody or polypeptide. Optionally the antibody is subsequently labeled. The amount of bound label on solid support may then be detected by conventional means.

[0495] By “solid phase support or carrier” is intended any support capable of binding an antigen or an antibody. Well-known supports or carriers include glass, polystyrene, polypropylene, polyethylene, dextran, nylon, amylases, natural and modified celluloses, polyacrylamides, gabbros, and magnetite. The nature of the carrier can be either soluble to some extent or insoluble for the purposes of the present invention. The support material may have virtually any possible structural configuration so long as the coupled molecule is capable of binding to an antigen or antibody. Thus, the support configuration may be spherical, as in a bead, or cylindrical, as in the inside surface of a test tube, or the external surface of a rod. Alternatively, the surface may be flat such as a sheet, test strip, etc. Preferred supports include polystyrene beads. Those skilled in the art will know many other suitable carriers for binding antibody or antigen, or will be able to ascertain the same by use of routine experimentation.

[0496] The binding activity of a given lot of antibody or antigen polypeptide may be determined according to well known methods. Those skilled in the art will be able to determine operative and optimal assay conditions for each determination by employing routine experimentation.

[0497] In addition to assaying polypeptide levels or polynucleotide levels in a biological sample obtained from an individual, polypeptide or polynucleotide can also be detected in vivo by imaging. For example, in one embodiment of the invention, polypeptides and/or antibodies of the invention are used to image diseased cells, such as neoplasms. In another embodiment, polynucleotides of the invention (e.g., polynucleotides complementary to all or a portion of an mRNA) and/or antibodies (e.g., antibodies directed to any one or a combination of the epitopes of a polypeptide of the invention, antibodies directed to a conformational epitope of a polypeptide of the invention, or antibodies directed to the full length polypeptide expressed on the cell surface of a mammalian cell) are used to image diseased or neoplastic cells.

[0498] Antibody labels or markers for in vivo imaging of polypeptides of the invention include those detectable by X-radiography, NMR, MRI, CAT-scans or ESR. For X-radiography, suitable labels include radioisotopes such as barium or cesium, which emit detectable radiation but are not overtly harmful to the subject. Suitable markers for NMR and ESR include those with a detectable characteristic spin, such as deuterium, which may be incorporated into the antibody by labeling of nutrients for the relevant hybridoma. Where in vivo imaging is used to detect enhanced levels of polypeptides for diagnosis in humans, it may be preferable to use human antibodies or “humanized” chimeric monoclonal antibodies. Such antibodies can be produced using techniques described herein or otherwise known in the art. For example methods for producing chimeric antibodies are known in the art. See, for review, Morrison, Science 229:1202 (1985); Oi et al., BioTechniques 4:214 (1986); Cabilly et al., U.S. Pat. No. 4,816,567; Taniguchi et al., EP 171496; Morrison et al., EP 173494; Neuberger et al., WO 8601533; Robinson et al., WO 8702671; Boulianne et al., Nature 312:643 (1984); Neuberger et al., Nature 314:268 (1985).

[0499] Additionally, any polypeptides of the invention whose presence can be detected, can be administered. For example, polypeptides of the invention labeled with a radio-opaque or other appropriate compound can be administered and visualized in vivo, as discussed, above for labeled antibodies. Further, such polypeptides can be utilized for in vitro diagnostic procedures.

[0500] A polypeptide-specific antibody or antibody fragment which has been labeled with an appropriate detectable imaging moiety, such as a radioisotope (for example, ¹³¹I, ¹¹²In, ^{99m}Tc), a radio-opaque substance, or a material detectable by nuclear magnetic resonance, is introduced (for example, parenterally, subcutaneously or intraperitoneally) into the mammal to be examined for a disorder. It will be understood in the art that the size of the subject and the imaging system used will determine the quantity of imaging moiety needed to produce diagnostic images. In the case of a radioisotope moiety, for a human subject, the quantity of radioactivity injected will normally range from about 5 to 20 millicuries of ^{99m}Tc. The labeled antibody or antibody fragment will then preferentially accumulate at the location of cells which contain the antigenic protein. In vivo tumor imaging is described in S. W. Burchiel et al., “Immunopharmacokinetics of Radiolabeled Antibodies and Their Fragments” (Chapter 13 in Tumor Imaging: The Radiochemical Detection of Cancer, S. W. Burchiel and B. A. Rhodes, eds., Masson Publishing Inc. (1982)).

[0501] With respect to antibodies, one of the ways in which an antibody of the present invention can be detectably labeled is by linking the same to a reporter enzyme and using the linked product in an enzyme immunoassay (EIA) (Voller, A., “The Enzyme Linked Immunosorbent Assay (ELISA)”, 1978, Diagnostic Horizons 2:1-7, Microbiological Associates Quarterly Publication, Walkersville, Md.); Voller et al., J. Clin. Pathol. 31:507-520 (1978); Butler, J. E., Meth. Enzymol. 73:482-523 (1981); Maggio, E. (ed.), 1980, Enzyme Immunoassay, CRC Press, Boca Raton, Fla.,; Ishikawa, E. et al., (eds.), 1981, Enzyme Immunoassay, Kgaku Shoin, Tokyo). The reporter enzyme which is bound to the antibody will react with an appropriate substrate, preferably a chromogenic substrate, in such a manner as to produce a chemical moiety which can be detected, for example, by spectrophotometric, fluorimetric or by visual means. Reporter enzymes which can be used to detectably label the antibody include, but are not limited to, malate dehydrogenase, staphylococcal nuclease, delta-5-steroid isomerase, yeast alcohol dehydrogenase, alpha-glycerophosphate, dehydrogenase, triose phosphate isomerase, horseradish peroxidase, alkaline phosphatase, asparaginase, glucose oxidase, beta-galactosidase, ribonuclease, urease, catalase, glucose-6-phosphate dehydrogenase, glucoamylase and acetylcholinesterase. Additionally, the detection can be accomplished by colorimetric methods which employ a chromogenic substrate for the reporter enzyme. Detection may also be accomplished by visual comparison of the extent of enzymatic reaction of a substrate in comparison with similarly prepared standards.

[0502] Detection may also be accomplished using any of a variety of other immunoassays. For example, by radioactively labeling the antibodies or antibody fragments, it is possible to detect polypeptides through the use of a radioimmunoassay (RIA) (see, for example, Weintraub, B., Principles of Radioimmunoassays, Seventh Training Course on Radioligand Assay Techniques, The Endocrine Society, March, 1986, which is incorporated by reference herein). The radioactive isotope can be detected by means including, but not limited to, a gamma counter, a scintillation counter, or autoradiography.

[0503] It is also possible to label the antibody with a fluorescent compound. When the fluorescently labeled antibody is exposed to light of the proper wave length, its presence can then be detected due to fluorescence. Among the most commonly used fluorescent labeling compounds are fluorescein isothiocyanate, rhodamine, phycoerythrin, phycocyanin, allophycocyanin, ophthaldehyde and fluorescamine.

[0504] The antibody can also be detectably labeled using fluorescence emitting metals such as ¹⁵²Eu, or others of the lanthanide series. These metals can be attached to the antibody using such metal chelating groups as diethylenetriaminepentacetic acid (DTPA) or ethylenediaminetetraacetic acid (EDTA).

[0505] The antibody also can be detectably labeled by coupling it to a chemiluminescent compound. The presence of the chemiluminescent-tagged antibody is then determined by detecting the presence of luminescence that arises during the course of a chemical reaction. Examples of particularly useful chemiluminescent labeling compounds are luminol, isoluminol, theromatic acridinium ester, imidazole, acridinium salt and oxalate ester.

[0506] Likewise, a bioluminescent compound may be used to label the antibody of the present invention. Bioluminescence is a type of chemiluminescence found in biological systems in, which a catalytic protein increases the efficiency of the chemiluminescent reaction. The presence of a bioluminescent protein is determined by detecting the presence of luminescence. Important bioluminescent compounds for purposes of labeling are luciferin, luciferase and aequorin.

Methods for Detecting Diseases

[0507] In general, a disease may be detected in a patient based on the presence of one or more proteins of the invention and/or polynucleotides encoding such proteins in a biological sample (for example, blood, sera, urine, and/or tumor biopsies) obtained from the patient. In other words, such proteins may be used as markers to indicate the presence or absence of a disease or disorder, including cancer and/or as described elsewhere herein. In addition, such proteins may be useful for the detection of other diseases and cancers. The binding agents provided herein generally permit detection of the level of antigen that binds to the agent in the biological sample. Polynucleotide primers and probes may be used to detect the level of mRNA encoding polypeptides of the invention, which is also indicative of the presence or absence of a disease or disorder, including cancer. In general, polypeptides of the invention should be present at a level that is at least three fold higher in diseased tissue than in normal tissue.

[0508] There are a variety of assay formats known to those of ordinary skill in the art for using a binding agent to detect polypeptide markers in a sample. See, e.g., Harlow and Lane, supra. In general, the presence or absence of a disease in a patient may be determined by (a) contacting a biological sample obtained from a patient with a binding agent; (b) detecting in the sample a level of polypeptide that binds to the binding agent; and (c) comparing the level of polypeptide with a predetermined cut-off value.

[0509] In a preferred embodiment, the assay involves the use of a binding agent(s) immobilized on a solid support to bind to and remove the polypeptide of the invention from the remainder of the sample. The bound polypeptide may then be detected using a detection reagent that contains a reporter group and specifically binds to the binding agent/polypeptide complex. Such detection reagents may comprise, for example, a binding agent that specifically binds to the polypeptide or an antibody or other agent that specifically binds to the binding agent, such as an anti-immunoglobulin, protein G, protein A or a lectin. Alternatively, a competitive assay may be utilized, in which a polypeptide is labeled with a reporter group and allowed to bind to the immobilized binding agent after incubation of the binding agent with the sample. The extent to which components of the sample inhibit the binding of the labeled polypeptide to the binding agent is indicative of the reactivity of the sample with the immobilized binding agent. Suitable polypeptides for use within such assays include polypeptides of the invention and portions thereof, or antibodies, to which the binding agent binds, as described above.

[0510] The solid support may be any material known to those of skill in the art to which polypeptides of the invention may be attached. For example, the solid support may be a test well in a microtiter plate or a nitrocellulose or other suitable membrane. Alternatively, the support may be a bead or disc, such as glass fiberglass, latex or a plastic material such as polystyrene or polyvinylchloride. The support may also be a magnetic particle or a fiber optic sensor, such as those disclosed, for example, in U.S. Pat. No. 5,359,681. The binding agent may be immobilized on the solid support using a variety of techniques known to those of skill in the art, which are amply described in the patent and scientific literature. In the context of the present invention, the term “immobilization” refers to both noncovalent association, such as adsorption, and covalent attachment (which may be a direct linkage between the agent and functional groups on the support or may be a linkage by way of a cross-linking agent). Immobilization by adsorption to a well in a microtiter plate or to a membrane is preferred. In such cases, adsorption may be achieved by contacting the binding agent, in a suitable buffer, with the solid support for the suitable amount of time. The contact time varies with temperature, but is typically between about 1 hour and about 1 day. In general, contacting a well of plastic microtiter plate (such as polystyrene or polyvinylchloride) with an amount of binding agent ranging from about 10 ng to about 10 ug, and preferably about 100 ng to about 1 ug, is sufficient to immobilize an adequate amount of binding agent.

[0511] Covalent attachment of binding agent to a solid support may generally be achieved by first reacting the support with a bifunctional reagent that will react with both the support and a functional group, such as a hydroxyl or amino group, on the binding agent. For example, the binding agent may be covalently attached to supports having an appropriate polymer coating using benzoquinone or by condensation of an aldehyde group on the support with an amine and an active hydrogen on the binding partner (see, e.g., Pierce Immunotechnology Catalog and Handbook, 1991, at A12-A13).

Gene Therapy Methods

[0512] Also encompassed by the invention are gene therapy methods for treating or preventing disorders, diseases and conditions. The gene therapy methods relate to the introduction of nucleic acid (DNA, RNA and antisense DNA or RNA) sequences into an animal to achieve expression of the polypeptide of the present invention. This method requires a polynucleotide which codes for a polypeptide of the present invention operatively linked to a promoter and any other genetic elements necessary for the expression of the polypeptide by the target tissue. Such gene therapy and delivery techniques are known in the art, see, for example, WO90/11092, which is herein incorporated by reference.

[0513] Thus, for example, cells from a patient may be engineered with a polynucleotide (DNA or RNA) comprising a promoter operably linked to a polynucleotide of the present invention ex vivo, with the engineered cells then being provided to a patient to be treated with the polypeptide of the present invention. Such methods are well-known in the art. For example, see Belldegrun, A., et al., J. Natl. Cancer Inst. 85: 207-216 (1993); Ferrantini, M. et al., Cancer Research 53: 1107-1112 (1993); Ferrantini, M. et al., J. Immunology 153: 4604-4615 (1994); Kaido, T., et al., Int. J. Cancer 60: 221-229 (1995); Ogura, H., et al., Cancer Research 50: 5102-5106 (1990); Santodonato, L., et al., Human Gene Therapy 7:1-10 (1996); Santodonato, L., et al., Gene Therapy 4:1246-1255 (1997); and Zhang, J.-F. et al., Cancer Gene Therapy 3: 31-38 (1996)), which are herein incorporated by reference. In one embodiment, the cells which are engineered are arterial cells. The arterial cells may be reintroduced into the patient through direct injection to the artery, the tissues surrounding the artery, or through catheter injection.

[0514] As discussed in more detail below, the polynucleotide constructs can be delivered by any method that delivers injectable materials to the cells of an animal, such as, injection into the interstitial space of tissues (heart, muscle, skin, lung, liver, and the like). The polynucleotide constructs may be delivered in a pharmaceutically acceptable liquid or aqueous carrier.

[0515] In one embodiment, the polynucleotide of the present invention is delivered as a naked polynucleotide. The term “naked” polynucleotide, DNA or RNA refers to sequences that are free from any delivery vehicle that acts to assist, promote or facilitate entry into the cell, including viral sequences, viral particles, liposome formulations, lipofectin or precipitating agents and the like. However, the polynucleotide of the present invention can also be delivered in liposome formulations and lipofectin formulations and the like can be prepared by methods well known to those skilled in the art. Such methods are described, for example, in U.S. Pat. Nos. 5,593,972, 5,589,466, and 5,580,859, which are herein incorporated by reference.

[0516] The polynucleotide vector constructs used in the gene therapy method are preferably constructs that will not integrate into the host genome nor will they contain sequences that allow for replication. Appropriate vectors include pWLNEO, pSV2CAT, pOG44, pXT1 and pSG available from Stratagene; pSVK3, pBPV, pMSG and pSVL available from Pharmacia; and pEF1/V5, pcDNA3.1, and pRc/CMV2 available from Invitrogen. Other suitable vectors will be readily apparent to the skilled artisan.

[0517] Any strong promoter known to those skilled in the art can be used for driving the expression of the polynucleotide sequence. Suitable promoters include adenoviral promoters, such as the adenoviral major late promoter; or heterologous promoters, such as the cytomegalovirus (CMV) promoter; the respiratory syncytial virus (RSV) promoter; inducible promoters, such as the MMT promoter, the metallothionein promoter; heat shock promoters; the albumin promoter; the ApoAI promoter; human globin promoters; viral thymidine kinase promoters, such as the Herpes Simplex thymidine kinase promoter; retroviral LTRs; the b-actin promoter; and human growth hormone promoters. The promoter also may be the native promoter for the polynucleotide of the present invention.

[0518] Unlike other gene therapy techniques, one major advantage of introducing naked nucleic acid sequences into target cells is the transitory nature of the polynucleotide synthesis in the cells. Studies have shown that non-replicating DNA sequences can be introduced into cells to provide production of the desired polypeptide for periods of up to six months.

[0519] The polynucleotide construct can be delivered to the interstitial space of tissues within the an animal, including of muscle, skin, brain, lung, liver, spleen, bone marrow, thymus, heart, lymph, blood, bone, cartilage, pancreas, kidney, gall bladder, stomach, intestine, testis, ovary, uterus, rectum, nervous system, eye, gland, and connective tissue. Interstitial space of the tissues comprises the intercellular, fluid, mucopolysaccharide matrix among the reticular fibers of organ tissues, elastic fibers in the walls of vessels or chambers, collagen fibers of fibrous tissues, or that same matrix within connective tissue ensheathing muscle cells or in the lacunae of bone. It is similarly the space occupied by the plasma of the circulation and the lymph fluid of the lymphatic channels. Delivery to the interstitial space of muscle tissue is preferred for the reasons discussed below. They may be conveniently delivered by injection into the tissues comprising these cells. They are preferably delivered to and expressed in persistent, non-dividing cells which are differentiated, although delivery and expression may be achieved in non-differentiated or less completely differentiated cells, such as, for example, stem cells of blood or skin fibroblasts. In vivo muscle cells are particularly competent in their ability to take up and express polynucleotides.

[0520] For the naked nucleic acid sequence injection, an effective dosage amount of DNA or RNA will be in the range of from about 0.05 mg/kg body weight to about 50 mg/kg body weight. Preferably the dosage will be from about 0.005 mg/kg to about 20 mg/kg and more preferably from about 0.05 mg/kg to about 5 mg/kg. Of course, as the artisan of ordinary skill will appreciate, this dosage will vary according to the tissue site of injection. The appropriate and effective dosage of nucleic acid sequence can readily be determined by those of ordinary skill in the art and may depend on the condition being treated and the route of administration.

[0521] The preferred route of administration is by the parenteral route of injection into the interstitial space of tissues. However, other parenteral routes may also be used, such as, inhalation of an aerosol formulation particularly for delivery to lungs or bronchial tissues, throat or mucous membranes of the nose. In addition, naked DNA constructs can be delivered to arteries during angioplasty by the catheter used in the procedure.

[0522] The naked polynucleotides are delivered by any method known in the art, including, but not limited to, direct needle injection at the delivery site, intravenous injection, topical administration, catheter infusion, and so-called “gene guns”. These delivery methods are known in the art.

[0523] The constructs may also be delivered with delivery vehicles such as viral sequences, viral particles, liposome formulations, lipofectin, precipitating agents, etc. Such methods of delivery are known in the art.

[0524] In certain embodiments, the polynucleotide constructs are complexed in a liposome preparation. Liposomal preparations for use in the instant invention include cationic (positively charged), anionic (negatively charged) and neutral preparations. However, cationic liposomes are particularly preferred because a tight charge complex can be formed between the cationic liposome and the polyanionic nucleic acid. Cationic liposomes have been shown to mediate intracellular delivery of plasmid DNA (Felgner et al., Proc. Natl. Acad. Sci. USA (1987) 84:7413-7416, which is herein incorporated by reference); mRNA (Malone et al., Proc. Natl. Acad. Sci. USA (1989) 86:6077-6081, which is herein incorporated by reference); and purified transcription factors (Debs et al., J. Biol. Chem. (1990) 265:10189-10192, which is herein incorporated by reference), in functional form.

[0525] Cationic liposomes are readily available. For example, N[1-2,3-dioleyloxy)propyl]-N,N,N-triethylammonium (DOTMA) liposomes are particularly useful and are available under the trademark Lipofectin, from GIBCO BRL, Grand Island, N.Y. (See, also, Felgner et al., Proc. Natl. Acad. Sci. USA (1987) 84:7413-7416, which is herein incorporated by reference). Other commercially available liposomes include transfectace (DDAB/DOPE) and DOTAP/DOPE (Boehringer).

[0526] Other cationic liposomes can be prepared from readily available materials using techniques well known in the art. See, e.g. PCT Publication No. WO 90/11092 (which is herein incorporated by reference) for a description of the synthesis of DOTAP (1,2-bis(oleoyloxy)-3-(trimethylammonio)propane) liposomes. Preparation of DOTMA liposomes is explained in the literature, see, e.g., P. Felgner et al., Proc. Natl. Acad. Sci. USA 84:7413-7417, which is herein incorporated by reference. Similar methods can be used to prepare liposomes from other cationic lipid materials.

[0527] Similarly, anionic and neutral liposomes are readily available, such as from Avanti Polar Lipids (Birmingham, Ala.), or can be easily prepared using readily available materials. Such materials include phosphatidyl, choline, cholesterol, phosphatidyl ethanolamine, dioleoylphosphatidyl choline (DOPC), dioleoylphosphatidyl glycerol (DOPG), dioleoylphoshatidyl ethanolamine (DOPE), among others. These materials can also be mixed with the DOTMA and DOTAP starting materials in appropriate ratios. Methods for making liposomes using these materials are well known in the art.

[0528] For example, commercially dioleoylphosphatidyl choline (DOPC), dioleoylphosphatidyl glycerol (DOPG), and dioleoylphosphatidyl ethanolamine (DOPE) can be used in various combinations to make conventional liposomes, with or without the addition of cholesterol. Thus, for example, DOPG/DOPC vesicles can be prepared by drying 50 mg each of DOPG and DOPC under a stream of nitrogen gas into a sonication vial. The sample is placed under a vacuum pump overnight and is hydrated the following day with deionized water. The sample is then sonicated for 2 hours in a capped vial, using a Heat Systems model 350 sonicator equipped with an inverted cup (bath type) probe at the maximum setting while the bath is circulated at 15EC. Alternatively, negatively charged vesicles can be prepared without sonication to produce multilamellar vesicles or by extrusion through nucleopore membranes to produce unilamellar vesicles of discrete size. Other methods are known and available to those of skill in the art.

[0529] The liposomes can comprise multilamellar vesicles (MLVs), small unilamellar vesicles (SUVs), or large unilamellar vesicles (LUVs), with SUVs being preferred. The various liposome-nucleic acid complexes are prepared using methods well known in the art. See, e.g., Straubinger et al., Methods of Immunology (1983), 101:512-527, which is herein incorporated by reference. For example, MLVs containing nucleic acid can be prepared by depositing a thin film of phospholipid on the walls of a glass tube and subsequently hydrating with a solution of the material to be encapsulated. SUVs are prepared by extended sonication of MLVs to produce a homogeneous population of unilamellar liposomes. The material to be entrapped is added to a suspension of preformed MLVs and then sonicated. When using liposomes containing cationic lipids, the dried lipid film is resuspended in an appropriate solution such as sterile water or an isotonic buffer solution such as 10 mM Tris/NaCl, sonicated, and then the preformed liposomes are mixed directly with the DNA. The liposome and DNA form a very stable complex due to binding of the positively charged liposomes to the cationic DNA. SUVs find use with small nucleic acid fragments. LUVs are prepared by a number of methods, well known in the art. Commonly used methods include Ca²⁺-EDTA chelation (Papahadjopoulos et al., Biochim. Biophys. Acta (1975) 394:483; Wilson et al., Cell 17:77 (1979)); ether injection (Deamer, D. and Bangham, A., Biochim. Biophys. Acta 443:629 (1976); Ostro et al., Biochem. Biophys. Res. Commun. 76:836 (1977); Fraley et al., Proc. Natl. Acad. Sci. USA 76:3348 (1979)); detergent dialysis (Enoch, H. and Strittmatter, P., Proc. Natl. Acad. Sci. USA 76:145 (1979)); and reverse-phase evaporation (REV) (Fraley et al., J. Biol. Chem. 255:10431 (1980); Szoka, F. and Papahadjopoulos, D., Proc. Natl. Acad. Sci. USA 75:145 (1978); Schaefer-Ridder et al., Science 215:166 (1982)), which are herein incorporated by reference.

[0530] Generally, the ratio of DNA to liposomes will be from about 10:1 to about 1:10. Preferably, the ration will be from about 5:1 to about 1:5. More preferably, the ration will be about 3:1 to about 1:3. Still more preferably, the ratio will be about 1:1.

[0531] U.S. Pat. No. 5,676,954 (which is herein incorporated by reference) reports on the injection of genetic material, complexed with cationic liposomes carriers, into mice. U.S. Pat. Nos. 4,897,355, 4,946,787, 5,049,386, 5,459,127, 5,589,466, 5,693,622, 5,580,859, 5,703,055, and international publication no. WO 94/9469 (which are herein incorporated by reference) provide cationic lipids for use in transfecting DNA into cells and mammals. U.S. Pat. Nos. 5,589,466, 5,693,622, 5,580,859, 5,703,055, and international publication no. WO 94/9469 provide methods for delivering DNA-cationic lipid complexes to mammals.

[0532] In certain embodiments, cells are engineered, ex vivo or in vivo, using a retroviral particle containing RNA which comprises a sequence encoding a polypeptide of the present invention. Retroviruses from which the retroviral plasmid vectors may be derived include, but are not limited to, Moloney Murine Leukemia Virus, spleen necrosis virus, Rous sarcoma Virus, Harvey Sarcoma Virus, avian leukosis virus, gibbon ape leukemia virus, human immunodeficiency virus, Myeloproliferative Sarcoma Virus, and mammary tumor virus.

[0533] The retroviral plasmid vector is employed to transduce packaging cell lines to form producer cell lines. Examples of packaging cells which may be transfected include, but are not limited to, the PE501, PA317, R-2, R-AM, PA12, T19-14X, VT-19-17-H2, RCRE, RCRIP, GP+E-86, GP+envAm12, and DAN cell lines as described in Miller, Human Gene Therapy 1:5-14 (1990), which is incorporated herein by reference in its entirety. The vector may transduce the packaging cells through any means known in the art. Such means include, but are not limited to, electroporation, the use of liposomes, and CaPO₄ precipitation. In one alternative, the retroviral plasmid vector may be encapsulated into a liposome, or coupled to a lipid, and then administered to a host.

[0534] The producer cell line generates infectious retroviral vector particles which include polynucleotide encoding a polypeptide of the present invention. Such retroviral vector particles then may be employed, to transduce eukaryotic cells, either in vitro or in vivo. The transduced eukaryotic cells will express a polypeptide of the present invention.

[0535] In certain other embodiments, cells are engineered, ex vivo or in vivo, with polynucleotide contained in an adenovirus vector. Adenovirus can be manipulated such that it encodes and expresses a polypeptide of the present invention, and at the same time is inactivated in terms of its ability to replicate in a normal lytic viral life cycle. Adenovirus expression is achieved without integration of the viral DNA into the host cell chromosome, thereby alleviating concerns about insertional mutagenesis. Furthermore, adenoviruses have been used as live enteric vaccines for many years with an excellent safety profile (Schwartz et al. Am. Rev. Respir. Dis.109:233-238 (1974)). Finally, adenovirus mediated gene transfer has been demonstrated in a number of instances including transfer of alpha-1-antitrypsin and CFTR to the lungs of cotton rats (Rosenfeld, M. A. et al. (1991) Science 252:431-434; Rosenfeld et al., (1992) Cell 68:143-155). Furthermore, extensive studies to attempt to establish adenovirus as a causative agent in human cancer were uniformly negative (Green, M. et al. (1979) Proc. Natl. Acad. Sci. USA 76:6606).

[0536] Suitable adenoviral vectors useful in the present invention are described, for example, in Kozarsky and Wilson, Curr. Opin. Genet. Devel. 3:499-503 (1993); Rosenfeld et al., Cell 68:143-155 (1992); Engelhardt et al., Human Genet. Ther. 4:759-769 (1993); Yang et al., Nature Genet. 7:362-369 (1994); Wilson et al., Nature 365:691-692 (1993); and U.S. Pat. No. 5,652,224, which are herein incorporated by reference. For example, the adenovirus vector Ad2 is useful and can be grown in human 293 cells. These cells contain the E1 region of adenovirus and constitutively express E1a and E1b, which complement the defective adenoviruses by providing the products of the genes deleted from the vector. In addition to Ad2, other varieties of adenovirus (e.g., Ad3, Ad5, and Ad7) are also useful in the present invention.

[0537] Preferably, the adenoviruses used in the present invention are replication deficient. Replication deficient adenoviruses require the aid of a helper virus and/or packaging cell line to form infectious particles. The resulting virus is capable of infecting cells and can express a polynucleotide of interest which is operably linked to a promoter, but cannot replicate in most cells. Replication deficient adenoviruses may be deleted in one or more of all or a portion of the following genes: E1a, E1b, E3, E4, E2a, or L1 through L5.

[0538] In certain other embodiments, the cells are engineered, ex vivo or in vivo, using an adeno-associated virus (AAV). AAVs are naturally occurring defective viruses that require helper viruses to produce infectious particles (Muzyczka, N., Curr. Topics in Microbiol. Immunol. 158:97 (1992)). It is also one of the few viruses that may integrate its DNA into non-dividing cells. Vectors containing as little as 300 base pairs of AAV can be packaged and can integrate, but space for exogenous DNA is limited to about 4.5 kb. Methods for producing and using such AAVs are known in the art. See, for example, U.S. Pat. Nos. 5,139,941, 5,173,414, 5,354,678, 5,436,146, 5,474,935, 5,478,745, and 5,589,377.

[0539] For example, an appropriate AAV vector for use in the present invention will include all the sequences necessary for DNA replication, encapsidation, and host-cell integration. The polynucleotide construct is inserted into the AAV vector using standard cloning methods, such as those found in Sambrook et al., Molecular Cloning: A Laboratory Manual, Cold Spring Harbor Press (1989). The recombinant AAV vector is then transfected into packaging cells which are infected with a helper virus, using any standard technique, including lipofection, electroporation, calcium phosphate precipitation, etc. Appropriate helper viruses include adenoviruses, cytomegaloviruses, vaccinia viruses, or herpes viruses. Once the packaging cells are transfected and infected, they will produce infectious AAV viral particles which contain the polynucleotide construct. These viral particles are then used to transduce eukaryotic cells, either ex vivo or in vivo. The transduced cells will contain the polynucleotide construct integrated into its genome, and will express a polypeptide of the invention.

[0540] Another method of gene therapy involves operably associating heterologous control regions and endogenous polynucleotide sequences (e.g. encoding a polypeptide of the present invention) via homologous recombination (see, e.g., U.S. Pat. No. 5,641,670, issued Jun. 24, 1997; International Publication No. WO 96/29411, published Sep. 26, 1996; International Publication No. WO 94/12650, published Aug. 4, 1994; Koller et al., Proc. Natl. Acad. Sci. USA 86:8932-8935 (1989); and Zijlstra et al., Nature 342:435-438 (1989), which are herein encorporated by reference. This method involves the activation of a gene which is present in the target cells, but which is not normally expressed in the cells, or is expressed at a lower level than desired.

[0541] Polynucleotide constructs are made, using standard techniques known in the art, which contain the promoter with targeting sequences flanking the promoter. Suitable promoters are described herein. The targeting sequence is sufficiently complementary to an endogenous sequence to permit homologous recombination of the promoter-targeting sequence with the endogenous sequence. The targeting sequence will be sufficiently near the 5′ end of the desired endogenous polynucleotide sequence so the promoter will be operably linked to the endogenous sequence upon homologous recombination.

[0542] The promoter and the targeting sequences can be amplified using PCR. Preferably, the amplified promoter contains distinct restriction enzyme sites on the 5′ and 3′ ends. Preferably, the 3′ end of the first targeting sequence contains the same restriction enzyme site as the 5′ end of the amplified promoter and the 5′ end of the second targeting sequence contains the same restriction site as the 3′ end of the amplified promoter. The amplified promoter and targeting sequences are digested and ligated together.

[0543] The promoter-targeting sequence construct is delivered to the cells, either as naked polynucleotide, or in conjunction with transfection-facilitating agents, such as liposomes, viral sequences, viral particles, whole viruses, lipofection, precipitating agents, etc., described in more detail above. The P promoter-targeting sequence can be delivered by any method, included direct needle injection, intravenous injection, topical administration, catheter infusion, particle accelerators, etc. The methods are described in more detail below.

[0544] The promoter-targeting sequence construct is taken up by cells. Homologous recombination between the construct and the endogenous sequence takes place, such that an endogenous sequence is placed under the control of the promoter. The promoter then drives the expression of the endogenous sequence.

[0545] The polynucleotide encoding a polypeptide of the present invention may contain a secretory signal sequence that facilitates secretion of the protein. Typically, the signal sequence is positioned in the coding region of the polynucleotide to be expressed towards or at the 5′ end of the coding region. The signal sequence may be homologous or heterologous to the polynucleotide of interest and may be homologous or heterologous to the cells to be transfected. Additionally, the signal sequence may be chemically synthesized using methods known in the art.

[0546] Any mode of administration of any of the above-described polynucleotides constructs can be used so long as the mode results in the expression of one or more molecules in an amount sufficient to provide a therapeutic effect. This includes direct needle injection, systemic injection, catheter infusion, biolistic injectors, particle accelerators (i.e., “gene guns”), gelfoam sponge depots, other commercially available depot materials, osmotic pumps (e.g., Alza minipumps), oral or suppositorial solid (tablet or pill) pharmaceutical formulations, and decanting or topical applications during surgery. For example, direct injection of naked calcium phosphate-precipitated plasmid into rat liver and rat spleen or a protein-coated plasmid into the portal vein has resulted in gene expression of the foreign gene in the rat livers (Kaneda et al., Science 243:375 (1989)).

[0547] A preferred method of local administration is by direct injection. Preferably, a recombinant molecule of the present invention complexed with a delivery vehicle is administered by direct injection into or locally within the area of arteries. Administration of a composition locally within the area of arteries refers to injecting the composition centimeters and preferably, millimeters within arteries.

[0548] Another method of local administration is to contact a polynucleotide construct of the present invention in or around a surgical wound. For example, a patient can undergo surgery and the polynucleotide construct can be coated on the surface of tissue inside the wound or the construct can be injected into areas of tissue inside the wound.

[0549] Therapeutic compositions useful in systemic administration, include recombinant molecules of the present invention complexed to a targeted delivery vehicle of the present invention. Suitable delivery vehicles for use with systemic administration comprise liposomes comprising ligands for targeting the vehicle to a particular site. In specific embodiments, suitable delivery vehicles for use with systemic administration comprise liposomes comprising polypeptides of the invention for targeting the vehicle to a particular site.

[0550] Preferred methods of systemic administration, include intravenous injection, aerosol, oral and percutaneous (topical) delivery. Intravenous injections can be performed using methods standard in the art. Aerosol delivery can also be performed using methods standard in the art (see, for example, Stribling et al., Proc. Natl. Acad. Sci. USA 189:11277-11281, 1992, which is incorporated herein by reference). Oral delivery can be performed by complexing a polynucleotide construct of the present invention to a carrier capable of withstanding degradation by digestive enzymes in the gut of an animal. Examples of such carriers, include plastic capsules or tablets, such as those known in the art. Topical delivery can be performed by mixing a polynucleotide construct of the present invention with a lipophilic reagent (e.g., DMSO) that is capable of passing into the skin.

[0551] Determining an effective amount of substance to be delivered can depend upon a number of factors including, for example, the chemical structure and biological activity of the substance, the age and weight of the animal, the precise condition requiring treatment and its severity, and the route of administration. The frequency of treatments depends upon a number of factors, such as the amount of polynucleotide constructs administered per dose, as well as the health and history of the subject. The precise amount, number of doses, and timing of doses will be determined by the attending physician or veterinarian.

[0552] Therapeutic compositions of the present invention can be administered to any animal, preferably to mammals and birds. Preferred mammals include humans, dogs, cats, mice, rats, rabbits sheep, cattle, horses and pigs, with humans being particularly preferred.

Biological Activities

[0553] Polynucleotides or polypeptides, or agonists or antagonists of the present invention, can be used in assays to test for one or more biological activities. If these polynucleotides or polypeptides, or agonists or antagonists of the present invention, do exhibit activity in a particular assay, it is likely that these molecules may be involved in the diseases associated with the biological activity. Thus, the polynucleotides and polypeptides, and agonists or antagonists could be used to treat the associated disease.

[0554] Members of the secreted family of proteins are believed to be involved in biological activities associated with, for example, cellular signaling. Accordingly, compositions of the invention (including polynucleotides, polypeptides and antibodies of the invention, and fragments and variants thereof) may be used in diagnosis, prognosis, prevention and/or treatment of diseases and/or disorders associated with aberrant activity of secreted polypeptides.

[0555] In preferred embodiments, compositions of the invention (including polynucleotides, polypeptides and antibodies of the invention, and fragments and variants thereof) may be used in the diagnosis, prognosis, prevention and/or treatment of diseases and/or disorders relating to diseases and disorders of the endocrine system, the nervous system (See, for example, “Neurological Disorders” section below), and the immune system (See, for example, “Immune Activity” section below).

[0556] In certain embodiments, a polypeptide of the invention, or polynucleotides, antibodies, agonists, or antagonists corresponding to that polypeptide, may be used to diagnose and/or prognose diseases and/or disorders associated with the tissue(s) in which the polypeptide of the invention is expressed including one, two, three, four, five, or more tissues disclosed in Table 1B, column 8 (Tissue Distribution Library Code).

[0557] Thus, polynucleotides, translation products and antibodies of the invention are useful in the diagnosis, detection and/or treatment of diseases and/or disorders associated with activities that include, but are not limited to, prohormone activation, neurotransmitter activity, cellular signaling, cellular proliferation, cellular differentiation, and cell migration.

[0558] More generally, polynucleotides, translation products and antibodies corresponding to this gene may be useful for the diagnosis, prognosis, prevention and/or treatment of diseases and/or disorders associated with the following systems.

Immune Activity

[0559] Polynucleotides, polypeptides, antibodies, and/or agonists or antagonists of the present invention may be useful in treating, preventing, diagnosing and/or prognosing diseases, disorders, and/or conditions of the immune system, by, for example, activating or inhibiting the proliferation, differentiation, or mobilization (chemotaxis) of immune cells. Immune cells develop through a process called hematopoiesis, producing myeloid (platelets, red blood cells, neutrophils, and macrophages) and lymphoid (B and T lymphocytes) cells from pluripotent stem cells. The etiology of these immune diseases, disorders, and/or conditions may be genetic, somatic, such as cancer and some autoimmune diseases, acquired (e.g., by chemotherapy or toxins), or infectious. Moreover, polynucleotides, polypeptides, antibodies, and/or agonists or antagonists of the present invention can be used as a marker or detector of a particular immune system disease or disorder.

[0560] In another embodiment, a polypeptide of the invention, or polynucleotides, antibodies, agonists, or antagonists corresponding to that polypeptide, may be used to treat diseases and disorders of the immune system and/or to inhibit or enhance an immune response generated by cells associated with the tissue(s) in which the polypeptide of the invention is expressed, including one, two, three, four, five, or more tissues disclosed in Table 1B, column 8 (Tissue Distribution Library Code).

[0561] Polynucleotides, polypeptides, antibodies, and/or agonists or antagonists of the present invention may be useful in treating, preventing, diagnosing, and/or prognosing immunodeficiencies, including both congenital and acquired immunodeficiencies. Examples of B cell immunodeficiencies in which immunoglobulin levels B cell function and/or B cell numbers are decreased include: X-linked agammaglobulinemia (Bruton's disease), X-linked infantile agammaglobulinemia, X-linked immunodeficiency with hyper IgM, non X-linked immunodeficiency with hyper IgM, X-linked lymphoproliferative syndrome (XLP), agammaglobulinemia including congenital and acquired agammaglobulinemia, adult onset agammaglobulinemia, late-onset agammaglobulinemia, dysganunaglobulinemia, hypogammaglobulinemia, unspecified hypogammaglobulinemia, recessive agammaglobulinemia (Swiss type), Selective IgM deficiency, selective IgA deficiency, selective IgG subclass deficiencies, IgG subclass deficiency (with or without IgA deficiency), Ig deficiency with increased IgM, IgG and IgA deficiency with increased IgM, antibody deficiency with normal or elevated Igs, Ig heavy chain deletions, kappa chain deficiency, B cell lymphoproliferative disorder (BLPD), common variable immunodeficiency (CVID), common variable immunodeficiency (CVI) (acquired), and transient hypogammaglobulinemia of infancy.

[0562] In specific embodiments, ataxia-telangiectasia or conditions associated with ataxia-telangiectasia are treated, prevented, diagnosed, and/or prognosing using the polypeptides or polynucleotides of the invention, and/or agonists or antagonists thereof.

[0563] Examples of congenital immunodeficiencies in which T cell and/or B cell function and/or number is decreased include, but are not limited to: DiGeorge anomaly, severe combined immunodeficiencies (SCID) (including, but not limited to, X-linked SCID, autosomal recessive SCID, adenosine deaminase deficiency, purine nucleoside phosphorylase (PNP) deficiency, Class II MHC deficiency (Bare lymphocyte syndrome), Wiskott-Aldrich syndrome, and ataxia telangiectasia), thymic hypoplasia, third and fourth pharyngeal pouch syndrome, 22q11.2 deletion, chronic mucocutaneous candidiasis, natural killer cell deficiency (NK), idiopathic CD4+ T-lymphocytopenia, immunodeficiency with predominant T cell defect (unspecified), and unspecified immunodeficiency of cell mediated immunity.

[0564] In specific embodiments, DiGeorge anomaly or conditions associated with DiGeorge anomaly are treated, prevented, diagnosed, and/or prognosed using polypeptides or polynucleotides of the invention, or antagonists or agonists thereof.

[0565] Other immunodeficiencies that may be treated, prevented, diagnosed, and/or prognosed using polypeptides or polynucleotides of the invention, and/or agonists or antagonists thereof, include, but are not limited to, chronic granulomatous disease, Chediak-Higashi syndrome, myeloperoxidase deficiency, leukocyte glucose-6-phosphate dehydrogenase deficiency, X-linked lymphoproliferative syndrome (XLP), leukocyte adhesion deficiency, complement component deficiencies (including C1, C2, C3, C4, C5, C6, C7, C8 and/or C9 deficiencies), reticular dysgenesis, thymic alymphoplasia-aplasia, immunodeficiency with thymoma, severe congenital leukopenia, dysplasia with immunodeficiency, neonatal neutropenia, short limbed dwarfism, and Nezelof syndrome-combined immunodeficiency with Igs.

[0566] In a preferred embodiment, the immunodeficiencies and/or conditions associated with the immunodeficiencies recited above are treated, prevented, diagnosed and/or prognosed using polynucleotides, polypeptides, antibodies, and/or agonists or antagonists of the present invention.

[0567] In a preferred embodiment polynucleotides, polypeptides, antibodies, and/or agonists or antagonists of the present invention could be used as an agent to boost immunoresponsiveness among immunodeficient individuals. In specific embodiments, polynucleotides, polypeptides, antibodies, and/or agonists or antagonists of the present invention could be used as an agent to boost immunoresponsiveness among B cell and/or T cell immunodeficient individuals.

[0568] The polynucleotides, polypeptides, antibodies, and/or agonists or antagonists of the present invention may be useful in treating, preventing, diagnosing and/or prognosing autoimmune disorders. Many autoimmune disorders result from inappropriate recognition of self as foreign material by immune cells. This inappropriate recognition results in an immune response leading to the destruction of the host tissue. Therefore, the administration of polynucleotides and polypeptides of the invention that can inhibit an immune response, particularly the proliferation, differentiation, or chemotaxis of T-cells, may be an effective therapy in preventing autoimmune disorders.

[0569] Autoimmune diseases or disorders that may be treated, prevented, diagnosed and/or prognosed by polynucleotides, polypeptides, antibodies, and/or agonists or antagonists of the present invention include, but are not limited to, one or more of the following: systemic lupus erythematosus, rheumatoid arthritis, ankylosing spondylitis, multiple sclerosis, autoimmune thyroiditis, Hashimoto's thyroiditis, autoimmune hemolytic anemia, hemolytic anemia, thrombocytopenia, autoimmune thrombocytopenia purpura, autoimmune neonatal thrombocytopenia, idiopathic thrombocytopenia purpura, purpura (e.g., Henloch-Scoenlein purpura), autoimmunocytopenia, Goodpasture's syndrome, Pemphigus vulgaris, myasthenia gravis, Grave's disease (hyperthyroidism), and insulin-resistant diabetes mellitus.

[0570] Additional disorders that are likely to have an autoimmune component that may be treated, prevented, and/or diagnosed with the compositions of the invention include, but are not limited to, type II collagen-induced arthritis, antiphospholipid syndrome, dermatitis, allergic encephalomyelitis, myocarditis, relapsing polychondritis, rheumatic heart disease, neuritis, uveitis ophthalmia, polyendocrinopathies, Reiter's Disease, Stiff-Man Syndrome, autoimmune pulmonary inflammation, autism, Guillain-Barre Syndrome, insulin dependent diabetes mellitus, and autoimmune inflammatory eye disorders.

[0571] Additional disorders that are likely to have an autoimmune component that may be treated, prevented, diagnosed and/or prognosed with the compositions of the invention include, but are not limited to, scleroderma with anti-collagen antibodies (often characterized, e.g., by nucleolar and other nuclear antibodies), mixed connective tissue disease (often characterized, e.g., by antibodies to extractable nuclear antigens (e.g., ribonucleoprotein)), polymyositis (often characterized, e.g., by nonhistone ANA), pernicious anemia (often characterized, e.g., by antiparietal cell, microsomes, and intrinsic factor antibodies), idiopathic Addison's disease (often characterized, e.g., by humoral and cell-mediated adrenal cytotoxicity, infertility (often characterized, e.g., by antispermatozoal antibodies), glomerulonephritis (often characterized, e.g., by glomerular basement membrane antibodies or immune complexes), bullous pemphigoid (often characterized, e.g., by IgG and complement in basement membrane), Sjogren's syndrome (often characterized, e.g., by multiple tissue antibodies, and/or a specific nonhistone ANA (SS-B)), diabetes mellitus (often characterized, e.g., by cell-mediated and humoral islet cell antibodies), and adrenergic drug resistance (including adrenergic drug resistance with asthma or cystic fibrosis) (often characterized, e.g., by beta-adrenergic receptor antibodies).

[0572] Additional disorders that may have an autoimmune component that may be treated, prevented, diagnosed and/or prognosed with the compositions of the invention include, but are not limited to, chronic active hepatitis (often characterized, e.g., by smooth muscle antibodies), primary biliary cirrhosis (often characterized, e.g., by mitochondria antibodies), other endocrine gland failure (often characterized, e.g., by specific tissue antibodies in some cases), vitiligo (often characterized, e.g., by melanocyte antibodies), vasculitis (often characterized, e.g., by Ig and complement in vessel walls and/or low serum complement), post-MI (often characterized, e.g., by myocardial antibodies), cardiotomy syndrome (often characterized, e.g., by myocardial antibodies), urticaria (often characterized, e.g., by IgG and IgM antibodies to IgE), atopic dermatitis (often characterized, e.g., by IgG and IgM antibodies to IgE), asthma (often characterized, e.g., by IgG and IgM antibodies to IgE), and many other inflammatory, granulomatous, degenerative, and atrophic disorders.

[0573] In a preferred embodiment, the autoimmune diseases and disorders and/or conditions associated with the diseases and disorders recited above are treated, prevented, diagnosed and/or prognosed using for example, antagonists or agonists, polypeptides or polynucleotides, or antibodies of the present invention. In a specific preferred embodiment, rheumatoid arthritis is treated, prevented, and/or diagnosed using polynucleotides, polypeptides, antibodies, and/or agonists or antagonists of the present invention.

[0574] In another specific preferred embodiment, systemic lupus erythematosus is treated, prevented, and/or diagnosed using polynucleotides, polypeptides, antibodies, and/or agonists or antagonists of the present invention. In another specific preferred embodiment, idiopathic thrombocytopenia purpura is treated, prevented, and/or diagnosed using polynucleotides, polypeptides, antibodies, and/or agonists or antagonists of the present invention.

[0575] In another specific preferred embodiment IgA nephropathy is treated, prevented, and/or diagnosed using polynucleotides, polypeptides, antibodies, and/or agonists or antagonists of the present invention.

[0576] In a preferred embodiment, the autoimmune diseases and disorders and/or conditions associated with the diseases and disorders recited above are treated, prevented, diagnosed and/or prognosed using polynucleotides, polypeptides, antibodies, and/or agonists or antagonists of the present invention

[0577] In preferred embodiments, polypeptides, antibodies, polynucleotides and/or agonists or antagonists of the present invention are used as a immunosuppressive agent(s)

[0578] Polynucleotides, polypeptides, antibodies, and/or agonists or antagonists of the present invention may be useful in treating, preventing, prognosing, and/or diagnosing diseases, disorders, and/or conditions of hematopoietic cells. Polynucleotides, polypeptides, antibodies, and/or agonists or antagonists of the present invention could be used to increase differentiation and proliferation of hematopoietic cells, including the pluripotent stem cells, in an effort to treat or prevent those diseases, disorders, and/or conditions associated with a decrease in certain (or many) types hematopoietic cells, including but not limited to, leukopenia, neutropenia, anemia, and thrombocytopenia. Alternatively, Polynucleotides, polypeptides, antibodies, and/or agonists or antagonists of the present invention could be used to increase differentiation and proliferation of hematopoietic cells, including the pluripotent stem cells, in an effort to treat or prevent those diseases, disorders, and/or conditions associated with an increase in certain (or many) types of hematopoietic cells, including but not limited to, histiocytosis.

[0579] Allergic reactions and conditions, such as asthma (particularly allergic asthma) or other respiratory problems, may also be treated, prevented, diagnosed and/or prognosed using polypeptides, antibodies, or polynucleotides of the invention, and/or agonists or antagonists thereof. Moreover, these molecules can be used to treat, prevent, prognose, and/or diagnose anaphylaxis, hypersensitivity to an antigenic molecule, or blood group incompatibility.

[0580] Additionally, polypeptides or polynucleotides of the invention, and/or agonists or antagonists thereof, may be used to treat, prevent, diagnose and/or prognose IgE-mediated allergic reactions. Such allergic reactions include, but are not limited to, asthma, rhinitis, and eczema. In specific embodiments, polynucleotides, polypeptides, antibodies, and/or agonists or antagonists of the present invention may be used to modulate IgE concentrations in vitro or in vivo.

[0581] Moreover, polynucleotides, polypeptides, antibodies, and/or agonists or antagonists of the present invention have uses in the diagnosis, prognosis, prevention, and/or treatment of inflammatory conditions. For example, since polypeptides, antibodies, or polynucleotides of the invention, and/or agonists or antagonists of the invention may inhibit the activation, proliferation and/or differentiation of cells involved in an inflammatory response, these molecules can be used to prevent and/or treat chronic and acute inflammatory conditions. Such inflammatory conditions include, but are not limited to, for example, inflammation associated with infection (e.g., septic shock, sepsis, or systemic inflammatory response syndrome), ischemia-reperfusion injury, endotoxin lethality, complement-mediated hyperacute rejection, nephritis, cytokine or chemokine induced lung injury, inflammatory bowel disease, Crohn's disease, over production of cytokines (e.g., TNF or IL-1.), respiratory disorders (e.g., asthma and allergy); gastrointestinal disorders (e.g., inflammatory bowel disease); cancers (e.g., gastric, ovarian, lung, bladder, liver, and breast); CNS disorders (e.g., multiple sclerosis; ischemic brain injury and/or stroke, traumatic brain injury, neurodegenerative disorders (e.g., Parkinson's disease and Alzheimer's disease); AIDS-related dementia; and prion disease); cardiovascular disorders (e.g., atherosclerosis, myocarditis, cardiovascular disease, and cardiopulmonary bypass complications); as well as many additional diseases, conditions, and disorders that are characterized by inflammation (e.g., hepatitis, rheumatoid arthritis, gout, trauma, pancreatitis, sarcoidosis, dermatitis, renal ischemia-reperfusion injury, Grave's disease, systemic lupus erythematosus, diabetes mellitus, and allogenic transplant rejection).

[0582] Because inflammation is a fundamental defense mechanism, inflammatory disorders can effect virtually any tissue of the body. Accordingly, polynucleotides, polypeptides, and antibodies of the invention, as well as agonists or antagonists thereof have uses in the treatment of tissue-specific inflammatory disorders, including, but not limited to, adrenalitis, alveolitis, angiocholecystitis, appendicitis, balanitis, blepharitis, bronchitis, bursitis, carditis, cellulitis, cervicitis, cholecystitis, chorditis, cochlitis, colitis, conjunctivitis, cystitis, dermatitis, diverticulitis, encephalitis, endocarditis, esophagitis, eustachitis, fibrositis, folliculitis, gastritis, gastroenteritis, gingivitis, glossitis, hepatosplenitis, keratitis, labyrinthitis, laryngitis, lymphangitis, mastitis, media otitis, meningitis, metritis, mucitis, myocarditis, myosititis, myringitis, nephritis, neuritis, orchitis, osteochondritis, otitis, pericarditis, peritendonitis, peritonitis, pharyngitis, phlebitis, poliomyelitis, prostatitis, pulpitis, retinitis, rhinitis, salpingitis, scleritis, sclerochoroiditis, scrotitis, sinusitis, spondylitis, steatitis, stomatitis, synovitis, syringitis, tendonitis, tonsillitis, urethritis, and vaginitis.

[0583] In specific embodiments, polypeptides, antibodies, or polynucleotides of the invention, and/or agonists or antagonists thereof, are useful to diagnose, prognose, prevent, and/or treat organ transplant rejections and graft-versus-host disease. Organ rejection occurs by host immune cell destruction of the transplanted tissue through an immune response. Similarly, an immune response is also involved in GVHD, but, in this case, the foreign transplanted immune cells destroy the host tissues. Polypeptides, antibodies, or polynucleotides of the invention, and/or agonists or antagonists thereof, that inhibit an immune response, particularly the activation, proliferation, differentiation, or chemotaxis of T-cells, may be an effective therapy in preventing organ rejection or GVHD. In specific embodiments, polypeptides, antibodies, or polynucleotides of the invention, and/or agonists or antagonists thereof, that inhibit an immune response, particularly the activation, proliferation, differentiation, or chemotaxis of T-cells, may be an effective therapy in preventing experimental allergic and hyperacute xenograft rejection.

[0584] In other embodiments, polypeptides, antibodies, or polynucleotides of the invention, and/or agonists or antagonists thereof, are useful to diagnose, prognose, prevent, and/or treat immune complex diseases, including, but not limited to, serum sickness, post streptococcal glomerulonephritis, polyarteritis nodosa, and immune complex-induced vasculitis.

[0585] Polypeptides, antibodies, polynucleotides and/or agonists or antagonists of the invention can be used to treat, detect, and/or prevent infectious agents. For example, by increasing the immune response, particularly increasing the proliferation activation and/or differentiation of B and/or T cells, infectious diseases may be treated, detected, and/or prevented. The immune response may be increased by either enhancing an existing immune response, or by initiating a new immune response. Alternatively, polynucleotides, polypeptides, antibodies, and/or agonists or antagonists of the present invention may also directly inhibit the infectious agent (refer to section of application listing infectious agents, etc), without necessarily eliciting an immune response.

[0586] In another embodiment, polypeptides, antibodies, polynucleotides and/or agonists or antagonists of the present invention are used as a vaccine adjuvant that enhances immune responsiveness to an antigen. In a specific embodiment, polypeptides, antibodies, polynucleotides and/or agonists or antagonists of the present invention are used as an adjuvant to enhance tumor-specific immune responses.

[0587] In another specific embodiment, polypeptides, antibodies, polynucleotides and/or agonists or antagonists of the present invention are used as an adjuvant to enhance anti-viral immune responses. Anti-viral immune responses that may be enhanced using the compositions of the invention as an adjuvant, include virus and virus associated diseases or symptoms described herein or otherwise known in the art. In specific embodiments, the compositions of the invention are used as an adjuvant to enhance an immune response to a virus, disease, or symptom selected from the group consisting of: AIDS, meningitis, Dengue, EBV, and hepatitis (e.g., hepatitis B). In another specific embodiment, the compositions of the invention are used as an adjuvant to enhance an immune response to a virus, disease, or symptom selected from the group consisting of: HIV/AIDS, respiratory syncytial virus, Dengue, rotavirus, Japanese B encephalitis, influenza A and B, parainfluenza, measles, cytomegalovirus, rabies, Junin, Chikungunya, Rift Valley Fever, herpes simplex, and yellow fever.

[0588] In another specific embodiment, polypeptides, antibodies, polynucleotides and/or agonists or antagonists of the present invention are used as an adjuvant to enhance anti-bacterial or anti-fungal immune responses. Anti-bacterial or anti-fungal immune responses that may be enhanced using the compositions of the invention as an adjuvant, include bacteria or fungus and bacteria or fungus associated diseases or symptoms described herein or otherwise known in the art. In specific embodiments, the compositions of the invention are used as an adjuvant to enhance an immune response to a bacteria or fungus, disease, or symptom selected from the group consisting of: tetanus, Diphtheria, botulism, and meningitis type B.

[0589] In another specific embodiment, the compositions of the invention are used as an adjuvant to enhance an immune response to a bacteria or fungus, disease, or symptom selected from the group consisting of: Vibrio cholerae, Mycobacterium leprae, Salmonella typhi, Salmonella paratyphi, Meisseria meningitidis, Streptococcus pneumoniae, Group B streptococcus, Shigella spp., Enterotoxigenic Escherichia coli, Enterohemorrhagic E. coli, and Borrelia burgdorferi.

[0590] In another specific embodiment, polypeptides, antibodies, polynucleotides and/or agonists or antagonists of the present invention are used as an adjuvant to enhance anti-parasitic immune responses. Anti-parasitic immune responses that may be enhanced using the compositions of the invention as an adjuvant, include parasite and parasite associated diseases or symptoms described herein or otherwise known in the art. In specific embodiments, the compositions of the invention are used as an adjuvant to enhance an immune response to a parasite. In another specific embodiment, the compositions of the invention are used as an adjuvant to enhance an immune response to Plasmodium (malaria) or Leishmania.

[0591] In another specific embodiment, polypeptides, antibodies, polynucleotides and/or agonists or antagonists of the present invention may also be employed to treat infectious diseases including silicosis, sarcoidosis, and idiopathic pulmonary fibrosis; for example, by preventing the recruitment and activation of mononuclear phagocytes.

[0592] In another specific embodiment, polypeptides, antibodies, polynucleotides and/or agonists or antagonists of the present invention are used as an antigen for the generation of antibodies to inhibit or enhance immune mediated responses against polypeptides of the invention.

[0593] In one embodiment, polypeptides, antibodies, polynucleotides and/or agonists or antagonists of the present invention are administered to an animal (e.g., mouse, rat, rabbit, hamster, guinea pig, pigs, micro-pig, chicken, camel, goat, horse, cow, sheep, dog, cat, non-human primate, and human, most preferably human) to boost the immune system to produce increased quantities of one or more antibodies (e.g., IgG, IgA, IgM, and IgE), to induce higher affinity antibody production and immunoglobulin class switching (e.g., IgG, IgA, IgM, and IgE), and/or to increase an immune response.

[0594] In another specific embodiment, polypeptides, antibodies, polynucleotides and/or agonists or antagonists of the present invention are used as a stimulator of B cell responsiveness to pathogens.

[0595] In another specific embodiment, polypeptides, antibodies, polynucleotides and/or agonists or antagonists of the present invention are used as an activator of T cells.

[0596] In another specific embodiment, polypeptides, antibodies, polynucleotides and/or agonists or antagonists of the present invention are used as an agent that elevates the immune status of an individual prior to their receipt of immunosuppressive therapies.

[0597] In another specific embodiment, polypeptides, antibodies, polynucleotides and/or agonists or antagonists of the present invention are used as an agent to induce higher affinity antibodies.

[0598] In another specific embodiment, polypeptides, antibodies, polynucleotides and/or agonists or antagonists of the present invention are used as an agent to increase serum immunoglobulin concentrations.

[0599] In another specific embodiment, polypeptides, antibodies, polynucleotides and/or agonists or antagonists of the present invention are used as an agent to accelerate recovery of immunocompromised individuals.

[0600] In another specific embodiment, polypeptides, antibodies, polynucleotides and/or agonists or antagonists of the present invention are used as an agent to boost immunoresponsiveness among aged populations and/or neonates.

[0601] In another specific embodiment, polypeptides, antibodies, polynucleotides and/or agonists or antagonists of the present invention are used as an immune system enhancer prior to, during, or after bone marrow transplant and/or other transplants (e.g., allogeneic or xenogeneic organ transplantation). With respect to transplantation, compositions of the invention may be administered prior to, concomitant with, and/or after transplantation. In a specific embodiment, compositions of the invention are administered after transplantation, prior to the beginning of recovery of T-cell populations. In another specific embodiment, compositions of the invention are first administered after transplantation after the beginning of recovery of T cell populations, but prior to full recovery of B cell populations.

[0602] In another specific embodiment, polypeptides, antibodies, polynucleotides and/or agonists or antagonists of the present invention are used as an agent to boost immunoresponsiveness among individuals having an acquired loss of B cell function. Conditions resulting in an acquired loss of B cell function that may be ameliorated or treated by administering the polypeptides, antibodies, polynucleotides and/or agonists or antagonists thereof, include, but are not limited to, HIV Infection, AIDS, bone marrow transplant, and B cell chronic lymphocytic leukemia (CLL).

[0603] In another specific embodiment, polypeptides, antibodies, polynucleotides and/or agonists or antagonists of the present invention are used as an agent to boost immunoresponsiveness among individuals having a temporary immune deficiency. Conditions resulting in a temporary immune deficiency that may be ameliorated or treated by administering the polypeptides, antibodies, polynucleotides and/or agonists or antagonists thereof, include, but are not limited to, recovery from viral infections (e.g., influenza), conditions associated with malnutrition, recovery from infectious mononucleosis, or conditions associated with stress, recovery from measles, recovery from blood transfusion, and recovery from surgery.

[0604] In another specific embodiment, polypeptides, antibodies, polynucleotides and/or agonists or antagonists of the present invention are used as a regulator of antigen presentation by monocytes, dendritic cells, and/or B-cells. In one embodiment, polynucleotides, polypeptides, antibodies, and/or agonists or antagonists of the present invention enhance antigen presentation or antagonizes antigen presentation in vitro or in vivo. Moreover, in related embodiments, said enhancement or antagonism of antigen presentation may be useful as an anti-tumor treatment or to modulate the immune system.

[0605] In another specific embodiment, polypeptides, antibodies, polynucleotides and/or agonists or antagonists of the present invention are used as an agent to direct an individual's immune system towards development of a humoral response (i.e. TH2) as opposed to a TH1 cellular response.

[0606] In another specific embodiment, polypeptides, antibodies, polynucleotides and/or agonists or antagonists of the present invention are used as a means to induce tumor proliferation and thus make it more susceptible to anti-neoplastic agents. For example, multiple myeloma is a slowly dividing disease and is thus refractory to virtually all anti-neoplastic regimens. If these cells were forced to proliferate more rapidly their susceptibility profile would likely change.

[0607] In another specific embodiment, polypeptides, antibodies, polynucleotides and/or agonists or antagonists of the present invention are used as a stimulator of B cell production in pathologies such as AIDS, chronic lymphocyte disorder and/or Common Variable Immunodificiency.

[0608] In another specific embodiment, polypeptides, antibodies, polynucleotides and/or agonists or antagonists of the present invention are used as a therapy for generation and/or regeneration of lymphoid tissues following surgery, trauma or genetic defect. In another specific embodiment, polypeptides, antibodies, polynucleotides and/or agonists or antagonists of the present invention are used in the pretreatment of bone marrow samples prior to transplant.

[0609] In another specific embodiment, polypeptides, antibodies, polynucleotides and/or agonists or antagonists of the present invention are used as a gene-based therapy for genetically inherited disorders resulting in immuno-incompetence/immunodeficiency such as observed among SCID patients.

[0610] In another specific embodiment, polypeptides, antibodies, polynucleotides and/or agonists or antagonists of the present invention are used as a means of activating monocytes/macrophages to defend against parasitic diseases that effect monocytes such as Leishmania.

[0611] In another specific embodiment, polypeptides, antibodies, polynucleotides and/or agonists or antagonists of the present invention are used as a means of regulating secreted cytokines that are elicited by polypeptides of the invention.

[0612] In another embodiment, polypeptides, antibodies, polynucleotides and/or agonists or antagonists of the present invention are used in one or more of the applications described herein, as they may apply to veterinary medicine.

[0613] In another specific embodiment, polypeptides, antibodies, polynucleotides and/or agonists or antagonists of the present invention are used as a means of blocking various aspects of immune responses to foreign agents or self. Examples of diseases or conditions in which blocking of certain aspects of immune responses may be desired include autoimmune disorders such as lupus, and arthritis, as well as immunoresponsiveness to skin allergies, inflammation, bowel disease, injury and diseases/disorders associated with pathogens.

[0614] In another specific embodiment, polypeptides, antibodies, polynucleotides and/or agonists or antagonists of the present invention are used as a therapy for preventing the B cell proliferation and Ig secretion associated with autoimmune diseases such as idiopathic thrombocytopenic purpura, systemic lupus erythematosus and multiple sclerosis.

[0615] In another specific embodiment, polypeptides, antibodies, polynucleotides and/or agonists or antagonists of the present invention are used as a inhibitor of B and/or T cell migration in endothelial cells. This activity disrupts tissue architecture or cognate responses and is useful, for example in disrupting immune responses, and blocking sepsis.

[0616] In another specific embodiment, polypeptides, antibodies, polynucleotides and/or agonists or antagonists of the present invention are used as a therapy for chronic hypergammaglobulinemia evident in such diseases as monoclonal gammopathy of undetermined significance (MGUS), Waldenstrom's disease, related idiopathic monoclonal gammopathies, and plasmacytomas.

[0617] In another specific embodiment, polypeptides, antibodies, polynucleotides and/or agonists or antagonists of the present invention may be employed for instance to inhibit polypeptide chemotaxis and activation of macrophages and their precursors, and of neutrophils, basophils, B lymphocytes and some T-cell subsets, e.g., activated and CD8 cytotoxic T cells and natural killer cells, in certain autoimmune and chronic inflammatory and infective diseases. Examples of autoimmune diseases are described herein and include multiple sclerosis, and insulin-dependent diabetes.

[0618] The polypeptides, antibodies, polynucleotides and/or agonists or antagonists of the present invention may also be employed to treat idiopathic hyper-eosinophilic syndrome by, for example, preventing eosinophil production and migration.

[0619] In another specific embodiment, polypeptides, antibodies, polynucleotides and/or agonists or antagonists of the present invention are used to enhance or inhibit complement mediated cell lysis.

[0620] In another specific embodiment, polypeptides, antibodies, polynucleotides and/or agonists or antagonists of the present invention are used to enhance or inhibit antibody dependent cellular cytotoxicity.

[0621] In another specific embodiment, polypeptides, antibodies, polynucleotides and/or agonists or antagonists of the present invention may also be employed for treating atherosclerosis, for example, by preventing monocyte infiltration in the artery wall.

[0622] In another specific embodiment, polypeptides, antibodies, polynucleotides and/or agonists or antagonists of the present invention may be employed to treat adult respiratory distress syndrome (ARDS).

[0623] In another specific embodiment, polypeptides, antibodies, polynucleotides and/or agonists or antagonists of the present invention may be useful for stimulating wound and tissue repair, stimulating angiogenesis, and/or stimulating the repair of vascular or lymphatic diseases or disorders. Additionally, agonists and antagonists of the invention may be used to stimulate the regeneration of mucosal surfaces.

[0624] In a specific embodiment, polynucleotides or polypeptides, and/or agonists thereof are used to diagnose, prognose, treat, and/or prevent a disorder characterized by primary or acquired immunodeficiency, deficient serum immunoglobulin production, recurrent infections, and/or immune system dysfunction. Moreover, polynucleotides or polypeptides, and/or agonists thereof may be used to treat or prevent infections of the joints, bones, skin, and/or parotid glands, blood-borne infections (e.g., sepsis, meningitis, septic arthritis, and/or osteomyelitis), autoimmune diseases (e.g., those disclosed herein), inflammatory disorders, and malignancies, and/or any disease or disorder or condition associated with these infections, diseases, disorders and/or malignancies) including, but not limited to, CVID, other primary immune deficiencies, HIV disease, CLL, recurrent bronchitis, sinusitis, otitis media, conjunctivitis, pneumonia, hepatitis, meningitis, herpes zoster (e.g., severe herpes zoster), and/or pneumocystis carnii. Other diseases and disorders that may be prevented, diagnosed, prognosed, and/or treated with polynucleotides or polypeptides, and/or agonists of the present invention include, but are not limited to, HIV infection, HTLV-BLV infection, lymphopenia, phagocyte bactericidal dysfunction anemia, thrombocytopenia, and hemoglobinuria.

[0625] In another embodiment, polynucleotides, polypeptides, antibodies, and/or agonists or antagonists of the present invention are used to treat, and/or diagnose an individual having common variable immunodeficiency disease (“CVID”; also known as “acquired agammaglobulinemia” and “acquired hypogammaglobulinemia”) or a subset of this disease.

[0626] In a specific embodiment, polynucleotides, polypeptides, antibodies, and/or agonists or antagonists of the present invention may be used to diagnose, prognose, prevent, and/or treat cancers or neoplasms including immune cell or immune tissue-related cancers or neoplasms. Examples of cancers or neoplasms that may be prevented, diagnosed, or treated by polynucleotides, polypeptides, antibodies, and/or agonists or antagonists of the present invention include, but are not limited to, acute myelogenous leukemia, chronic myelogenous leukemia, Hodgkin's disease, non-Hodgkin's lymphoma, acute lymphocytic anemia (ALL) Chronic lymphocyte leukemia, plasmacytomas, multiple myeloma, Burkitt's lymphoma, EBV-transformed diseases, and/or diseases and disorders described in the section entitled “Hyperproliferative Disorders” elsewhere herein.

[0627] In another specific embodiment, polypeptides, antibodies, polynucleotides and/or agonists or antagonists of the present invention are used as a therapy for decreasing cellular proliferation of Large B-cell Lymphomas.

[0628] In another specific embodiment, polypeptides, antibodies, polynucleotides and/or agonists or antagonists of the present invention are used as a means of decreasing the involvement of B cells and Ig associated with Chronic Myelogenous Leukemia.

[0629] In specific embodiments, the compositions of the invention are used as an agent to boost immunoresponsiveness among B cell immunodeficient individuals, such as, for example, an individual who has undergone a partial or complete splenectomy.

[0630] Antagonists of the invention include, for example, binding and/or inhibitory antibodies, antisense nucleic acids, ribozymes or soluble forms of the polypeptides of the present invention (e.g., Fc fusion protein; see, e.g., Example 9). Agonists of the invention include, for example, binding or stimulatory antibodies, and soluble forms of the polypeptides (e.g., Fc fusion proteins; see, e.g., Example 9). polypeptides, antibodies, polynucleotides and/or agonists or antagonists of the present invention may be employed in a composition with a pharmaceutically acceptable carrier, e.g., as described herein.

[0631] In another embodiment, polypeptides, antibodies, polynucleotides and/or agonists or antagonists of the present invention are administered to an animal (including, but not limited to, those listed above, and also including transgenic animals) incapable of producing functional endogenous antibody molecules or having an otherwise compromised endogenous immune system, but which is capable of producing human immunoglobulin molecules by means of a reconstituted or partially reconstituted immune system from another animal (see, e.g., published PCT Application Nos. WO98/24893, WO/9634096, WO/9633735, and WO/9110741). Administration of polypeptides, antibodies, polynucleotides and/or agonists or antagonists of the present invention to such animals is useful for the generation of monoclonal antibodies against the polypeptides, antibodies, polynucleotides and/or agonists or antagonists of the present invention.

Blood-Related Disorders

[0632] The polynucleotides, polypeptides, antibodies, and/or agonists or antagonists of the present invention may be used to modulate hemostatic (the stopping of bleeding) or thrombolytic (clot dissolving) activity. For example, by increasing hemostatic or thrombolytic activity, polynucleotides or polypeptides, and/or agonists or antagonists of the present invention could be used to treat or prevent blood coagulation diseases, disorders, and/or conditions (e.g., afibrinogenemia, factor deficiencies, hemophilia), blood platelet diseases, disorders, and/or conditions (e.g., thrombocytopenia), or wounds resulting from trauma, surgery, or other causes. Alternatively, polynucleotides, polypeptides, antibodies, and/or agonists or antagonists of the present invention that can decrease hemostatic or thrombolytic activity could be used to inhibit or dissolve clotting. These molecules could be important in the treatment or prevention of heart attacks (infarction), strokes, or scarring.

[0633] In specific embodiments, the polynucleotides, polypeptides, antibodies, and/or agonists or antagonists of the present invention may be used to prevent, diagnose, prognose, and/or treat thrombosis, arterial thrombosis, venous thrombosis, thromboembolism, pulmonary embolism, atherosclerosis, myocardial infarction, transient ischemic attack, unstable angina. In specific embodiments, the polynucleotides, polypeptides, antibodies, and/or agonists or antagonists of the present invention may be used for the prevention of occulsion of saphenous grafts, for reducing the risk of periprocedural thrombosis as might accompany angioplasty procedures, for reducing the risk of stroke in patients with atrial fibrillation including nonrheumatic atrial fibrillation, for reducing the risk of embolism associated with mechanical heart valves and or mitral valves disease. Other uses for the polynucleotides, polypeptides, antibodies, and/or agonists or antagonists of the present invention, include, but are not limited to, the prevention of occlusions in extrcorporeal devices (e.g., intravascular canulas, vascular access shunts in hemodialysis patients, hemodialysis machines, and cardiopulmonary bypass machines).

[0634] In another embodiment, a polypeptide of the invention, or polynucleotides, antibodies, agonists, or antagonists corresponding to that polypeptide, may be used to prevent, diagnose, prognose, and/or treat diseases and disorders of the blood and/or blood forming organs associated with the tissue(s) in which the polypeptide of the invention is expressed, including one, two, three, four, five, or more tissues disclosed in Table 1B, column 8 (Tissue Distribution Library Code).

[0635] The polynucleotides, polypeptides, antibodies, and/or agonists or antagonists of the present invention may be used to modulate hematopoietic activity (the formation of blood cells). For example, the polynucleotides, polypeptides, antibodies, and/or agonists or antagonists of the present invention may be used to increase the quantity of all or subsets of blood cells, such as, for example, erythrocytes, lymphocytes (B or T cells), myeloid cells (e.g., basophils, eosinophils, neutrophils, mast cells, macrophages) and platelets. The ability to decrease the quantity of blood cells or subsets of blood cells may be useful in the prevention, detection, diagnosis and/or treatment of anemias and leukopenias described below. Alternatively, the polynucleotides, polypeptides, antibodies, and/or agonists or antagonists of the present invention may be used to decrease the quantity of all or subsets of blood cells, such as, for example, erythrocytes, lymphocytes (B or T cells), myeloid cells (e.g., basophils, eosinophils, neutrophils, mast cells, macrophages) and platelets. The ability to decrease the quantity of blood cells or subsets of blood cells may be useful in the prevention, detection, diagnosis and/or treatment of leukocytoses, such as, for example eosinophilia.

[0636] The polynucleotides, polypeptides, antibodies, and/or agonists or antagonists of the present invention may be used to prevent, treat, or diagnose blood dyscrasia.

[0637] Anemias are conditions in which the number of red blood cells or amount of hemoglobin (the protein that carries oxygen) in them is below normal. Anemia may be caused by excessive bleeding, decreased red blood cell production, or increased red blood cell destruction (hemolysis). The polynucleotides, polypeptides, antibodies, and/or agonists or antagonists of the present invention may be useful in treating, preventing, and/or diagnosing anemias. Anemias that may be treated prevented or diagnosed by the polynucleotides, polypeptides, antibodies, and/or agonists or antagonists of the present invention include iron deficiency anemia, hypochromic anemia, microcytic anemia, chlorosis, hereditary siderob; astic anemia, idiopathic acquired sideroblastic anemia, red cell aplasia, megaloblastic anemia (e.g., pernicious anemia, (vitamin B12 deficiency) and folic acid deficiency anemia), aplastic anemia, hemolytic anemias (e.g., autoimmune helolytic anemia, microangiopathic hemolytic anemia, and paroxysmal nocturnal hemoglobinuria). The polynucleotides, polypeptides, antibodies, and/or agonists or antagonists of the present invention may be useful in treating, preventing, and/or diagnosing anemias associated with diseases including but not limited to, anemias associated with systemic lupus erythematosus, cancers, lymphomas, chronic renal disease, and enlarged spleens. The polynucleotides, polypeptides, antibodies, and/or agonists or antagonists of the present invention may be useful in treating, preventing, and/or diagnosing anemias arising from drug treatments such as anemias associated with methyldopa, dapsone, and/or sulfadrugs. Additionally, rhe polynucleotides, polypeptides, antibodies, and/or agonists or antagonists of the present invention may be useful in treating, preventing, and/or diagnosing anemias associated with abnormal red blood cell architecture including but not limited to, hereditary spherocytosis, hereditary elliptocytosis, glucose-6-phosphate dehydrogenase deficiency, and sickle cell anemia.

[0638] The polynucleotides, polypeptides, antibodies, and/or agonists or antagonists of the present invention may be useful in treating, preventing, and/or diagnosing hemoglobin abnormalities, (e.g., those associated with sickle cell anemia, hemoglobin C disease, hemoglobin S-C disease, and hemoglobin E disease). Additionally, the polynucleotides, polypeptides, antibodies, and/or agonists or antagonists of the present invention may be useful in diagnosing, prognosing, preventing, and/or treating thalassemias, including, but not limited to major and minor forms of alpha-thalassemia and beta-thalassemia.

[0639] In another embodiment, the polynucleotides, polypeptides, antibodies, and/or agonists or antagonists of the present invention may be useful in diagnosing, prognosing, preventing, and/or treating bleeding disorders including, but not limited to, thrombocytopenia (e.g., idiopathic thrombocytopenic purpura, and thrombotic thrombocytopenic purpura), Von Willebrand's disease, hereditary platelet disorders (e.g., storage pool disease such as Chediak-Higashi and Hermansky-Pudlak syndromes, thromboxane A2 dysfunction, thromboasthenia, and Bernard-Soulier syndrome), hemolytic-uremic syndrome, hemophelias such as hemophelia A or Factor VII deficiency and Christmas disease or Factor IX deficiency, Hereditary Hemorhhagic Telangiectsia, also known as Rendu-Osler-Weber syndrome, allergic purpura (Henoch Schonlein purpura) and disseminated intravascular coagulation.

[0640] The effect of the polynucleotides, polypeptides, antibodies, and/or agonists or antagonists of the present invention on the clotting time of blood may be monitored using any of the clotting tests known in the art including, but not limited to, whole blood partial thromboplastin time (PTT), the activated partial thromboplastin time (aPTT), the activated clotting time (ACT), the recalcified activated clotting time, or the Lee-White Clotting time.

[0641] Several diseases and a variety of drugs can cause platelet dysfunction. Thus, in a specific embodiment, the polynucleotides, polypeptides, antibodies, and/or agonists or antagonists of the present invention may be useful in diagnosing, prognosing, preventing, and/or treating acquired platelet dysfunction such as platelet dysfunction accompanying kidney failure, leukemia, multiple myeloma, cirrhosis of the liver, and systemic lupus erythematosus as well as platelet dysfunction associated with drug treatments, including treatment with aspirin, ticlopidine, nonsteroidal anti-inflammatory drugs (used for arthritis, pain, and sprains), and penicillin in high doses.

[0642] In another embodiment, the polynucleotides, polypeptides, antibodies, and/or agonists or antagonists of the present invention may be useful in diagnosing, prognosing, preventing, and/or treating diseases and disorders characterized by or associated with increased or decreased numbers of white blood cells. Leukopenia occurs when the number of white blood cells decreases below normal. Leukopenias include, but are not limited to, neutropenia and lymphocytopenia. An increase in the number of white blood cells compared to normal is known as leukocytosis. The body generates increased numbers of white blood cells during infection. Thus, leukocytosis may simply be a normal physiological parameter that reflects infection. Alternatively, leukocytosis may be an indicator of injury or other disease such as cancer. Leokocytoses, include but are not limited to, eosinophilia, and accumulations of macrophages. In specific embodiments, the polynucleotides, polypeptides, antibodies, and/or agonists or antagonists of the present invention may be useful in diagnosing, prognosing, preventing, and/or treating leukopenia. In other specific embodiments, the polynucleotides, polypeptides, antibodies, and/or agonists or antagonists of the present invention may be useful in diagnosing, prognosing, preventing, and/or treating leukocytosis.

[0643] Leukopenia may be a generalized decreased in all types of white blood cells, or may be a specific depletion of particular types of white blood cells. Thus, in specific embodiments, the polynucleotides, polypeptides, antibodies, and/or agonists or antagonists of the present invention may be useful in diagnosing, prognosing, preventing, and/or treating decreases in neutrophil numbers, known as neutropenia. Neutropenias that may be diagnosed, prognosed, prevented, and/or treated by the polynucleotides, polypeptides, antibodies, and/or agonists or antagonists of the present invention include, but are not limited to, infantile genetic agranulocytosis, familial neutropenia, cyclic neutropenia, neutropenias resulting from or associated with dietary deficiencies (e.g., vitamin B 12 deficiency or folic acid deficiency), neutropenias resulting from or associated with drug treatments (e.g., antibiotic regimens such as penicillin treatment, sulfonamide treatment, anticoagulant treatment, anticonvulsant drugs, anti-thyroid drugs, and cancer chemotherapy), and neutropenias resulting from increased neutrophil destruction that may occur in association with some bacterial or viral infections, allergic disorders, autoimmune diseases, conditions in which an individual has an enlarged spleen (e.g., Felty syndrome, malaria and sarcoidosis), and some drug treatment regimens.

[0644] The polynucleotides, polypeptides, antibodies, and/or agonists or antagonists of the present invention may be useful in diagnosing, prognosing, preventing, and/or treating lymphocytopenias (decreased numbers of B and/or T lymphocytes), including, but not limited lymphocytopenias resulting from or associated with stress, drug treatments (e.g., drug treatment with corticosteroids, cancer chemotherapies, and/or radiation therapies), AIDS infection and/or other diseases such as, for example, cancer, rheumatoid arthritis, systemic lupus erythematosus, chronic infections, some viral infections and/or hereditary disorders (e.g., DiGeorge syndrome, Wiskott-Aldrich Syndome, severe combined immunodeficiency, ataxia telangiectsia).

[0645] The polynucleotides, polypeptides, antibodies, and/or agonists or antagonists of the present invention may be useful in diagnosing, prognosing, preventing, and/or treating diseases and disorders associated with macrophage numbers and/or macrophage function including, but not limited to, Gaucher's disease, Niemann-Pick disease, Letterer-Siwe disease and Hand-Schuller-Christian disease.

[0646] In another embodiment, the polynucleotides, polypeptides, antibodies, and/or agonists or antagonists of the present invention may be useful in diagnosing, prognosing, preventing, and/or treating diseases and disorders associated with eosinophil numbers and/or eosinophil function including, but not limited to, idiopathic hypereosinophilic syndrome, eosinophilia-myalgia syndrome, and Hand-Schuller-Christian disease.

[0647] In yet another embodiment, the polynucleotides, polypeptides, antibodies, and/or agonists or antagonists of the present invention may be useful in diagnosing, prognosing, preventing, and/or treating leukemias and lymphomas including, but not limited to, acute lymphocytic (lymphpblastic) leukemia (ALL), acute myeloid (myelocytic, myelogenous, myeloblastic, or myelomonocytic) leukemia, chronic lymphocytic leukemia (e.g., B cell leukemias, T cell leukemias, Sezary syndrome, and Hairy cell leukenia), chronic myelocytic (myeloid, myelogenous, or granulocytic) leukemia, Hodgkin's lymphoma, non-hodgkin's lymphoma, Burkitt's lymphoma, and mycosis fungoides.

[0648] In other embodiments, the polynucleotides, polypeptides, antibodies, and/or agonists or antagonists of the present invention may be useful in diagnosing, prognosing, preventing, and/or treating diseases and disorders of plasma cells including, but not limited to, plasma cell dyscrasias, monoclonal gammaopathies, monoclonal gammopathies of undetermined significance, multiple myeloma, macroglobulinemia, Waldenstrom's macroglobulinemia, cryoglobulinemia, and Raynaud's phenomenon.

[0649] In other embodiments, the polynucleotides, polypeptides, antibodies, and/or agonists or antagonists of the present invention may be useful in treating, preventing, and/or diagnosing myeloproliferative disorders, including but not limited to, polycythemia vera, relative polycythemia, secondary polycythemia, myelofibrosis, acute myelofibrosis, agnogenic myelod metaplasia, thrombocythemia, (including both primary and seconday thrombocythemia) and chronic myelocytic leukemia.

[0650] In other embodiments, the polynucleotides, polypeptides, antibodies, and/or agonists or antagonists of the present invention may be useful as a treatment prior to surgery, to increase blood cell production.

[0651] In other embodiments, the polynucleotides, polypeptides, antibodies, and/or agonists or antagonists of the present invention may be useful as an agent to enhance the migration, phagocytosis, superoxide production, antibody dependent cellular cytotoxicity of neutrophils, eosionophils and macrophages.

[0652] In other embodiments, the polynucleotides, polypeptides, antibodies, and/or agonists or antagonists of the present invention may be useful as an agent to increase the number of stem cells in circulation prior to stem cells pheresis. In another specific embodiment, the polynucleotides, polypeptides, antibodies, and/or agonists or antagonists of the present invention may be useful as an agent to increase the number of stem cells in circulation prior to platelet pheresis.

[0653] In other embodiments, the polynucleotides, polypeptides, antibodies, and/or agonists or antagonists of the present invention may be useful as an agent to increase cytokine production.

[0654] In other embodiments, the polynucleotides, polypeptides, antibodies, and/or agonists or antagonists of the present invention may be useful in preventing, diagnosing, and/or treating primary hematopoietic disorders.

Hyperproliferative Disorders

[0655] In certain embodiments, polynucleotides or polypeptides, or agonists or antagonists of the present invention can be used to treat or detect hyperproliferative disorders, including neoplasms. Polynucleotides or polypeptides, or agonists or antagonists of the present invention may inhibit the proliferation of the disorder through direct or indirect interactions. Alternatively, Polynucleotides or polypeptides, or agonists or antagonists of the present invention may proliferate other cells which can inhibit the hyperproliferative disorder.

[0656] For example, by increasing an immune response, particularly increasing antigenic qualities of the hyperproliferative disorder or by proliferating, differentiating, or mobilizing T-cells, hyperproliferative disorders can be treated. This immune response may be increased by either enhancing an existing immune response, or by initiating a new immune response. Alternatively, decreasing an immune response may also be a method of treating hyperproliferative disorders, such as a chemotherapeutic agent.

[0657] Examples of hyperproliferative disorders that can be treated or detected by polynucleotides or polypeptides, or agonists or antagonists of the present invention include, but are not limited to neoplasms located in the: colon, abdomen, bone, breast, digestive system, liver, pancreas, peritoneum, endocrine glands (adrenal, parathyroid, pituitary, testicles, ovary, thymus, thyroid), eye, head and neck, nervous (central and peripheral), lymphatic system, pelvis, skin, soft tissue, spleen, thorax, and urogenital tract.

[0658] Similarly, other hyperproliferative disorders can also be treated or detected by polynucleotides or polypeptides, or agonists or antagonists of the present invention. Examples of such hyperproliferative disorders include, but are not limited to: Acute Childhood Lymphoblastic Leukemia, Acute Lymphoblastic Leukemia, Acute Lymphocytic Leukemia, Acute Myeloid Leukemia, Adrenocortical Carcinoma, Adult (Primary) Hepatocellular Cancer, Adult (Primary) Liver Cancer, Adult Acute Lymphocytic Leukemia, Adult Acute Myeloid Leukemia, Adult Hodgkin's Disease, Adult Hodgkin's Lymphoma, Adult Lymphocytic Leukemia, Adult Non-Hodgkin's Lymphoma, Adult Primary Liver Cancer, Adult Soft Tissue Sarcoma, AIDS-Related Lymphoma, AIDS-Related Malignancies, Anal Cancer, Astrocytoma, Bile Duct Cancer, Bladder Cancer, Bone Cancer, Brain Stem Glioma, Brain Tumors, Breast Cancer, Cancer of the Renal Pelvis and Ureter, Central Nervous System (Primary) Lymphoma, Central Nervous System Lymphoma, Cerebellar Astrocytoma, Cerebral Astrocytoma, Cervical Cancer, Childhood (Primary) Hepatocellular Cancer, Childhood (Primary) Liver Cancer, Childhood Acute Lymphoblastic Leukemia, Childhood Acute Myeloid Leukemia, Childhood Brain Stem Glioma, Childhood Cerebellar Astrocytoma, Childhood Cerebral Astrocytoma, Childhood Extracranial Germ Cell Tumors, Childhood Hodgkin's Disease, Childhood Hodgkin's Lymphoma, Childhood Hypothalamic and Visual Pathway Glioma, Childhood Lymphoblastic Leukemia, Childhood Medulloblastoma, Childhood Non-Hodgkin's Lymphoma, Childhood Pineal and Supratentorial Primitive Neuroectodermal Tumors, Childhood Primary Liver Cancer, Childhood Rhabdomyosarcoma, Childhood Soft Tissue Sarcoma, Childhood Visual Pathway and Hypothalamic Glioma, Chronic Lymphocytic Leukemia, Chronic Myelogenous Leukemia, Colon Cancer, Cutaneous T-Cell Lymphoma, Endocrine Pancreas Islet Cell Carcinoma, Endometrial Cancer, Ependymoma, Epithelial Cancer, Esophageal Cancer, Ewing's Sarcoma and Related Tumors, Exocrine Pancreatic Cancer, Extracranial Germ Cell Tumor, Extragonadal Germ Cell Tumor, Extrahepatic Bile Duct Cancer, Eye Cancer, Female Breast Cancer, Gaucher's Disease, Gallbladder Cancer, Gastric Cancer, Gastrointestinal Carcinoid Tumor, Gastrointestinal Tumors, Germ Cell Tumors, Gestational Trophoblastic Tumor, Hairy Cell Leukemia, Head and Neck Cancer, Hepatocellular Cancer, Hodgkin's Disease, Hodgkin's Lymphoma, Hypergammaglobulinemia, Hypopharyngeal Cancer, Intestinal Cancers, Intraocular Melanoma, Islet Cell Carcinoma, Islet Cell Pancreatic Cancer, Kaposi's Sarcoma, Kidney Cancer, Laryngeal Cancer, Lip and Oral Cavity Cancer, Liver Cancer, Lung Cancer, Lymphoproliferative Disorders, Macroglobulinemia, Male Breast Cancer, Malignant Mesothelioma, Malignant Thymoma, Medulloblastoma, Melanoma, Mesothelioma, Metastatic Occult Primary Squamous Neck Cancer, Metastatic Primary Squamous Neck Cancer, Metastatic Squamous Neck Cancer, Multiple Myeloma, Multiple Myeloma/Plasma Cell Neoplasm, Myelodysplastic Syndrome, Myelogenous Leukemia, Myeloid Leukemia, Myeloproliferative Disorders, Nasal Cavity and Paranasal Sinus Cancer, Nasopharyngeal Cancer, Neuroblastoma, Non-Hodgkin's Lymphoma During Pregnancy, Nonmelanoma Skin Cancer, Non-Small Cell Lung Cancer, Occult Primary Metastatic Squamous Neck Cancer, Oropharyngeal Cancer, Osteo-/Malignant Fibrous Sarcoma, Osteosarcoma/Malignant Fibrous Histiocytoma, Osteosarcoma/Malignant Fibrous Histiocytoma of Bone, Ovarian Epithelial Cancer, Ovarian Germ Cell Tumor, Ovarian Low Malignant Potential Tumor, Pancreatic Cancer, Paraproteinemias, Purpura, Parathyroid Cancer, Penile Cancer, Pheochromocytoma, Pituitary Tumor, Plasma Cell Neoplasm/Multiple Myeloma, Primary Central Nervous System Lymphoma, Primary Liver Cancer, Prostate Cancer, Rectal Cancer, Renal Cell Cancer, Renal Pelvis and Ureter Cancer, Retinoblastoma, Rhabdomyosarcoma, Salivary Gland Cancer, Sarcoidosis Sarcomas, Sezary Syndrome, Skin Cancer, Small Cell Lung Cancer, Small Intestine Cancer, Soft Tissue Sarcoma, Squamous Neck Cancer, Stomach Cancer, Supratentorial Primitive Neuroectodermal and Pineal Tumors, T-Cell Lymphoma, Testicular Cancer, Thymoma, Thyroid Cancer, Transitional Cell Cancer of the Renal Pelvis and Ureter, Transitional Renal Pelvis and Ureter Cancer, Trophoblastic Tumors, Ureter and Renal Pelvis Cell Cancer, Urethral Cancer, Uterine Cancer, Uterine Sarcoma, Vaginal Cancer, Visual Pathway and Hypothalamic Glioma, Vulvar Cancer, Waldenstrom's Macroglobulinemia, Wilms' Tumor, and any other hyperproliferative disease, besides neoplasia, located in an organ system listed above.

[0659] In another preferred embodiment, polynucleotides or polypeptides, or agonists or antagonists of the present invention are used to diagnose, prognose, prevent, and/or treat premalignant conditions and to prevent progression to a neoplastic or malignant state, including but not limited to those disorders described above. Such uses are indicated in conditions known or suspected of preceding progression to neoplasia or cancer, in particular, where non-neoplastic cell growth consisting of hyperplasia, metaplasia, or most particularly, dysplasia has occurred (for review of such abnormal growth conditions, see Robbins and Angell, 1976, Basic Pathology, 2d Ed., W.B. Saunders Co., Philadelphia, pp. 68-79.)

[0660] Hyperplasia is a form of controlled cell proliferation, involving an increase in cell number in a tissue or organ, without significant alteration in structure or function. Hyperplastic disorders which can be diagnosed, prognosed, prevented, and/or treated with compositions of the invention (including polynucleotides, polypeptides, agonists or antagonists) include, but are not limited to, angiofollicular mediastinal lymph node hyperplasia, angiolymphoid hyperplasia with eosinophilia, atypical melanocytic hyperplasia, basal cell hyperplasia, benign giant lymph node hyperplasia, cementum hyperplasia, congenital adrenal hyperplasia, congenital sebaceous hyperplasia, cystic hyperplasia, cystic hyperplasia of the breast, denture hyperplasia, ductal hyperplasia, endometrial hyperplasia, fibromuscular hyperplasia, focal epithelial hyperplasia, gingival hyperplasia, inflammatory fibrous hyperplasia, inflammatory papillary hyperplasia, intravascular papillary endothelial hyperplasia, nodular hyperplasia of prostate, nodular regenerative hyperplasia, pseudoepitheliomatous hyperplasia, senile sebaceous hyperplasia, and verrucous hyperplasia.

[0661] Metaplasia is a form of controlled cell growth in which one type of adult or fully differentiated cell substitutes for another type of adult cell. Metaplastic disorders which can be diagnosed, prognosed, prevented, and/or treated with compositions of the invention (including polynucleotides, polypeptides, agonists or antagonists) include, but are not limited to, agnogenic myeloid metaplasia, apocrine metaplasia, atypical metaplasia, autoparenchymatous metaplasia, connective tissue metaplasia, epithelial metaplasia, intestinal metaplasia, metaplastic anemia, metaplastic ossification, metaplastic polyps, myeloid metaplasia, primary myeloid metaplasia, secondary myeloid metaplasia, squamous metaplasia, squamous metaplasia of amnion, and symptomatic myeloid metaplasia.

[0662] Dysplasia is frequently a forerunner of cancer, and is found mainly in the epithelia; it is the most disorderly form of non-neoplastic cell growth, involving a loss in individual cell uniformity and in the architectural orientation of cells. Dysplastic cells often have abnormally large, deeply stained nuclei, and exhibit pleomorphism. Dysplasia characteristically occurs where there exists chronic irritation or inflammation. Dysplastic disorders which can be diagnosed, prognosed, prevented, and/or treated with compositions of the invention (including polynucleotides, polypeptides, agonists or antagonists) include, but are not limited to, anhidrotic ectodermal dysplasia, anterofacial dysplasia, asphyxiating thoracic dysplasia, atriodigital dysplasia, bronchopulmonary dysplasia, cerebral dysplasia, cervical dysplasia, chondroectodermal dysplasia, cleidocranial dysplasia, congenital ectodermal dysplasia, craniodiaphysial dysplasia, craniocarpotarsal dysplasia, craniometaphysial dysplasia, dentin dysplasia, diaphysial dysplasia, ectodermal dysplasia, enamel dysplasia, encephalo-ophthalmic dysplasia, dysplasia epiphysialis hemimelia, dysplasia epiphysialis multiplex, dysplasia epiphysialis punctata, epithelial dysplasia, faciodigitogenital dysplasia, familial fibrous dysplasia of jaws, familial white folded dysplasia, fibromuscular dysplasia, fibrous dysplasia of bone, florid osseous dysplasia, hereditary renal-retinal dysplasia, hidrotic ectodermal dysplasia, hypohidrotic ectodermal dysplasia, lymphopenic thymic dysplasia, mammary dysplasia, mandibulofacial dysplasia, metaphysial dysplasia, Mondini dysplasia, monostotic fibrous dysplasia, mucoepithelial dysplasia, multiple epiphysial dysplasia, oculoauriculovertebral dysplasia, oculodentodigital dysplasia, oculovertebral dysplasia, odontogenic dysplasia, ophthalmomandibulomelic dysplasia, periapical cemental dysplasia, polyostotic fibrous dysplasia, pseudoachondroplastic spondyloepiphysial dysplasia, retinal dysplasia, septo-optic dysplasia, spondyloepiphysial dysplasia, and ventriculoradial dysplasia.

[0663] Additional pre-neoplastic disorders which can be diagnosed, prognosed, prevented, and/or treated with compositions of the invention (including polynucleotides, polypeptides, agonists or antagonists) include, but are not limited to, benign dysproliferative disorders (e.g., benign tumors, fibrocystic conditions, tissue hypertrophy, intestinal polyps, colon polyps, and esophageal dysplasia), leukoplakia, keratoses, Bowen's disease, Farmer's Skin, solar cheilitis, and solar keratosis.

[0664] In another embodiment, a polypeptide of the invention, or polynucleotides, antibodies, agonists, or antagonists corresponding to that polypeptide, may be used to diagnose and/or prognose disorders associated with the tissue(s) in which the polypeptide of the invention is expressed, including one, two, three, four, five, or more tissues disclosed in Table 1B, column 8 (Tissue Distribution Library Code).

[0665] In another embodiment, polynucleotides, polypeptides, antibodies, and/or agonists or antagonists of the present invention conjugated to a toxin or a radioactive isotope, as described herein, may be used to treat cancers and neoplasms, including, but not limited to those described herein. In a further preferred embodiment, polynucleotides, polypeptides, antibodies, and/or agonists or antagonists of the present invention conjugated to a toxin or a radioactive isotope, as described herein, may be used to treat acute myelogenous leukemia.

[0666] Additionally, polynucleotides, polypeptides, and/or agonists or antagonists of the invention may affect apoptosis, and therefore, would be useful in treating a number of diseases associated with increased cell survival or the inhibition of apoptosis. For example, diseases associated with increased cell survival or the inhibition of apoptosis that could be diagnosed, prognosed, prevented, and/or treated by polynucleotides, polypeptides, and/or agonists or antagonists of the invention, include cancers (such as follicular lymphomas, carcinomas with p53 mutations, and hormone-dependent tumors, including, but not limited to colon cancer, cardiac tumors, pancreatic cancer, melanoma, retinoblastoma, glioblastoma, lung cancer, intestinal cancer, testicular cancer, stomach cancer, neuroblastoma, myxoma, myoma, lymphoma, endothelioma, osteoblastoma, osteoclastoma, osteosarcoma, chondrosarcoma, adenoma, breast cancer, prostate cancer, Kaposi's sarcoma and ovarian cancer); autoimmune disorders such as, multiple sclerosis, Sjogren's syndrome, Hashimoto's thyroiditis, biliary cirrhosis, Behcet's disease, Crohn's disease, polymyositis, systemic lupus erythematosus and immune-related glomerulonephritis and rheumatoid arthritis) and viral infections (such as herpes viruses, pox viruses and adenoviruses), inflammation, graft v. host disease, acute graft rejection, and chronic graft rejection.

[0667] In preferred embodiments, polynucleotides, polypeptides, and/or agonists or antagonists of the invention are used to inhibit growth, progression, and/or metastasis of cancers, in particular those listed above.

[0668] Additional diseases or conditions associated with increased cell survival that could be diagnosed, prognosed, prevented, and/or treated by polynucleotides, polypeptides, and/or agonists or antagonists of the invention, include, but are not limited to, progression, and/or metastases of malignancies and related disorders such as leukemia (including acute leukemias (e.g., acute lymphocytic leukemia, acute myelocytic leukemia (including myeloblastic, promyelocytic, myelomonocytic, monocytic, and erythroleukemia)) and chronic leukemias (e.g., chronic myelocytic (granulocytic) leukemia and chronic lymphocytic leukemia)), polycythemia vera, lymphomas (e.g., Hodgkin's disease and non-Hodgkin's disease), multiple myeloma, Waldenstrom's macroglobulinemia, heavy chain disease, and solid tumors including, but not limited to, sarcomas and carcinomas such as fibrosarcoma, myxosarcoma, liposarcoma, chondrosarcoma, osteogenic sarcoma, chordoma, angiosarcoma, endotheliosarcoma, lymphangiosarcoma, lymphangioendotheliosarcoma, synovioma, mesothelioma, Ewing's tumor, leiomyosarcoma, rhabdomyosarcoma, colon carcinoma, pancreatic cancer, breast cancer, ovarian cancer, prostate cancer, squamous cell carcinoma, basal cell carcinoma, adenocarcinoma, sweat gland carcinoma, sebaceous gland carcinoma, papillary carcinoma, papillary adenocarcinomas, cystadenocarcinoma, medullary carcinoma, bronchogenic carcinoma, renal cell carcinoma, hepatoma, bile duct carcinoma, choriocarcinoma, seminoma, embryonal carcinoma, Wilm's tumor, cervical cancer, testicular tumor, lung carcinoma, small cell lung carcinoma, bladder carcinoma, epithelial carcinoma, glioma, astrocytoma, medulloblastoma, craniopharyngioma, ependymoma, pinealoma, emangioblastoma, acoustic neuroma, oligodendroglioma, menangioma, melanoma, neuroblastoma, and retinoblastoma.

[0669] Diseases associated with increased apoptosis that could be diagnosed, prognosed, prevented, and/or treated by polynucleotides, polypeptides, and/or agonists or antagonists of the invention, include AIDS; neurodegenerative disorders (such as Alzheimer's disease, Parkinson's disease, amyotrophic lateral sclerosis, retinitis pigmentosa, cerebellar degeneration and brain tumor or prior associated disease); autoimmune disorders (such as, multiple sclerosis, Sjogren's syndrome, Hashimoto's thyroiditis, biliary cirrhosis, Behcet's disease, Crohn's disease, polymyositis, systemic lupus erythematosus and immune-related glomerulonephritis and rheumatoid arthritis) myelodysplastic syndromes (such as aplastic anemia), graft v. host disease, ischemic injury (such as that caused by myocardial infarction, stroke and reperfusion injury), liver injury (e.g., hepatitis related liver injury, ischemia/reperfusion injury, cholestosis (bile duct injury) and liver cancer); toxin-induced liver disease (such as that caused by alcohol), septic shock, cachexia and anorexia.

[0670] Hyperproliferative diseases and/or disorders that could be diagnosed, prognosed, prevented, and/or treated by polynucleotides, polypeptides, and/or agonists or antagonists of the invention, include, but are not limited to, neoplasms located in the liver, abdomen, bone, breast, digestive system, pancreas, peritoneum, endocrine glands (adrenal, parathyroid, pituitary, testicles, ovary, thymus, thyroid), eye, head and neck, nervous system (central and peripheral), lymphatic system, pelvis, skin, soft tissue, spleen, thorax, and urogenital tract.

[0671] Similarly, other hyperproliferative disorders can also be diagnosed, prognosed, prevented, and/or treated by polynucleotides, polypeptides, and/or agonists or antagonists of the invention. Examples of such hyperproliferative disorders include, but are not limited to: hypergammaglobulinemia, lymphoproliferative disorders, paraproteinemias, purpura, sarcoidosis, Sezary Syndrome, Waldenstron's macroglobulinemia, Gaucher's Disease, histiocytosis, and any other hyperproliferative disease, besides neoplasia, located in an organ system listed above.

[0672] Another preferred embodiment utilizes polynucleotides of the present invention to inhibit aberrant cellular division, by gene therapy using the present invention, and/or protein fusions or fragments thereof.

[0673] Thus, the present invention provides a method for treating cell proliferative disorders by inserting into an abnormally proliferating cell a polynucleotide of the present invention, wherein said polynucleotide represses said expression.

[0674] Another embodiment of the present invention provides a method of treating cell-proliferative disorders in individuals comprising administration of one or more active gene copies of the present invention to an abnormally proliferating cell or cells. In a preferred embodiment, polynucleotides of the present invention is a DNA construct comprising a recombinant expression vector effective in expressing a DNA sequence encoding said polynucleotides. In another preferred embodiment of the present invention, the DNA construct encoding the poynucleotides of the present invention is inserted into cells to be treated utilizing a retrovirus, or more preferably an adenoviral vector (See G J. Nabel, et. al., PNAS 1999 96: 324-326, which is hereby incorporated by reference). In a most preferred embodiment, the viral vector is defective and will not transform non-proliferating cells, only proliferating cells. Moreover, in a preferred embodiment, the polynucleotides of the present invention inserted into proliferating cells either alone, or in combination with or fused to other polynucleotides, can then be modulated via an external stimulus (i.e. magnetic, specific small molecule, chemical, or drug administration, etc.), which acts upon the promoter upstream of said polynucleotides to induce expression of the encoded protein product. As such the beneficial therapeutic affect of the present invention may be expressly modulated (i.e. to increase, decrease, or inhibit expression of the present invention) based upon said external stimulus.

[0675] Polynucleotides of the present invention may be useful in repressing expression of oncogenic genes or antigens. By “repressing expression of the oncogenic genes” is intended the suppression of the transcription of the gene, the degradation of the gene transcript (pre-message RNA), the inhibition of splicing, the destruction of the messenger RNA, the prevention of the post-translational modifications of the protein, the destruction of the protein, or the inhibition of the normal function of the protein.

[0676] For local administration to abnormally proliferating cells, polynucleotides of the present invention may be administered by any method known to those of skill in the art including, but not limited to transfection, electroporation, microinjection of cells, or in vehicles such as liposomes, lipofectin, or as naked polynucleotides, or any other method described throughout the specification. The polynucleotide of the present invention may be delivered by known gene delivery systems such as, but not limited to, retroviral vectors (Gilboa, J. Virology 44:845 (1982); Hocke, Nature 320:275 (1986); Wilson, et al., Proc. Natl. Acad. Sci. U.S.A. 85:3014), vaccinia virus system (Chakrabarty et al., Mol. Cell Biol. 5:3403 (1985) or other efficient DNA delivery systems (Yates et al., Nature 313:812 (1985)) known to those skilled in the art. These references are exemplary only and are hereby incorporated by reference. In order to specifically deliver or transfect cells which are abnormally proliferating and spare non-dividing cells, it is preferable to utilize a retrovirus, or adenoviral (as described in the art and elsewhere herein) delivery system known to those of skill in the art. Since host DNA replication is required for retroviral DNA to integrate and the retrovirus will be unable to self replicate due to the lack of the retrovirus genes needed for its life cycle. Utilizing such a retroviral delivery system for polynucleotides of the present invention will target said gene and constructs to abnormally proliferating cells and will spare the non-dividing normal cells.

[0677] The polynucleotides of the present invention may be delivered directly to cell proliferative disorder/disease sites in internal organs, body cavities and the like by use of imaging devices used to guide an injecting needle directly to the disease site. The polynucleotides of the present invention may also be administered to disease sites at the time of surgical intervention.

[0678] By “cell proliferative disease” is meant any human or animal disease or disorder, affecting any one or any combination of organs, cavities, or body parts, which is characterized by single or multiple local abnormal proliferations of cells, groups of cells, or tissues, whether benign or malignant.

[0679] Any amount of the polynucleotides of the present invention may be administered as long as it has a biologically inhibiting effect on the proliferation of the treated cells. Moreover, it is possible to administer more than one of the polynucleotide of the present invention simultaneously to the same site. By “biologically inhibiting” is meant partial or total growth inhibition as well as decreases in the rate of proliferation or growth of the cells. The biologically inhibitory dose may be determined by assessing the effects of the polynucleotides of the present invention on target malignant or abnormally proliferating cell growth in tissue culture, tumor growth in animals and cell cultures, or any other method known to one of ordinary skill in the art.

[0680] The present invention is further directed to antibody-based therapies which involve administering of anti-polypeptides and anti-polynucleotide antibodies to a mammalian, preferably human, patient for treating one or more of the described disorders. Methods for producing anti-polypeptides and anti-polynucleotide antibodies polyclonal and monoclonal antibodies are described in detail elsewhere herein. Such antibodies may be provided in pharmaceutically acceptable compositions as known in the art or as described herein.

[0681] A summary of the ways in which the antibodies of the present invention may be used therapeutically includes binding polynucleotides or polypeptides of the present invention locally or systemically in the body or by direct cytotoxicity of the antibody, e.g. as mediated by complement (CDC) or by effector cells (ADCC). Some of these approaches are described in more detail below. Armed with the teachings provided herein, one of ordinary skill in the art will know how to use the antibodies of the present invention for diagnostic, monitoring or therapeutic purposes without undue experimentation.

[0682] In particular, the antibodies, fragments and derivatives of the present invention are useful for treating a subject having or developing cell proliferative and/or differentiation disorders as described herein. Such treatment comprises administering a single or multiple doses of the antibody, or a fragment, derivative, or a conjugate thereof.

[0683] The antibodies of this invention may be advantageously utilized in combination with other monoclonal or chimeric antibodies, or with lymphokines or hematopoietic growth factors, for example., which serve to increase the number or activity of effector cells which interact with the antibodies.

[0684] It is preferred to use high affinity and/or potent in vivo inhibiting and/or neutralizing antibodies against polypeptides or polynucleotides of the present invention, fragments or regions thereof, for both immunoassays directed to and therapy of disorders related to polynucleotides or polypeptides, including fragements thereof, of the present invention. Such antibodies, fragments, or regions, will preferably have an affinity for polynucleotides or polypeptides, including fragments thereof. Preferred binding affinities include those with a dissociation constant or Kd less than 5×10⁻⁶M, 10⁻⁶M, 5×10⁻⁷M, 10⁻⁷M, 5×10⁻⁸M, 10⁻⁸M, 5×10⁻⁹M, 10⁻⁹M, 5×10⁻¹⁰ M, 10⁻¹⁰M, 5×10⁻¹¹M, 10⁻¹¹M, 5×10⁻¹²M, 10⁻¹²M, 5×10⁻¹³M, 10⁻¹³M, 5×10⁻¹⁴M, 10⁻¹⁴M, 5×10⁻¹⁵M, and 10⁻¹⁵M.

[0685] Moreover, polypeptides of the present invention are useful in inhibiting the angiogenesis of proliferative cells or tissues, either alone, as a protein fusion, or in combination with other polypeptides directly or indirectly, as described elsewhere herein. In a most preferred embodiment, said anti-angiogenesis effect may be achieved indirectly, for example, through the inhibition of hematopoietic, tumor-specific cells, such as tumor-associated macrophages (See Joseph I B, et al. J Natl Cancer Inst, 90(21):1648-53 (1998), which is hereby incorporated by reference). Antibodies directed to polypeptides or polynucleotides of the present invention may also result in inhibition of angiogenesis directly, or indirectly (See Witte L, et al., Cancer Metastasis Rev. 17(2):155-61 (1998), which is hereby incorporated by reference)).

[0686] Polypeptides, including protein fusions, of the present invention, or fragments thereof may be useful in inhibiting proliferative cells or tissues through the induction of apoptosis. Said polypeptides may act either directly, or indirectly to induce apoptosis of proliferative cells and tissues, for example in the activation of a death-domain receptor, such as tumor necrosis factor (TNF) receptor-1, CD95 (Fas/APO-1), TNF-receptor-related apoptosis-mediated protein (TRAMP) and TNF-related apoptosis-inducing ligand (TRAIL) receptor-1 and -2 (See Schulze-Osthoff K, et. al., Eur J Biochem 254(3):439-59 (1998), which is hereby incorporated by reference). Moreover, in another preferred embodiment of the present invention, said polypeptides may induce apoptosis through other mechanisms, such as in the activation of other proteins which will activate apoptosis, or through stimulating the expression of said proteins, either alone or in combination with small molecule drugs or adjuviants, such as apoptonin, galectins, thioredoxins, anti-inflammatory proteins (See for example, Mutat Res 400(1-2):447-55 (1998), Med Hypotheses.50(5):423-33 (1998), Chem Biol Interact. April 24; 111-112:23-34 (1998), J Mol Med.76(6):402-12 (1998), Int J Tissue React;20(1):3-15 (1998), which are all hereby incorporated by reference).

[0687] Polypeptides, including protein fusions to, or fragments thereof, of the present invention are useful in inhibiting the metastasis of proliferative cells or tissues. Inhibition may occur as a direct result of administering polypeptides, or antibodies directed to said polypeptides as described elsewere herein, or indirectly, such as activating the expression of proteins known to inhibit metastasis, for example alpha 4 integrins, (See, e.g., Curr Top Microbiol Immunol 1998; 231:125-41, which is hereby incorporated by reference). Such thereapeutic affects of the present invention may be achieved either alone, or in combination with small molecule drugs or adjuvants.

[0688] In another embodiment, the invention provides a method of delivering compositions containing the polypeptides of the invention (e.g., compositions containing polypeptides or polypeptide antibodes associated with heterologous polypeptides, heterologous nucleic acids, toxins, or prodrugs) to targeted cells expressing the polypeptide of the present invention. Polypeptides or polypeptide antibodes of the invention may be associated with with heterologous polypeptides, heterologous nucleic acids, toxins, or prodrugs via hydrophobic, hydrophilic, ionic and/or covalent interactions.

[0689] Polypeptides, protein fusions to, or fragments thereof, of the present invention are useful in enhancing the immunogenicity and/or antigenicity of proliferating cells or tissues, either directly, such as would occur if the polypeptides of the present invention ‘vaccinated’ the immune response to respond to proliferative antigens and immunogens, or indirectly, such as in activating the expression of proteins known to enhance the immune response (e.g. chemokines), to said antigens and immunogens.

Renal Disorders

[0690] Polynucleotides, polypeptides, antibodies, and/or agonists or antagonists of the present invention, may be used to treat, prevent, diagnose, and/or prognose disorders of the renal system. Renal disorders which can be diagnosed, prognosed, prevented, and/or treated with compositions of the invention include, but are not limited to, kidney failure, nephritis, blood vessel disorders of kidney, metabolic and congenital kidney disorders, urinary disorders of the kidney, autoimmune disorders, sclerosis and necrosis, electrolyte imbalance, and kidney cancers.

[0691] Kidney diseases which can be diagnosed, prognosed, prevented, and/or treated with compositions of the invention include, but are not limited to, acute kidney failure, chronic kidney failure, atheroembolic renal failure, end-stage renal disease, inflammatory diseases of the kidney (e.g., acute glomerulonephritis, postinfectious glomerulonephritis, rapidly progressive glomerulonephritis, nephrotic syndrome, membranous glomerulonephritis, familial nephrotic syndrome, membranoproliferative glomerulonephritis I and II, mesangial proliferative glomerulonephritis, chronic glomerulonephritis, acute tubulointerstitial nephritis, chronic tubulointerstitial nephritis, acute post-streptococcal glomerulonephritis (PSGN), pyelonephritis, lupus nephritis, chronic nephritis, interstitial nephritis, and post-streptococcal glomerulonephritis), blood vessel disorders of the kidneys (e.g., kidney infarction, atheroembolic kidney disease, cortical necrosis, malignant nephrosclerosis, renal vein thrombosis, renal underperfusion, renal retinopathy, renal ischemia-reperfusion, renal artery embolism, and renal artery stenosis), and kidney disorders resulting form urinary tract disease (e.g., pyelonephritis, hydronephrosis, urolithiasis (renal lithiasis, nephrolithiasis), reflux nephropathy, urinary tract infections, urinary retention, and acute or chronic unilateral obstructive uropathy.)

[0692] In addition, compositions of the invention can be used to diagnose, prognose, prevent, and/or treat metabolic and congenital disorders of the kidney (e.g., uremia, renal amyloidosis, renal osteodystrophy, renal tubular acidosis, renal glycosuria, nephrogenic diabetes insipidus, cystinuria, Fanconi's syndrome, renal fibrocystic osteosis (renal rickets), Hartnup disease, Bartter's syndrome, Liddle's syndrome, polycystic kidney disease, medullary cystic disease, medullary sponge kidney, Alport's syndrome, nail-patella syndrome, congenital nephrotic syndrome, CRUSH syndrome, horseshoe kidney, diabetic nephropathy, nephrogenic diabetes insipidus, analgesic nephropathy, kidney stones, and membranous nephropathy), and autoimmune disorders of the kidney (e.g., systemic lupus erythematosus (SLE), Goodpasture syndrome, IgA nephropathy, and IgM mesangial proliferative glomerulonephritis).

[0693] Compositions of the invention can also be used to diagnose, prognose, prevent, and/or treat sclerotic or necrotic disorders of the kidney (e.g., glomerulosclerosis, diabetic nephropathy, focal segmental glomerulosclerosis (FSGS), necrotizing glomerulonephritis, and renal papillary necrosis), cancers of the kidney (e.g., nephroma, hypemephroma, nephroblastoma, renal cell cancer, transitional cell cancer, renal adenocarcinoma, squamous cell cancer, and Wilm's tumor), and electrolyte imbalances (e.g., nephrocalcinosis, pyuria, edema, hydronephritis, proteinuria, hyponatremia, hypematremia, hypokalemia, hyperkalemia, hypocalcemia, hypercalcemia, hypophosphatemia, and hyperphosphatemia).

[0694] Polypeptides may be administered using any method known in the art, including, but not limited to, direct needle injection at the delivery site, intravenous injection, topical administration, catheter infusion, biolistic injectors, particle accelerators, gelfoam sponge depots, other commercially available depot materials, osmotic pumps, oral or suppositorial solid pharmaceutical formulations, decanting or topical applications during surgery, aerosol delivery. Such methods are known in the art. Polypeptides may be administered as part of a Therapeutic, described in more detail below. Methods of delivering polynucleotides are described in more detail herein.

Cardiovascular Disorders

[0695] Polynucleotides or polypeptides, or agonists or antagonists of the present invention, may be used to treat, prevent, diagnose, and/or prognose cardiovascular disorders, including, but not limited to, peripheral artery disease, such as limb ischemia.

[0696] Cardiovascular disorders include, but are not limited to, cardiovascular abnormalities, such as arterio-arterial fistula, arteriovenous fistula, cerebral arteriovenous malformations, congenital heart defects, pulmonary atresia, and Scimitar Syndrome. Congenital heart defects include, but are not limited to, aortic coarctation, cor triatriatum, coronary vessel anomalies, crisscross heart, dextrocardia, patent ductus arteriosus, Ebstein's anomaly, Eisenmenger complex, hypoplastic left heart syndrome, levocardia, tetralogy of fallot, transposition of great vessels, double outlet right ventricle, tricuspid atresia, persistent truncus arteriosus, and heart septal defects, such as aortopulmonary septal defect, endocardial cushion defects, Lutembacher's Syndrome, trilogy of Fallot, ventricular heart septal defects.

[0697] Cardiovascular disorders also include, but are not limited to, heart disease, such as arrhythmias, carcinoid heart disease, high cardiac output, low cardiac output, cardiac tamponade, endocarditis (including bacterial), heart aneurysm, cardiac arrest, congestive heart failure, congestive cardiomyopathy, paroxysmal dyspnea, cardiac edema, heart hypertrophy, congestive cardiomyopathy, left ventricular hypertrophy, right ventricular hypertrophy, post-infarction heart rupture, ventricular septal rupture, heart valve diseases, myocardial diseases, myocardial ischemia, pericardial effusion, pericarditis (including constrictive and tuberculous), pneumopericardium, postpericardiotomy syndrome, pulmonary heart disease, rheumatic heart disease, ventricular dysfunction, hyperemia, cardiovascular pregnancy complications, Scimitar Syndrome, cardiovascular syphilis, and cardiovascular tuberculosis.

[0698] Arrhythmias include, but are not limited to, sinus arrhythmia, atrial fibrillation, atrial flutter, bradycardia, extrasystole, Adams-Stokes Syndrome, bundle-branch block, sinoatrial block, long QT syndrome, parasystole, Lown-Ganong-Levine Syndrome, Mahaim-type pre-excitation syndrome, Wolff-Parkinson-White syndrome, sick sinus syndrome, tachycardias, and ventricular fibrillation. Tachycardias include paroxysmal tachycardia, supraventricular tachycardia, accelerated idioventricular rhythm, atrioventricular nodal reentry tachycardia, ectopic atrial tachycardia, ectopic junctional tachycardia, sinoatrial nodal reentry tachycardia, sinus tachycardia, Torsades de Pointes, and ventricular tachycardia.

[0699] Heart valve diseases include, but are not limited to, aortic valve insufficiency, aortic valve stenosis, hear murmurs, aortic valve prolapse, mitral valve prolapse, tricuspid valve prolapse, mitral valve insufficiency, mitral valve stenosis, pulmonary atresia, pulmonary valve insufficiency, pulmonary valve stenosis, tricuspid atresia, tricuspid valve insufficiency, and tricuspid valve stenosis.

[0700] Myocardial diseases include, but are not limited to, alcoholic cardiomyopathy, congestive cardiomyopathy, hypertrophic cardiomyopathy, aortic subvalvular stenosis, pulmonary subvalvular stenosis, restrictive cardiomyopathy, Chagas cardiomyopathy, endocardial fibroelastosis, endomyocardial fibrosis, Kearns Syndrome, myocardial reperfusion injury, and myocarditis.

[0701] Myocardial ischemias include, but are not limited to, coronary disease, such as angina pectoris, coronary aneurysm, coronary arteriosclerosis, coronary thrombosis, coronary vasospasm, myocardial infarction and myocardial stunning.

[0702] Cardiovascular diseases also include vascular diseases such as aneurysms, angiodysplasia, angiomatosis, bacillary angiomatosis, Hippel-Lindau Disease, Klippel-Trenaunay-Weber Syndrome, Sturge-Weber Syndrome, angioneurotic edema, aortic diseases, Takayasu's Arteritis, aortitis, Leriche's Syndrome, arterial occlusive diseases, arteritis, enarteritis, polyarteritis nodosa, cerebrovascular disorders, diabetic angiopathies, diabetic retinopathy, embolisms, thrombosis, erythromelalgia, hemorrhoids, hepatic veno-occlusive disease, hypertension, hypotension, ischemia, peripheral vascular diseases, phlebitis, pulmonary veno-occlusive disease, Raynaud's disease, CREST syndrome, retinal vein occlusion, Scimitar syndrome, superior vena cava syndrome, telangiectasia, atacia telangiectasia, hereditary hemorrhagic telangiectasia, varicocele, varicose veins, varicose ulcer, vasculitis, and venous insufficiency.

[0703] Aneurysms include, but are not limited to, dissecting aneurysms, false aneurysms, infected aneurysms, ruptured aneurysms, aortic aneurysms, cerebral aneurysms, coronary aneurysms, heart aneurysms, and iliac aneurysms.

[0704] Arterial occlusive diseases include, but are not limited to, arteriosclerosis, intermittent claudication, carotid stenosis, fibromuscular dysplasias, mesenteric vascular occlusion, Moyamoya disease, renal artery obstruction, retinal artery occlusion, and thromboangiitis obliterans.

[0705] Cerebrovascular disorders include, but are not limited to, carotid artery diseases, cerebral amyloid angiopathy, cerebral aneurysm, cerebral anoxia, cerebral arteriosclerosis, cerebral arteriovenous malformation, cerebral artery diseases, cerebral embolism and thrombosis, carotid artery thrombosis, sinus thrombosis, Wallenberg's syndrome, cerebral hemorrhage, epidural hematoma, subdural hematoma, subaraxhnoid hemorrhage, cerebral infarction, cerebral ischemia (including transient), subclavian steal syndrome, periventricular leukomalacia, vascular headache, cluster headache, migraine, and vertebrobasilar insufficiency.

[0706] Embolisms include, but are not limited to, air embolisms, amniotic fluid embolisms, cholesterol embolisms, blue toe syndrome, fat embolisms, pulmonary embolisms, and thromoboembolisms. Thrombosis include, but are not limited to, coronary thrombosis, hepatic vein thrombosis, retinal vein occlusion, carotid artery thrombosis, sinus thrombosis, Wallenberg's syndrome, and thrombophlebitis.

[0707] Ischemic disorders include, but are not limited to, cerebral ischemia, ischemic colitis, compartment syndromes, anterior compartment syndrome, myocardial ischemia, reperfusion injuries, and peripheral limb ischemia. Vasculitis includes, but is not limited to, aortitis, arteritis, Behcet's Syndrome, Churg-Strauss Syndrome, mucocutaneous lymph node syndrome, thromboangiitis obliterans, hypersensitivity vasculitis, Schoenlein-Henoch purpura, allergic cutaneous vasculitis, and Wegener's granulomatosis.

[0708] Polypeptides may be administered using any method known in the art, including, but not limited to, direct needle injection at the delivery site, intravenous injection, topical administration, catheter infusion, biolistic injectors, particle accelerators, gelfoarn sponge depots, other commercially available depot materials, osmotic pumps, oral or suppositorial solid pharmaceutical formulations, decanting or topical applications during surgery, aerosol delivery. Such methods are known in the art. Polypeptides may be administered as part of a Therapeutic, described in more detail below. Methods of delivering polynucleotides are described in more detail herein.

Respiratory Disorders

[0709] Polynucleotides or polypeptides, or agonists or antagonists of the present invention may be used to treat, prevent, diagnose, and/or prognose diseases and/or disorders of the respiratory system.

[0710] Diseases and disorders of the respiratory system include, but are not limited to, nasal vestibulitis, nonallergic rhinitis (e.g., acute rhinitis, chronic rhinitis, atrophic rhinitis, vasomotor rhinitis), nasal polyps, and sinusitis, juvenile angiofibromas, cancer of the nose and juvenile papillomas, vocal cord polyps, nodules (singer's nodules), contact ulcers, vocal cord paralysis, laryngoceles, pharyngitis (e.g., viral and bacterial), tonsillitis, tonsillar cellulitis, parapharyngeal abscess, laryngitis, laryngoceles, and throat cancers (e.g., cancer of the nasopharynx, tonsil cancer, larynx cancer), lung cancer (e.g., squamous cell carcinoma, small cell (oat cell) carcinoma, large cell carcinoma, and adenocarcinoma), allergic disorders (eosinophilic pneumonia, hypersensitivity pneumonitis (e.g., extrinsic allergic alveolitis, allergic interstitial pneumonitis, organic dust pneumoconiosis, allergic bronchopulmonary aspergillosis, asthma, Wegener's granulomatosis (granulomatous vasculitis), Goodpasture's syndrome)), pneumonia (e.g., bacterial pneumonia (e.g., Streptococcus pneumoniae (pneumoncoccal pneumonia), Staphylococcus aureus(staphylococcal pneumonia), Gram-negative bacterial pneumonia (caused by, e.g., Klebsiella and Pseudomas spp.), Mycoplasma pneumoniae pneumonia, Hemophilus influenzae pneumonia, Legionella pneumophila (Legionnaires' disease), and Chlamydia psittaci (Psittacosis)), and viral pneumonia (e.g., influenza, chickenpox (varicella).

[0711] Additional diseases and disorders of the respiratory system include, but are not limited to bronchiolitis, polio (poliomyelitis), croup, respiratory syncytial viral infection, mumps, erythema infectiosum (fifth disease), roseola infantum, progressive rubella panencephalitis, german measles, and subacute sclerosing panencephalitis), fungal pneumonia (e.g., Histoplasmosis, Coccidioidomycosis, Blastomycosis, fungal infections in people with severely suppressed immune systems (e.g., cryptococcosis, caused by Cryptococcus neoformans; aspergillosis, caused by Aspergillus spp.; candidiasis, caused by Candida; and mucormycosis)), Pneumocystis carinii (pneumocystis pneumonia), atypical pneumonias (e.g., Mycoplasma and Chlamydia spp.), opportunistic infection pneumonia, nosocomial pneumonia, chemical pneumonitis, and aspiration pneumonia, pleural disorders (e.g., pleurisy, pleural effusion, and pneumothorax (e.g., simple spontaneous pneumothorax, complicated spontaneous pneumothorax, tension pneumothorax)), obstructive airway diseases (e.g., asthma, chronic obstructive pulmonary disease (COPD), emphysema, chronic or acute bronchitis), occupational lung diseases (e.g., silicosis, black lung (coal workers' pneumoconiosis), asbestosis, berylliosis, occupational asthsma, byssinosis, and benign pneumoconioses), Infiltrative Lung Disease (e.g., pulmonary fibrosis (e.g., fibrosing alveolitis, usual interstitial pneumonia), idiopathic pulmonary fibrosis, desquamative interstitial pneumonia, lymphoid interstitial pneumonia, histiocytosis X (e.g., Letterer-Siwe disease, Hand-Schuller-Christian disease, eosinophilic granuloma), idiopathic pulmonary hemosiderosis, sarcoidosis and pulmonary alveolar proteinosis), Acute respiratory distress syndrome (also called, e.g., adult respiratory distress syndrome), edema, pulmonary embolism, bronchitis (e.g., viral, bacterial), bronchiectasis, atelectasis, lung abscess (caused by, e.g., Staphylococcus aureus or Legionella pneumophila), and cystic fibrosis.

Anti-Angiogenesis Activity

[0712] The naturally occurring balance between endogenous stimulators and inhibitors of angiogenesis is one in which inhibitory influences predominate. Rastinejad et al, Cell 56:345-355 (1989). In those rare instances in which neovascularization occurs under normal physiological conditions, such as wound healing, organ regeneration, embryonic development, and female reproductive processes, angiogenesis is stringently regulated and spatially and temporally delimited. Under conditions of pathological angiogenesis such as that characterizing solid tumor growth, these regulatory controls fail. Unregulated angiogenesis becomes pathologic and sustains progression of many neoplastic and non-neoplastic diseases. A number of serious diseases are dominated by abnormal neovascularization including solid tumor growth and metastases, arthritis, some types of eye disorders, and psoriasis. See, e.g., reviews by Moses et al., Biotech. 9:630-634 (1991); Folkman et al., N. Engl. J. Med., 333:1757-1763 (1995); Auerbach et al., J Microvasc. Res. 29:401-411 (1985); Folkman, Advances in Cancer Research, eds. Klein and Weinhouse, Academic Press, New York, pp. 175-203 (1985); Patz, Am. J. Opthalmol. 94:715-743 (1982); and Folkman et al., Science 221:719-725 (1983). In a number of pathological conditions, the process of angiogenesis contributes to the disease state. For example, significant data have accumulated which suggest that the growth of solid tumors is dependent on angiogenesis. Folkman and Klagsbrun, Science 235:442-447 (1987).

[0713] The present invention provides for treatment of diseases or disorders associated with neovascularization by administration of the polynucleotides and/or polypeptides of the invention, as well as agonists or antagonists of the present invention. Malignant and metastatic conditions which can be treated with the polynucleotides and polypeptides, or agonists or antagonists of the invention include, but are not limited to, malignancies, solid tumors, and cancers described herein and otherwise known in the art (for a review of such disorders, see Fishman et al., Medicine, 2d Ed., J. B. Lippincott Co., Philadelphia (1985)). Thus, the present invention provides a method of treating an angiogenesis-related disease and/or disorder, comprising administering to an individual in need thereof a therapeutically effective amount of a polynucleotide, polypeptide, antagonist and/or agonist of the invention. For example, polynucleotides, polypeptides, antagonists and/or agonists may be utilized in a variety of additional methods in order to therapeutically treat a cancer or tumor. Cancers which may be treated with polynucleotides, polypeptides, antagonists and/or agonists include, but are not limited to solid tumors, including prostate, lung, breast, ovarian, stomach, pancreas, larynx, esophagus, testes, liver, parotid, biliary tract, colon, rectum, cervix, uterus, endometrium, kidney, bladder, thyroid cancer; primary tumors and metastases; melanomas; glioblastoma; Kaposi's sarcoma; leiomyosarcoma; non-small cell lung cancer; colorectal cancer; advanced malignancies; and blood born tumors such as leukemias. For example, polynucleotides, polypeptides, antagonists and/or agonists may be delivered topically, in order to treat cancers such as skin cancer, head and neck tumors, breast tumors, and Kaposi's sarcoma.

[0714] Within yet other aspects, polynucleotides, polypeptides, antagonists and/or agonists may be utilized to treat superficial forms of bladder cancer by, for example, intravesical administration. Polynucleotides, polypeptides, antagonists and/or agonists may be delivered directly into the tumor, or near the tumor site, via injection or a catheter. Of course, as the artisan of ordinary skill will appreciate, the appropriate mode of administration will vary according to the cancer to be treated. Other modes of delivery are discussed herein.

[0715] Polynucleotides, polypeptides, antagonists and/or agonists may be useful in treating other disorders, besides cancers, which involve angiogenesis. These disorders include, but are not limited to: benign tumors, for example hemangiomas, acoustic neuromas, neurofibromas, trachomas, and pyogenic granulomas; artheroscleric plaques; ocular angiogenic diseases, for example, diabetic retinopathy, retinopathy of prematurity, macular degeneration, corneal graft rejection, neovascular glaucoma, retrolental fibroplasia, rubeosis, retinoblastoma, uvietis and Pterygia (abnormal blood vessel growth) of the eye; rheumatoid arthritis; psoriasis; delayed wound healing; endometriosis; vasculogenesis; granulations; hypertrophic scars (keloids); nonunion fractures; scleroderma; trachoma; vascular adhesions; myocardial angiogenesis; coronary collaterals; cerebral collaterals; arteriovenous malformations; ischemic limb angiogenesis; Osler-Webber Syndrome; plaque neovascularization; telangiectasia; hemophiliac joints; angiofibroma; fibromuscular dysplasia; wound granulation; Crohn's disease; and atherosclerosis.

[0716] For example, within one aspect of the present invention methods are provided for treating hypertrophic scars and keloids, comprising the step of administering a polynucleotide, polypeptide, antagonist and/or agonist of the invention to a hypertrophic scar or keloid.

[0717] Within one embodiment of the present invention polynucleotides, polypeptides, antagonists and/or agonists of the invention are directly injected into a hypertrophic scar or keloid, in order to prevent the progression of these lesions. This therapy is of particular value in the prophylactic treatment of conditions which are known to result in the development of hypertrophic scars and keloids (e.g., burns), and is preferably initiated after the proliferative phase has had time to progress (approximately 14 days after the initial injury), but before hypertrophic scar or keloid development. As noted above, the present invention also provides methods for treating neovascular diseases of the eye, including for example, corneal neovascularization, neovascular glaucoma, proliferative diabetic retinopathy, retrolental fibroplasia and macular degeneration.

[0718] Moreover, Ocular disorders associated with neovascularization which can be treated with the polynucleotides and polypeptides of the present invention (including agonists and/or antagonists) include, but are not limited to: neovascular glaucoma, diabetic retinopathy, retinoblastoma, retrolental fibroplasia, uveitis, retinopathy of prematurity macular degeneration, corneal graft neovascularization, as well as other eye inflammatory diseases, ocular tumors and diseases associated with choroidal or iris neovascularization. See, e.g., reviews by Waltman et al., Am. J. Ophthal. 85:704-710 (1978) and Gartner et al., Surv. Ophthal. 22:291-312 (1978).

[0719] Thus, within one aspect of the present invention methods are provided for treating neovascular diseases of the eye such as corneal neovascularization (including corneal graft neovascularization), comprising the step of administering to a patient a therapeutically effective amount of a compound (as described above) to the cornea, such that the formation of blood vessels is inhibited. Briefly, the cornea is a tissue which normally lacks blood vessels. In certain pathological conditions however, capillaries may extend into the cornea from the pericorneal vascular plexus of the limbus. When the cornea becomes vascularized, it also becomes clouded, resulting in a decline in the patient's visual acuity. Visual loss may become complete if the cornea completely opacitates. A wide variety of disorders can result in corneal neovascularization, including for example, corneal infections (e.g., trachoma, herpes simplex keratitis, leishmaniasis and onchocerciasis), immunological processes (e.g., graft rejection and Stevens-Johnson's syndrome), alkali burns, trauma, inflammation (of any cause), toxic and nutritional deficiency states, and as a complication of wearing contact lenses.

[0720] Within particularly preferred embodiments of the invention, may be prepared for topical administration in saline (combined with any of the preservatives and antimicrobial agents commonly used in ocular preparations), and administered in eyedrop form. The solution or suspension may be prepared in its pure form and administered several times daily. Alternatively, anti-angiogenic compositions, prepared as described above, may also be administered directly to the cornea. Within preferred embodiments, the anti-angiogenic composition is prepared with a muco-adhesive polymer which binds to cornea. Within further embodiments, the anti-angiogenic factors or anti-angiogenic compositions may be utilized as an adjunct to conventional steroid therapy. Topical therapy may also be useful prophylactically in corneal lesions which are known to have a high probability of inducing an angiogenic response (such as chemical burns). In these instances the treatment, likely in combination with steroids, may be instituted immediately to help prevent subsequent complications.

[0721] Within other embodiments, the compounds described above may be injected directly into the corneal stroma by an ophthalmologist under microscopic guidance. The preferred site of injection may vary with the morphology of the individual lesion, but the goal of the administration would be to place the composition at the advancing front of the vasculature (i.e., interspersed between the blood vessels and the normal cornea). In most cases this would involve perilimbic corneal injection to “protect” the cornea from the advancing blood vessels. This method may also be utilized shortly after a corneal insult in order to prophylactically prevent corneal neovascularization. In this situation the material could be injected in the perilimbic cornea interspersed between the corneal lesion and its undesired potential limbic blood supply. Such methods may also be utilized in a similar fashion to prevent capillary invasion of transplanted corneas. In a sustained-release form injections might only be required 2-3 times per year. A steroid could also be added to the injection solution to reduce inflammation resulting from the injection itself.

[0722] Within another aspect of the present invention, methods are provided for treating neovascular glaucoma, comprising the step of administering to a patient a therapeutically effective amount of a polynucleotide, polypeptide, antagonist and/or agonist to the eye, such that the formation of blood vessels is inhibited. In one embodiment, the compound may be administered topically to the eye in order to treat early forms of neovascular glaucoma. Within other embodiments, the compound may be implanted by injection into the region of the anterior chamber angle. Within other embodiments, the compound may also be placed in any location such that the compound is continuously released into the aqueous humor. Within another aspect of the present invention, methods are provided for treating proliferative diabetic retinopathy, comprising the step of administering to a patient a therapeutically effective amount of a polynucleotide, polypeptide, antagonist and/or agonist to the eyes, such that the formation of blood vessels is inhibited.

[0723] Within particularly preferred embodiments of the invention, proliferative diabetic retinopathy may be treated by injection into the aqueous humor or the vitreous, in order to increase the local concentration of the polynucleotide, polypeptide, antagonist and/or agonist in the retina. Preferably, this treatment should be initiated prior to the acquisition of severe disease requiring photocoagulation.

[0724] Within another aspect of the present invention, methods are provided for treating retrolental fibroplasia, comprising the step of administering to a patient a therapeutically effective amount of a polynucleotide, polypeptide, antagonist and/or agonist to the eye, such that the formation of blood vessels is inhibited. The compound may be administered topically, via intravitreous injection and/or via intraocular implants.

[0725] Additionally, disorders which can be treated with the polynucleotides, polypeptides, agonists and/or agonists include, but are not limited to, hemangioma, arthritis, psoriasis, angiofibroma, atherosclerotic plaques, delayed wound healing, granulations, hemophilic joints, hypertrophic scars, nonunion fractures, Osler-Weber syndrome, pyogenic granuloma, scleroderma, trachoma, and vascular adhesions.

[0726] Moreover, disorders and/or states, which can be treated, prevented, diagnosed, and/or prognosed with the the polynucleotides, polypeptides, agonists and/or agonists of the invention include, but are not limited to, solid tumors, blood born tumors such as leukemias, tumor metastasis, Kaposi's sarcoma, benign tumors, for example hemangiomas, acoustic neuromas, neurofibromas, trachomas, and pyogenic granulomas, rheumatoid arthritis, psoriasis, ocular angiogenic diseases, for example, diabetic retinopathy, retinopathy of prematurity, macular degeneration, corneal graft rejection, neovascular glaucoma, retrolental fibroplasia, rubeosis, retinoblastoma, and uvietis, delayed wound healing, endometriosis, vascluogenesis, granulations, hypertrophic scars (keloids), nonunion fractures, scleroderma, trachoma, vascular adhesions, myocardial angiogenesis, coronary collaterals, cerebral collaterals, arteriovenous malformations, ischemic limb angiogenesis, Osler-Webber Syndrome, plaque neovascularization, telangiectasia, hemophiliac joints, angiofibroma fibromuscular dysplasia, wound granulation, Crohn's disease, atherosclerosis, birth control agent by preventing vascularization required for embryo implantation controlling menstruation, diseases that have angiogenesis as a pathologic consequence such as cat scratch disease (Rochele minalia quintosa), ulcers (Helicobacter pylori), Bartonellosis and bacillary angiomatosis.

[0727] In one aspect of the birth control method, an amount of the compound sufficient to block embryo implantation is administered before or after intercourse and fertilization have occurred, thus providing an effective method of birth control, possibly a “morning after” method. Polynucleotides, polypeptides, agonists and/or agonists may also be used in controlling menstruation or administered as either a peritoneal lavage fluid or for peritoneal implantation in the treatment of endometriosis.

[0728] Polynucleotides, polypeptides, agonists and/or agonists of the present invention may be incorporated into surgical sutures in order to prevent stitch granulomas.

[0729] Polynucleotides, polypeptides, agonists and/or agonists may be utilized in a wide variety of surgical procedures. For example, within one aspect of the present invention a compositions (in the form of, for example, a spray or film) may be utilized to coat or spray an area prior to removal of a tumor, in order to isolate normal surrounding tissues from malignant tissue, and/or to prevent the spread of disease to surrounding tissues. Within other aspects of the present invention, compositions (e.g., in the form of a spray) may be delivered via endoscopic procedures in order to coat tumors, or inhibit angiogenesis in a desired locale. Within yet other aspects of the present invention, surgical meshes which have been coated with anti-angiogenic compositions of the present invention may be utilized in any procedure wherein a surgical mesh might be utilized. For example, within one embodiment of the invention a surgical mesh laden with an anti-angiogenic composition may be utilized during abdominal cancer resection surgery (e.g., subsequent to colon resection) in order to provide support to the structure, and to release an amount of the anti-angiogenic factor.

[0730] Within further aspects of the present invention, methods are provided for treating tumor excision sites, comprising administering a polynucleotide, polypeptide, agonist and/or agonist to the resection margins of a tumor subsequent to excision, such that the local recurrence of cancer and the formation of new blood vessels at the site is inhibited. Within one embodiment of the invention, the anti-angiogenic compound is administered directly to the tumor excision site (e.g., applied by swabbing, brushing or otherwise coating the resection margins of the tumor with the anti-angiogenic compound). Alternatively, the anti-angiogenic compounds may be incorporated into known surgical pastes prior to administration. Within particularly preferred embodiments of the invention, the anti-angiogenic compounds are applied after hepatic resections for malignancy, and after neurosurgical operations.

[0731] Within one aspect of the present invention, polynucleotides, polypeptides, agonists and/or agonists may be administered to the resection margin of a wide variety of tumors, including for example, breast, colon, brain and hepatic tumors. For example, within one embodiment of the invention, anti-angiogenic compounds may be administered to the site of a neurological tumor subsequent to excision, such that the formation of new blood vessels at the site are inhibited.

[0732] The polynucleotides, polypeptides, agonists and/or agonists of the present invention may also be administered along with other anti-angiogenic factors. Representative examples of other anti-angiogenic factors include: Anti-Invasive Factor, retinoic acid and derivatives thereof, paclitaxel, Suramin, Tissue Inhibitor of Metalloproteinase-1, Tissue Inhibitor of Metalloproteinase-2, Plasminogen Activator Inhibitor-1, Plasminogen Activator Inhibitor-2, and various forms of the lighter “d group” transition metals.

[0733] Lighter “d group” transition metals include, for example, vanadium, molybdenum, tungsten, titanium, niobium, and tantalum species. Such transition metal species may form transition metal complexes. Suitable complexes of the above-mentioned transition metal species include oxo transition metal complexes.

[0734] Representative examples of vanadium complexes include oxo vanadium complexes such as vanadate and vanadyl complexes. Suitable vanadate complexes include metavanadate and orthovanadate complexes such as, for example, ammonium metavanadate, sodium metavanadate, and sodium orthovanadate. Suitable vanadyl complexes include, for example, vanadyl acetylacetonate and vanadyl sulfate including vanadyl sulfate hydrates such as vanadyl sulfate mono- and trihydrates.

[0735] Representative examples of tungsten and molybdenum complexes also include oxo complexes. Suitable oxo tungsten complexes include tungstate and tungsten oxide complexes. Suitable tungstate complexes include ammonium tungstate, calcium tungstate, sodium tungstate dihydrate, and tungstic acid. Suitable tungsten oxides include tungsten (IV) oxide and tungsten (VI) oxide. Suitable oxo molybdenum complexes include molybdate, molybdenum oxide, and molybdenyl complexes. Suitable molybdate complexes include ammonium molybdate and its hydrates, sodium molybdate and its hydrates, and potassium molybdate and its hydrates. Suitable molybdenum oxides include molybdenum (VI) oxide, molybdenum (VI) oxide, and molybdic acid. Suitable molybdenyl complexes include, for example, molybdenyl acetylacetonate. Other suitable tungsten and molybdenum complexes include hydroxo derivatives derived from, for example, glycerol, tartaric acid, and sugars.

[0736] A wide variety of other anti-angiogenic factors may also be utilized within the context of the present invention. Representative examples include platelet factor 4; protamine sulphate; sulphated chitin derivatives (prepared from queen crab shells), (Murata et al., Cancer Res. 51:22-26, 1991); Sulphated Polysaccharide Peptidoglycan Complex (SP-PG) (the function of this compound may be enhanced by the presence of steroids such as estrogen, and tamoxifen citrate); Staurosporine; modulators of matrix metabolism, including for example, proline analogs, cishydroxyproline, d,L-3,4-dehydroproline, Thiaproline, alpha,alpha-dipyridyl, aminopropionitrile fumarate; 4-propyl-5-(4-pyridinyl)-2(3H)-oxazolone; Methotrexate; Mitoxantrone; Heparin; Interferons; 2 Macroglobulin-serum; ChIMP-3 (Pavloff et al., J. Bio. Chem. 267:17321-17326, 1992); Chymostatin (Tomkinson et al., Biochem J. 286:475-480, 1992); Cyclodextrin Tetradecasulfate; Eponemycin; Camptothecin; Fumagillin (Ingber et al., Nature 348:555-557, 1990); Gold Sodium Thiomalate (“GST”; Matsubara and Ziff, J. Clin. Invest. 79:1440-1446, 1987); anticollagenase-serum; alpha2-antiplasmin (Holmes et al., J. Biol. Chem. 262(4):1659-1664, 1987); Bisantrene (National Cancer Institute); Lobenzarit disodium (N-(2)-carboxyphenyl-4-chloroanthronilic acid disodium or “CCA”; Takeuchi et al., Agents Actions 36:312-316, 1992); Thalidomide; Angostatic steroid; AGM-1470; carboxynaminolmidazole; and metalloproteinase inhibitors such as BB94.

Diseases at the Cellular Level

[0737] Diseases associated with increased cell survival or the inhibition of apoptosis that could be treated, prevented, diagnosed, and/or prognosed using polynucleotides or polypeptides, as well as antagonists or agonists of the present invention, include cancers (such as follicular lymphomas, carcinomas with p53 mutations, and hormone-dependent tumors, including, but not limited to colon cancer, cardiac tumors, pancreatic cancer, melanoma, retinoblastoma, glioblastoma, lung cancer, intestinal cancer, testicular cancer, stomach cancer, neuroblastoma, myxoma, myoma, lymphoma, endothelioma, osteoblastoma, osteoclastoma, osteosarcoma, chondrosarcoma, adenoma, breast cancer, prostate cancer, Kaposi's sarcoma and ovarian cancer); autoimmune disorders (such as, multiple sclerosis, Sjogren's syndrome, Hashimoto's thyroiditis, biliary cirrhosis, Behcet's disease, Crohn's disease, polymyositis, systemic lupus erythematosus and immune-related glomerulonephritis and rheumatoid arthritis) and viral infections (such as herpes viruses, pox viruses and adenoviruses), inflammation, graft v. host disease, acute graft rejection, and chronic graft rejection.

[0738] In preferred embodiments, polynucleotides, polypeptides, and/or antagonists of the invention are used to inhibit growth, progression, and/or metasis of cancers, in particular those listed above.

[0739] Additional diseases or conditions associated with increased cell survival that could be treated or detected by polynucleotides or polypeptides, or agonists or antagonists of the present invention include, but are not limited to, progression, and/or metastases of malignancies and related disorders such as leukemia (including acute leukemias (e.g., acute lymphocytic leukemia, acute myelocytic leukemia (including myeloblastic, promyelocytic, myelomonocytic, monocytic, and erythroleukemia)) and chronic leukemias (e.g., chronic myelocytic (granulocytic) leukemia and chronic lymphocytic leukemia)), polycythemia vera, lymphomas (e.g., Hodgkin's disease and non-Hodgkin's disease), multiple myeloma, Waldenstrom's macroglobulinemia, heavy chain disease, and solid tumors including, but not limited to, sarcomas and carcinomas such as fibrosarcoma, myxosarcoma, liposarcoma, chondrosarcoma, osteogenic sarcoma, chordoma, angiosarcoma, endotheliosarcoma, lymphangiosarcoma, lymphangioendotheliosarcoma, synovioma, mesothelioma, Ewing's tumor, leiomyosarcoma, rhabdomyosarcoma, colon carcinoma, pancreatic cancer, breast cancer, ovarian cancer, prostate cancer, squamous cell carcinoma, basal cell carcinoma, adenocarcinoma, sweat gland carcinoma, sebaceous gland carcinoma, papillary carcinoma, papillary adenocarcinomas, cystadenocarcinoma, medullary carcinoma, bronchogenic carcinoma, renal cell carcinoma, hepatoma, bile duct carcinoma, choriocarcinoma, seminoma, embryonal carcinoma, Wilm's tumor, cervical cancer, testicular tumor, lung carcinoma, small cell lung carcinoma, bladder carcinoma, epithelial carcinoma, glioma, astrocytoma, medulloblastoma, craniopharyngioma, ependymoma, pinealoma, hemangioblastoma, acoustic neuroma, oligodendroglioma, menangioma, melanoma, neuroblastoma, and retinoblastoma.

[0740] Diseases associated with increased apoptosis that could be treated, prevented, diagnosed, and/or prognesed using polynucleotides or polypeptides, as well as agonists or antagonists of the present invention, include, but are not limited to, AIDS; neurodegenerative disorders (such as Alzheimer's disease, Parkinson's disease, Amyotrophic lateral sclerosis, Retinitis pigrnentosa, Cerebellar degeneration and brain tumor or prior associated disease); autoimmune disorders (such as, multiple sclerosis, Sjogren's syndrome, Hashimoto's thyroiditis, biliary cirrhosis, Behcet's disease, Crohn's disease, polymyositis, systemic lupus erythematosus and immune-related glomerulonephritis and rheumatoid arthritis) myelodysplastic syndromes (such as aplastic anemia), graft v. host disease, ischemic injury (such as that caused by myocardial infarction, stroke and reperfusion injury), liver injury (e.g., hepatitis related liver injury, ischemia/reperfusion injury, cholestosis (bile duct injury) and liver cancer); toxin-induced liver disease (such as that caused by alcohol), septic shock, cachexia and anorexia.

Wound Healing and Epithelial Cell Proliferation

[0741] In accordance with yet a further aspect of the present invention, there is provided a process for utilizing polynucleotides or polypeptides, as well as agonists or antagonists of the present invention, for therapeutic purposes, for example, to stimulate epithelial cell proliferation and basal keratinocytes for the purpose of wound healing, and to stimulate hair follicle production and healing of dermal wounds. Polynucleotides or polypeptides, as well as agonists or antagonists of the present invention, may be clinically useful in stimulating wound healing including surgical wounds, excisional wounds, deep wounds involving damage of the dermis and epidermis, eye tissue wounds, dental tissue wounds, oral cavity wounds, diabetic ulcers, dermal ulcers, cubitus ulcers, arterial ulcers, venous stasis ulcers, burns resulting from heat exposure or chemicals, and other abnormal wound healing conditions such as uremia, malnutrition, vitamin deficiencies and complications associated with systemic treatment with steroids, radiation therapy and antineoplastic drugs and antimetabolites. Polynucleotides or polypeptides, as well as agonists or antagonists of the present invention, could be used to promote dermal reestablishment subsequent to dermal loss.

[0742] Polynucleotides or polypeptides, as well as agonists or antagonists of the present invention, could be used to increase the adherence of skin grafts to a wound bed and to stimulate re-epithelialization from the wound bed. The following are types of grafts that polynucleotides or polypeptides, agonists or antagonists of the present invention, could be used to increase adherence to a wound bed: autografts, artificial skin, allografts, autodermic graft, autoepdermic grafts, avacular grafts, Blair-Brown grafts, bone graft, brephoplastic grafts, cutis graft, delayed graft, dermic graft, epidermic graft, fascia graft, full thickness graft, heterologous graft, xenograft, homologous graft, hyperplastic graft, lamellar graft, mesh graft, mucosal graft, Ollier-Thiersch graft, omenpal graft, patch graft, pedicle graft, penetrating graft, split skin graft, thick split graft. Polynucleotides or polypeptides, as well as agonists or antagonists of the present invention, can be used to promote skin strength and to improve the appearance of aged skin.

[0743] It is believed that polynucleotides or polypeptides, as well as agonists or antagonists of the present invention, will also produce changes in hepatocyte proliferation, and epithelial cell proliferation in the lung, breast, pancreas, stomach, small intestine, and large intestine. Polynucleotides or polypeptides, as well as agonists or antagonists of the present invention, could promote proliferation of epithelial cells such as sebocytes, hair follicles, hepatocytes, type II pneumocytes, mucin-producing goblet cells, and other epithelial cells and their progenitors contained within the skin, lung, liver, and gastrointestinal tract. Polynucleotides or polypeptides, agonists or antagonists of the present invention, may promote proliferation of endothelial cells, keratinocytes, and basal keratinocytes.

[0744] Polynucleotides or polypeptides, as well as agonists or antagonists of the present invention, could also be used to reduce the side effects of gut toxicity that result from radiation, chemotherapy treatments or viral infections. Polynucleotides or polypeptides, as well as agonists or antagonists of the present invention, may have a cytoprotective effect on the small intestine mucosa. Polynucleotides or polypeptides, as well as agonists or antagonists of the present invention, may also stimulate healing of mucositis (mouth ulcers) that result from chemotherapy and viral infections.

[0745] Polynucleotides or polypeptides, as well as agonists or antagonists of the present invention, could further be used in full regeneration of skin in full and partial thickness skin defects, including burns, (i.e., repopulation of hair follicles, sweat glands, and sebaceous glands), treatment of other skin defects such as psoriasis. Polynucleotides or polypeptides, as well as agonists or antagonists of the present invention, could be used to treat epidermolysis bullosa, a defect in adherence of the epidermis to the underlying dermis which results in frequent, open and painful blisters by accelerating reepithelialization of these lesions. Polynucleotides or polypeptides, as well as agonists or antagonists of the present invention, could also be used to treat gastric and doudenal ulcers and help heal by scar formation of the mucosal lining and regeneration of glandular mucosa and duodenal mucosal lining more rapidly. Inflammatory bowel diseases, such as Crohn's disease and ulcerative colitis, are diseases which result in destruction of the mucosal surface of the small or large intestine, respectively. Thus, polynucleotides or polypeptides, as well as agonists or antagonists of the present invention, could be used to promote the resurfacing of the mucosal surface to aid more rapid healing and to prevent progression of inflammatory bowel disease. Treatment with polynucleotides or polypeptides, agonists or antagonists of the present invention, is expected to have a significant effect on the production of mucus throughout the gastrointestinal tract and could be used to protect the intestinal mucosa from injurious substances that are ingested or following surgery. Polynucleotides or polypeptides, as well as agonists or antagonists of the present invention, could be used to treat diseases associate with the under expression.

[0746] Moreover, polynucleotides or polypeptides, as well as agonists or antagonists of the present invention, could be used to prevent and heal damage to the lungs due to various pathological states. Polynucleotides or polypeptides, as well as agonists or antagonists of the present invention, which could stimulate proliferation and differentiation and promote the repair of alveoli and brochiolar epithelium to prevent or treat acute or chronic lung damage. For example, emphysema, which results in the progressive loss of aveoli, and inhalation injuries, i.e., resulting from smoke inhalation and burns, that cause necrosis of the bronchiolar epithelium and alveoli could be effectively treated using polynucleotides or polypeptides, agonists or antagonists of the present invention. Also, polynucleotides or polypeptides, as well as agonists or antagonists of the present invention, could be used to stimulate the proliferation of and differentiation of type II pneumocytes, which may help treat or prevent disease such as hyaline membrane diseases, such as infant respiratory distress syndrome and bronchopulmonary displasia, in premature infants.

[0747] Polynucleotides or polypeptides, as well as agonists or antagonists of the present invention, could stimulate the proliferation and differentiation of hepatocytes and, thus, could be used to alleviate or treat liver diseases and pathologies such as fulminant liver failure caused by cirrhosis, liver damage caused by viral hepatitis and toxic substances (i.e., acetaminophen, carbon tetraholoride and other hepatotoxins known in the art).

[0748] In addition, polynucleotides or polypeptides, as well as agonists or antagonists of the present invention, could be used treat or prevent the onset of diabetes mellitus. In patients with newly diagnosed Types I and II diabetes, where some islet cell function remains, polynucleotides or polypeptides, as well as agonists or antagonists of the present invention, could be used to maintain the islet function so as to alleviate, delay or prevent permanent manifestation of the disease. Also, polynucleotides or polypeptides, as well as agonists or antagonists of the present invention, could be used as an auxiliary in islet cell transplantation to improve or promote islet cell function.

Neural Activity and Neurological Diseases

[0749] The polynucleotides, polypeptides and agonists or antagonists of the invention may be used for the diagnosis and/or treatment of diseases, disorders, damage or injury of the brain and/or nervous system. Nervous system disorders that can be treated with the compositions of the invention (e.g., polypeptides, polynucleotides, and/or agonists or antagonists), include, but are not limited to, nervous system injuries, and diseases or disorders which result in either a disconnection of axons, a diminution or degeneration of neurons, or demyelination. Nervous system lesions which may be treated in a patient (including human and non-human mammalian patients) according to the methods of the invention, include but are not limited to, the following lesions of either the central (including spinal cord, brain) or peripheral nervous systems: (1) ischemic lesions, in which a lack of oxygen in a portion of the nervous system results in neuronal injury or death, including cerebral infarction or ischemia, or spinal cord infarction or ischemia; (2) traumatic lesions, including lesions caused by physical injury or associated with surgery, for example, lesions which sever a portion of the nervous system, or compression injuries; (3) malignant lesions, in which a portion of the nervous system is destroyed or injured by malignant tissue which is either a nervous system associated malignancy or a malignancy derived from non-nervous system tissue; (4) infectious lesions, in which a portion of the nervous system is destroyed or injured as a result of infection, for example, by an abscess or associated with infection by human immunodeficiency virus, herpes zoster, or herpes simplex virus or with Lyme disease, tuberculosis, or syphilis; (5) degenerative lesions, in which a portion of the nervous system is destroyed or injured as a result of a degenerative process including but not limited to, degeneration associated with Parkinson's disease, Alzheimer's disease, Huntington's chorea, or amyotrophic lateral sclerosis (ALS); (6) lesions associated with nutritional diseases or disorders, in which a portion of the nervous system is destroyed or injured by a nutritional disorder or disorder of metabolism including, but not limited to, vitamin B12 deficiency, folic acid deficiency, Wernicke disease, tobacco-alcohol amblyopia, Marchiafava-Bignami disease (primary degeneration of the corpus callosum), and alcoholic cerebellar degeneration; (7) neurological lesions associated with systemic diseases including, but not limited to, diabetes (diabetic neuropathy, Bell's palsy), systemic lupus erythematosus, carcinoma, or sarcoidosis; (8) lesions caused by toxic substances including alcohol, lead, or particular neurotoxins; and (9) demyelinated lesions in which a portion of the nervous system is destroyed or injured by a demyelinating disease including, but not limited to, multiple sclerosis, human immunodeficiency virus-associated myelopathy, transverse myelopathy or various etiologies, progressive multifocal leukoencephalopathy, and central pontine myelinolysis.

[0750] In one embodiment, the polypeptides, polynucleotides, or agonists or antagonists of the invention are used to protect neural cells from the damaging effects of hypoxia. In a further preferred embodiment, the polypeptides, polynucleotides, or agonists or antagonists of the invention are used to protect neural cells from the damaging effects of cerebral hypoxia. According to this embodiment, the compositions of the invention are used to treat or prevent neural cell injury associated with cerebral hypoxia. In one non-exclusive aspect of this embodiment, the polypeptides, polynucleotides, or agonists or antagonists of the invention, are used to treat or prevent neural cell injury associated with cerebral ischemia. In another non-exclusive aspect of this embodiment, the polypeptides, polynucleotides, or agonists or antagonists of the invention are used to treat or prevent neural cell injury associated with cerebral infarction.

[0751] In another preferred embodiment, the polypeptides, polynucleotides, or agonists or antagonists of the invention are used to treat or prevent neural cell injury associated with a stroke. In a specific embodiment, the polypeptides, polynucleotides, or agonists or antagonists of the invention are used to treat or prevent cerebral neural cell injury associated with a stroke.

[0752] In another preferred embodiment, the polypeptides, polynucleotides, or agonists or antagonists of the invention are used to treat or prevent neural cell injury associated with a heart attack. In a specific embodiment, the polypeptides, polynucleotides, or agonists or antagonists of the invention are used to treat or prevent cerebral neural cell injury associated with a heart attack.

[0753] The compositions of the invention which are useful for treating or preventing a nervous system disorder may be selected by testing for biological activity in promoting the survival or differentiation of neurons. For example, and not by way of limitation, compositions of the invention which elicit any of the following effects may be useful according to the invention: (1) increased survival time of neurons in culture either in the presence or absence of hypoxia or hypoxic conditions; (2) increased sprouting of neurons in culture or in vivo; (3) increased production of a neuron-associated molecule in culture or in vivo, e.g., choline acetyltransferase or acetylcholinesterase with respect to motor neurons; or (4) decreased symptoms of neuron dysfunction in vivo. Such effects may be measured by any method known in the art. In preferred, non-limiting embodiments, increased survival of neurons may routinely be measured using a method set forth herein or otherwise known in the art, such as, for example, in Zhang et al., Proc Natl Acad Sci USA 97:3637-42 (2000) or in Arakawa et al., J. Neurosci., 10:3507-15 (1990); increased sprouting of neurons may be detected by methods known in the art, such as, for example, the methods set forth in Pestronk et al., Exp. Neurol., 70:65-82 (1980), or Brown et al., Ann. Rev. Neurosci., 4:17-42 (1981); increased production of neuron-associated molecules may be measured by bioassay, enzymatic assay, antibody binding, Northern blot assay, etc., using techniques known in the art and depending on the molecule to be measured; and motor neuron dysfunction may be measured by assessing the physical manifestation of motor neuron disorder, e.g., weakness, motor neuron conduction velocity, or functional disability.

[0754] In specific embodiments, motor neuron disorders that may be treated according to the invention include, but are not limited to, disorders such as infarction, infection, exposure to toxin, trauma, surgical damage, degenerative disease or malignancy that may affect motor neurons as well as other components of the nervous system, as well as disorders that selectively affect neurons such as amyotrophic lateral sclerosis, and including, but not limited to, progressive spinal muscular atrophy, progressive bulbar palsy, primary lateral sclerosis, infantile and juvenile muscular atrophy, progressive bulbar paralysis of childhood (Fazio-Londe syndrome), poliomyelitis and the post polio syndrome, and Hereditary Motorsensory Neuropathy (Charcot-Marie-Tooth Disease).

[0755] Further, polypeptides or polynucleotides of the invention may play a role in neuronal survival; synapse formation; conductance; neural differentiation, etc. Thus, compositions of the invention (including polynucleotides, polypeptides, and agonists or antagonists) may be used to diagnose and/or treat or prevent diseases or disorders associated with these roles, including, but not limited to, learning and/or cognition disorders. The compositions of the invention may also be useful in the treatment or prevention of neurodegenerative disease states and/or behavioural disorders. Such neurodegenerative disease states and/or behavioral disorders include, but are not limited to, Alzheimer's Disease, Parkinson's Disease, Huntington's Disease, Tourette Syndrome, schizophrenia, mania, dementia, paranoia, obsessive compulsive disorder, panic disorder, learning disabilities, ALS, psychoses, autism, and altered behaviors, including disorders in feeding, sleep patterns, balance, and perception. In addition, compositions of the invention may also play a role in the treatment, prevention and/or detection of developmental disorders associated with the developing embryo, or sexually-linked disorders.

[0756] Additionally, polypeptides, polynucleotides and/or agonists or antagonists of the invention, may be useful in protecting neural cells from diseases, damage, disorders, or injury, associated with cerebrovascular disorders including, but not limited to, carotid artery diseases (e.g., carotid artery thrombosis, carotid stenosis, or Moyamoya Disease), cerebral amyloid angiopathy, cerebral aneurysm, cerebral anoxia, cerebral arteriosclerosis, cerebral arteriovenous malformations, cerebral artery diseases, cerebral embolism and thrombosis (e.g., carotid artery thrombosis, sinus thrombosis, or Wallenberg's Syndrome), cerebral hemorrhage (e.g., epidural or subdural hematoma, or subarachnoid hemorrhage), cerebral infarction, cerebral ischemia (e.g., transient cerebral ischemia, Subclavian Steal Syndrome, or vertebrobasilar insufficiency), vascular dementia (e.g., multi-infarct), leukomalacia, periventricular, and vascular headache (e.g., cluster headache or migraines).

[0757] In accordance with yet a further aspect of the present invention, there is provided a process for utilizing polynucleotides or polypeptides, as well as agonists or antagonists of the present invention, for therapeutic purposes, for example, to stimulate neurological cell proliferation and/or differentiation. Therefore, polynucleotides, polypeptides, agonists and/or antagonists of the invention may be used to treat and/or detect neurologic diseases. Moreover, polynucleotides or polypeptides, or agonists or antagonists of the invention, can be used as a marker or detector of a particular nervous system disease or disorder.

[0758] Examples of neurologic diseases which can be treated or detected with polynucleotides, polypeptides, agonists, and/or antagonists of the present invention include brain diseases, such as metabolic brain diseases which includes phenylketonuria such as maternal phenylketonuria, pyruvate carboxylase deficiency, pyruvate dehydrogenase complex deficiency, Wernicke's Encephalopathy, brain edema, brain neoplasms such as cerebellar neoplasms which include infratentorial neoplasms, cerebral ventricle neoplasms such as choroid plexus neoplasms, hypothalamic neoplasms, supratentorial neoplasms, canavan disease, cerebellar diseases such as cerebellar ataxia which include spinocerebellar degeneration such as ataxia telangiectasia, cerebellar dyssynergia, Friederich's Ataxia, Machado-Joseph Disease, olivopontocerebellar atrophy, cerebellar neoplasms such as infratentorial neoplasms, diffuse cerebral sclerosis such as encephalitis periaxialis, globoid cell leukodystrophy, metachromatic leukodystrophy and subacute sclerosing panencephalitis.

[0759] Additional neurologic diseases which can be treated or detected with polynucleotides, polypeptides, agonists, and/or antagonists of the present invention include cerebrovascular disorders (such as carotid artery diseases which include carotid artery thrombosis, carotid stenosis and Moyamoya Disease), cerebral amyloid angiopathy, cerebral aneurysm, cerebral anoxia, cerebral arteriosclerosis, cerebral arteriovenous malformations, cerebral artery diseases, cerebral embolism and thrombosis such as carotid artery thrombosis, sinus thrombosis and Wallenberg's Syndrome, cerebral hemorrhage such as epidural hematoma, subdural hematoma and subarachnoid hemorrhage, cerebral infarction, cerebral ischemia such as transient cerebral ischemia, Subclavian Steal Syndrome and vertebrobasilar insufficiency, vascular dementia such as multi-infarct dementia, periventricular leukomalacia, vascular headache such as cluster headache and migraine.

[0760] Additional neurologic diseases which can be treated or detected with polynucleotides, polypeptides, agonists, and/or antagonists of the present invention include dementia such as AIDS Dementia Complex, presenile dementia such as Alzheimer's Disease and Creutzfeldt-Jakob Syndrome, senile dementia such as Alzheimer's Disease and progressive supranuclear palsy, vascular dementia such as multi-infarct dementia, encephalitis which include encephalitis periaxialis, viral encephalitis such as epidemic encephalitis, Japanese Encephalitis, St. Louis Encephalitis, tick-borne encephalitis and West Nile Fever, acute disseminated encephalomyelitis, meningoencephalitis such as uveomeningoencephalitic syndrome, Postencephalitic Parkinson Disease and subacute sclerosing panencephalitis, encephalomalacia such as periventricular leukomalacia, epilepsy such as generalized epilepsy which includes infantile spasms, absence epilepsy, myoclonic epilepsy which includes MERRF Syndrome, tonic-clonic epilepsy, partial epilepsy such as complex partial epilepsy, frontal lobe epilepsy and temporal lobe epilepsy, post-traumatic epilepsy, status epilepticus such as Epilepsia Partialis Continua, and Hallervorden-Spatz Syndrome.

[0761] Additional neurologic diseases which can be treated or detected with polynucleotides, polypeptides, agonists, and/or antagonists of the present invention include hydrocephalus such as Dandy-Walker Syndrome and normal pressure hydrocephalus, hypothalamic diseases such as hypothalamic neoplasms, cerebral malaria, narcolepsy which includes cataplexy, bulbar poliomyelitis, cerebri pseudotumor, Rett Syndrome, Reye's Syndrome, thalamic diseases, cerebral toxoplasmosis, intracranial tuberculoma and Zellweger Syndrome, central nervous system infections such as AIDS Dementia Complex, Brain Abscess, subdural empyema, encephalomyelitis such as Equine Encephalomyelitis, Venezuelan Equine Encephalomyelitis, Necrotizing Hemorrhagic Encephalomyelitis, Visna, and cerebral malaria.

[0762] Additional neurologic diseases which can be treated or detected with polynucleotides, polypeptides, agonists, and/or antagonists of the present invention include meningitis such as arachnoiditis, aseptic meningtitis such as viral meningtitis which includes lymphocytic choriomeningitis, Bacterial meningtitis which includes Haemophilus Meningtitis, Listeria Meningtitis, Meningococcal Meningtitis such as Waterhouse-Friderichsen Syndrome, Pneumococcal Meningtitis and meningeal tuberculosis, fungal meningitis such as Cryptococcal Meningtitis, subdural effusion, meningoencephalitis such as uvemeningoencephalitic syndrome, myelitis such as transverse myelitis, neurosyphilis such as tabes dorsalis, poliomyelitis which includes bulbar poliomyelitis and postpoliomyelitis syndrome, prion diseases (such as Creutzfeldt-Jakob Syndrome, Bovine Spongiform Encephalopathy, Gerstmann-Straussler Syndrome, Kuru, Scrapie), and cerebral toxoplasmosis.

[0763] Additional neurologic diseases which can be treated or detected with polynucleotides, polypeptides, agonists, and/or antagonists of the present invention include central nervous system neoplasms such as brain neoplasms that include cerebellar neoplasms such as infratentorial neoplasms, cerebral ventricle neoplasms such as choroid plexus neoplasms, hypothalamic neoplasms and supratentorial neoplasms, meningeal neoplasms, spinal cord neoplasms which include epidural neoplasms, demyelinating diseases such as Canavan Diseases, diffuse cerebral sceloris which includes adrenoleukodystrophy, encephalitis periaxialis, globoid cell leukodystrophy, diffuse cerebral sclerosis such as metachromatic leukodystrophy, allergic encephalomyelitis, necrotizing hemorrhagic encephalomyelitis, progressive multifocal leukoencephalopathy, multiple sclerosis, central pontine myelinolysis, transverse myelitis, neuromyelitis optica, Scrapie, Swayback, Chronic Fatigue Syndrome, Visna, High Pressure Nervous Syndrome, Meningism, spinal cord diseases such as amyotonia congenita, amyotrophic lateral sclerosis, spinal muscular atrophy such as Werdnig-Hoffmann Disease, spinal cord compression, spinal cord neoplasms such as epidural neoplasms, syringomyelia, Tabes Dorsalis, Stiff-Man Syndrome, mental retardation such as Angelman Syndrome, Cri-du-Chat Syndrome, De Lange's Syndrome, Down Syndrome, Gangliosidoses such as gangliosidoses G(M1), Sandhoff Disease, Tay-Sachs Disease, Hartnup Disease, homocystinuria, Laurence-Moon-Biedl Syndrome, Lesch-Nyhan Syndrome, Maple Syrup Urine Disease, mucolipidosis such as fucosidosis, neuronal ceroid-lipofuscinosis, oculocerebrorenal syndrome, phenylketonuria such as maternal phenylketonuria, Prader-Willi Syndrome, Rett Syndrome, Rubinstein-Taybi Syndrome, Tuberous Sclerosis, WAGR Syndrome, nervous system abnormalities such as holoprosencephaly, neural tube defects such as anencephaly which includes hydrangencephaly, Arnold-Chairi Deformity, encephalocele, meningocele, meningomyelocele, spinal dysraphism such as spina bifida cystica and spina bifida occulta.

[0764] Additional neurologic diseases which can be treated or detected with polynucleotides, polypeptides, agonists, and/or antagonists of the present invention include hereditary motor and sensory neuropathies which include Charcot-Marie Disease, Hereditary optic atrophy, Refsum's Disease, hereditary spastic paraplegia, Werdnig-Hoffmann Disease, Hereditary Sensory and Autonomic Neuropathies such as Congenital Analgesia and Familial Dysautonomia, Neurologic manifestations (such as agnosia that include Gerstmann's Syndrome, Amnesia such as retrograde amnesia, apraxia, neurogenic bladder, cataplexy, communicative disorders such as hearing disorders that includes deaffiess, partial hearing loss, loudness recruitment and tinnitus, language disorders such as aphasia which include agraphia, anomia, broca aphasia, and Wernicke Aphasia, Dyslexia such as Acquired Dyslexia, language development disorders, speech disorders such as aphasia which includes anomia, broca aphasia and Wernicke Aphasia, articulation disorders, communicative disorders such as speech disorders which include dysarthria, echolalia, mutism and stuttering, voice disorders such as aphonia and hoarseness, decerebrate state, delirium, fasciculation, hallucinations, meningism, movement disorders such as angelman syndrome, ataxia, athetosis, chorea, dystonia, hypokinesia, muscle hypotonia, myoclonus, tic, torticollis and tremor, muscle hypertonia such as muscle rigidity such as stiff-man syndrome, muscle spasticity, paralysis such as facial paralysis which includes Herpes Zoster Oticus, Gastroparesis, Hemiplegia, ophthalmoplegia such as diplopia, Duane's Syndrome, Horner's Syndrome, Chronic progressive external ophthalmoplegia such as Kearns Syndrome, Bulbar Paralysis, Tropical Spastic Paraparesis, Paraplegia such as Brown-Sequard Syndrome, quadriplegia, respiratory paralysis and vocal cord paralysis, paresis, phantom limb, taste disorders such as ageusia and dysgeusia, vision disorders such as amblyopia, blindness, color vision defects, diplopia, hemianopsia, scotoma and subnormal vision, sleep disorders such as hypersomnia which includes Kleine-Levin Syndrome, insomnia, and somnambulism, spasm such as trismus, unconsciousness such as coma, persistent vegetative state and syncope and vertigo, neuromuscular diseases such as amyotonia congenita, amyotrophic lateral sclerosis, Lambert-Eaton Myasthenic Syndrome, motor neuron disease, muscular atrophy such as spinal muscular atrophy, Charcot-Marie Disease and Werdnig-Hoffmann Disease, Postpoliomyelitis Syndrome, Muscular Dystrophy, Myasthenia Gravis, Myotonia Atrophica, Myotonia Confenita, Nemaline Myopathy, Familial Periodic Paralysis, Multiplex Paramyloclonus, Tropical Spastic Paraparesis and Stiff-Man Syndrome, peripheral nervous system diseases such as acrodynia, arnyloid neuropathies, autonomic nervous system diseases such as Adie's Syndrome, Barre-Lieou Syndrome, Familial Dysautonomia, Horner's Syndrome, Reflex Sympathetic Dystrophy and Shy-Drager Syndrome, Cranial Nerve Diseases such as Acoustic Nerve Diseases such as Acoustic Neuroma which includes Neurofibromatosis 2, Facial Nerve Diseases such as Facial Neuralgia, Melkersson-Rosenthal Syndrome, ocular motility disorders which includes amblyopia, nystagmus, oculomotor nerve paralysis, ophthalmoplegia such as Duane's Syndrome, Horner's Syndrome, Chronic Progressive External Ophthalmoplegia which includes Kearns Syndrome, Strabismus such as Esotropia and Exotropia, Oculomotor Nerve Paralysis, Optic Nerve Diseases such as Optic Atrophy which includes Hereditary Optic Atrophy, Optic Disk Drusen, Optic Neuritis such as Neuromyelitis Optica, Papilledema, Trigeminal Neuralgia, Vocal Cord Paralysis, Demyelinating Diseases such as Neuromyelitis Optica and Swayback, and Diabetic neuropathies such as diabetic foot.

[0765] Additional neurologic diseases which can be treated or detected with polynucleotides, polypeptides, agonists, and/or antagonists of the present invention include nerve compression syndromes such as carpal tunnel syndrome, tarsal tunnel syndrome, thoracic outlet syndrome such as cervical rib syndrome, ulnar nerve compression syndrome, neuralgia such as causalgia, cervico-brachial neuralgia, facial neuralgia and trigeminal neuralgia, neuritis such as experimental allergic neuritis, optic neuritis, polyneuritis, polyradiculoneuritis and radiculities such as polyradiculitis, hereditary motor and sensory neuropathies such as Charcot-Marie Disease, Hereditary Optic Atrophy, Refsum's Disease, Hereditary Spastic Paraplegia and Werdnig-Hoffmann Disease, Hereditary Sensory and Autonomic Neuropathies which include Congenital Analgesia and Familial Dysautonomia, POEMS Syndrome, Sciatica, Gustatory Sweating and Tetany).

Endocrine Disorders

[0766] Polynucleotides or polypeptides, or agonists or antagonists of the present invention, may be used to treat, prevent, diagnose, and/or prognose disorders and/or diseases related to hormone imbalance, and/or disorders or diseases of the endocrine system.

[0767] Hormones secreted by the glands of the endocrine system control physical growth, sexual function, metabolism, and other functions. Disorders may be classified in two ways: disturbances in the production of hormones, and the inability of tissues to respond to hormones. The etiology of these hormone imbalance or endocrine system diseases, disorders or conditions may be genetic, somatic, such as cancer and some autoimmune diseases, acquired (e.g., by chemotherapy, injury or toxins), or infectious. Moreover, polynucleotides, polypeptides, antibodies, and/or agonists or antagonists of the present invention can be used as a marker or detector of a particular disease or disorder related to the endocrine system and/or hormone imbalance.

[0768] Endocrine system and/or hormone imbalance and/or diseases encompass disorders of uterine motility including, but not limited to: complications with pregnancy and labor (e.g., pre-term labor, post-term pregnancy, spontaneous abortion, and slow or stopped labor); and disorders and/or diseases of the menstrual cycle (e.g., dysmenorrhea and endometriosis).

[0769] Endocrine system and/or hormone imbalance disorders and/or diseases include disorders and/or diseases of the pancreas, such as, for example, diabetes mellitus, diabetes insipidus, congenital pancreatic agenesis, pheochromocytoma—islet cell tumor syndrome; disorders and/or diseases of the adrenal glands such as, for example, Addison's Disease, corticosteroid deficiency, virilizing disease, hirsutism, Cushing's Syndrome, hyperaldosteronism, pheochromocytoma; disorders and/or diseases of the pituitary gland, such as, for example, hyperpituitarism, hypopituitarism, pituitary dwarfism, pituitary adenoma, panhypopituitarism, acromegaly, gigantism; disorders and/or diseases of the thyroid, including but not limited to, hyperthyroidism, hypothyroidism, Plummer's disease, Graves' disease (toxic diffuse goiter), toxic nodular goiter, thyroiditis (Hashimoto's thyroiditis, subacute granulomatous thyroiditis, and silent lymphocytic thyroiditis), Pendred's syndrome, myxedema, cretinism, thyrotoxicosis, thyroid hormone coupling defect, thymic aplasia, Hurthle cell tumours of the thyroid, thyroid cancer, thyroid carcinoma, Medullary thyroid carcinoma; disorders and/or diseases of the parathyroid, such as, for example, hyperparathyroidism, hypoparathyroidism; disorders and/or diseases of the hypothalamus.

[0770] In addition, endocrine system and/or hormone imbalance disorders and/or diseases may also include disorders and/or diseases of the testes or ovaries, including cancer. Other disorders and/or diseases of the testes or ovaries further include, for example, ovarian cancer, polycystic ovary syndrome, Klinefelter's syndrome, vanishing testes syndrome (bilateral anorchia), congenital absence of Leydig's cells, cryptorchidism, Noonan's syndrome, myotonic dystrophy, capillary haemangioma of the testis (benign), neoplasias of the testis and neo-testis.

[0771] Moreover, endocrine system and/or hormone imbalance disorders and/or diseases may also include disorders and/or diseases such as, for example, polyglandular deficiency syndromes, pheochromocytoma, neuroblastoma, multiple Endocrine neoplasia, and disorders and/or cancers of endocrine tissues.

[0772] In another embodiment, a polypeptide of the invention, or polynucleotides, antibodies, agonists, or antagonists corresponding to that polypeptide, may be used to diagnose, prognose, prevent, and/or treat endocrine diseases and/or disorders associated with the tissue(s) in which the polypeptide of the invention is expressed, including one, two, three, four, five, or more tissues disclosed in Table 1B, column 8 (Tissue Distribution Library Code).

Reproductive System Disorders

[0773] The polynucleotides or polypeptides, or agonists or antagonists of the invention may be used for the diagnosis, treatment, or prevention of diseases and/or disorders of the reproductive system. Reproductive system disorders that can be treated by the compositions of the invention, include, but are not limited to, reproductive system injuries, infections, neoplastic disorders, congenital defects, and diseases or disorders which result in infertility, complications with pregnancy, labor, or parturition, and postpartum difficulties.

[0774] Reproductive system disorders and/or diseases include diseases and/or disorders of the testes, including testicular atrophy, testicular feminization, cryptorchism (unilateral and bilateral), anorchia, ectopic testis, epididymitis and orchitis (typically resulting from infections such as, for example, gonorrhea, mumps, tuberculosis, and syphilis), testicular torsion, vasitis nodosa, germ cell tumors (e.g., seminomas, embryonal cell carcinomas, teratocarcinomas, choriocarcinomas, yolk sac tumors, and teratomas), stromal tumors (e.g., Leydig cell tumors), hydrocele, hematocele, varicocele, spermatocele, inguinal hernia, and disorders of sperm production (e.g., immotile cilia syndrome, aspermia, asthenozoospermia, azoospermia, oligospermia, and teratozoospermia).

[0775] Reproductive system disorders also include disorders of the prostate gland, such as acute non-bacterial prostatitis, chronic non-bacterial prostatitis, acute bacterial prostatitis, chronic bacterial prostatitis, prostatodystonia, prostatosis, granulomatous prostatitis, malacoplakia, benign prostatic hypertrophy or hyperplasia, and prostate neoplastic disorders, including adenocarcinomas, transitional cell carcinomas, ductal carcinomas, and squamous cell carcinomas.

[0776] Additionally, the compositions of the invention may be useful in the diagnosis, treatment, and/or prevention of disorders or diseases of the penis and urethra, including inflammatory disorders, such as balanoposthitis, balanitis xerotica obliterans, phimosis, paraphimosis, syphilis, herpes simplex virus, gonorrhea, non-gonococcal urethritis, chlamydia, mycoplasma, trichomonas, HIV, AIDS, Reiter's syndrome, condyloma acuminatum, condyloma latum, and pearly penile papules; urethral abnormalities, such as hypospadias, epispadias, and phimosis; premalignant lesions, including Erythroplasia of Queyrat, Bowen's disease, Bowenoid paplosis, giant condyloma of Buscke-Lowenstein, and varrucous carcinoma; penile cancers, including squamous cell carcinomas, carcinoma in situ, verrucous carcinoma, and disseminated penile carcinoma; urethral neoplastic disorders, including penile urethral carcinoma, bulbomembranous urethral carcinoma, and prostatic urethral carcinoma; and erectile disorders, such as priapism, Peyronie's disease, erectile dysfunction, and impotence.

[0777] Moreover, diseases and/or disorders of the vas deferens include vasculititis and CBAVD (congenital bilateral absence of the vas deferens); additionally, the polynucleotides, polypeptides, and agonists or antagonists of the present invention may be used in the diagnosis, treatment, and/or prevention of diseases and/or disorders of the seminal vesicles, including hydatid disease, congenital chloride diarrhea, and polycystic kidney disease.

[0778] Other disorders and/or diseases of the male reproductive system include, for example, Klinefelter's syndrome, Young's syndrome, premature ejaculation, diabetes mellitus, cystic fibrosis, Kartagener's syndrome, high fever, multiple sclerosis, and gynecomastia.

[0779] Further, the polynucleotides, polypeptides, and agonists or antagonists of the present invention may be used in the diagnosis, treatment, and/or prevention of diseases and/or disorders of the vagina and vulva, including bacterial vaginosis, candida vaginitis, herpes simplex virus, chancroid, granuloma inguinale, lymphogranuloma venereum, scabies, human papillomavirus, vaginal trauma, vulvar trauma, adenosis, chlamydia vaginitis, gonorrhea, trichomonas vaginitis, condyloma acuminatum, syphilis, molluscum contagiosum, atrophic vaginitis, Paget's disease, lichen sclerosus, lichen planus, vulvodynia, toxic shock syndrome, vaginismus, vulvovaginitis, vulvar vestibulitis, and neoplastic disorders, such as squamous cell hyperplasia, clear cell carcinoma, basal cell carcinoma, melanomas, cancer of Bartholin's gland, and vulvar intraepithelial neoplasia.

[0780] Disorders and/or diseases of the uterus include dysmenorrhea, retroverted uterus, endometriosis, fibroids, adenomyosis, anovulatory bleeding, amenorrhea, Cushing's syndrome, hydatidiform moles, Asherman's syndrome, premature menopause, precocious puberty, uterine polyps, dysfunctional uterine bleeding (e.g., due to aberrant hormonal signals), and neoplastic disorders, such as adenocarcinomas, keiomyosarcomas, and sarcomas. Additionally, the polypeptides, polynucleotides, or agonists or antagonists of the invention may be useful as a marker or detector of, as well as in the diagnosis, treatment, and/or prevention of congenital uterine abnormalities, such as bicornuate uterus, septate uterus, simple unicornuate uterus, unicornuate uterus with a noncavitary rudimentary horn, unicornuate uterus with a non-communicating cavitary rudimentary horn, unicornuate uterus with a communicating cavitary horn, arcuate uterus, uterine didelfus, and T-shaped uterus.

[0781] Ovarian diseases and/or disorders include anovulation, polycystic ovary syndrome (Stein-Leventhal syndrome), ovarian cysts, ovarian hypofunction, ovarian insensitivity to gonadotropins, ovarian overproduction of androgens, right ovarian vein syndrome, amenorrhea, hirutism, and ovarian cancer (including, but not limited to, primary and secondary cancerous growth, Sertoli-Leydig tumors, endometriod carcinoma of the ovary, ovarian papillary serous adenocarcinoma, ovarian mucinous adenocarcinoma, and Ovarian Krukenberg tumors).

[0782] Cervical diseases and/or disorders include cervicitis, chronic cervicitis, mucopurulent cervicitis, cervical dysplasia, cervical polyps, Nabothian cysts, cervical erosion, cervical incompetence, and cervical neoplasms (including, for example, cervical carcinoma, squamous metaplasia, squamous cell carcinoma, adenosquamous cell neoplasia, and columnar cell neoplasia).

[0783] Additionally, diseases and/or disorders of the reproductive system include disorders and/or diseases of pregnancy, including miscarriage and stillbirth, such as early abortion, late abortion, spontaneous abortion, induced abortion, therapeutic abortion, threatened abortion, missed abortion, incomplete abortion, complete abortion, habitual abortion, missed abortion, and septic abortion; ectopic pregnancy, anemia, Rh incompatibility, vaginal bleeding during pregnancy, gestational diabetes, intrauterine growth retardation, polyhydramnios, HELLP syndrome, abruptio placentae, placenta previa, hyperemesis, preeclampsia, eclampsia, herpes gestationis, and urticaria of pregnancy. Additionally, the polynucleotides, polypeptides, and agonists or antagonists of the present invention may be used in the diagnosis, treatment, and/or prevention of diseases that can complicate pregnancy, including heart disease, heart failure, rheumatic heart disease, congenital heart disease, mitral valve prolapse, high blood pressure, anemia, kidney disease, infectious disease (e.g., rubella, cytomegalovirus, toxoplasmosis, infectious hepatitis, chlamydia, HIV, AIDS, and genital herpes), diabetes mellitus, Graves' disease, thyroiditis, hypothyroidism, Hashimoto's thyroiditis, chronic active hepatitis, cirrhosis of the liver, primary biliary cirrhosis, asthma, systemic lupus eryematosis, rheumatoid arthritis, myasthenia gravis, idiopathic thrombocytopenic purpura, appendicitis, ovarian cysts, gallbladder disorders, and obstruction of the intestine.

[0784] Complications associated with labor and parturition include premature rupture of the membranes, pre-term labor, post-term pregnancy, postmaturity, labor that progresses too slowly, fetal distress (e.g., abnormal heart rate (fetal or maternal), breathing problems, and abnormal fetal position), shoulder dystocia, prolapsed umbilical cord, amniotic fluid embolism, and aberrant uterine bleeding.

[0785] Further, diseases and/or disorders of the postdelivery period, including endometritis, myometritis, parametritis, peritonitis, pelvic thrombophlebitis, pulmonary embolism, endotoxemia, pyelonephritis, saphenous thrombophlebitis, mastitis, cystitis, postpartum hemorrhage, and inverted uterus.

[0786] Other disorders and/or diseases of the female reproductive system that may be diagnosed, treated, and/or prevented by the polynucleotides, polypeptides, and agonists or antagonists of the present invention include, for example, Turner's syndrome, pseudohermaphroditism, premenstrual syndrome, pelvic inflammatory disease, pelvic congestion (vascular engorgement), frigidity, anorgasmia, dyspareunia, ruptured fallopian tube, and Mittelschmerz.

Infectious Disease

[0787] Polynucleotides or polypeptides, as well as agonists or antagonists of the present invention can be used to treat or detect infectious agents. For example, by increasing the immune response, particularly increasing the proliferation and differentiation of B and/or T cells, infectious diseases may be treated. The immune response may be increased by either enhancing an existing immune response, or by initiating a new immune response. Alternatively, polynucleotides or polypeptides, as well as agonists or antagonists of the present invention may also directly inhibit the infectious agent, without necessarily eliciting an immune response.

[0788] Viruses are one example of an infectious agent that can cause disease or symptoms that can be treated or detected by a polynucleotide or polypeptide and/or agonist or antagonist of the present invention. Examples of viruses, include, but are not limited to Examples of viruses, include, but are not limited to the following DNA and RNA viruses and viral families: Arbovirus, Adenoviridae, Arenaviridae, Arterivirus, Birnaviridae, Bunyaviridae, Caliciviridae, Circoviridae, Coronaviridae, Dengue, EBV, HIV, Flaviviridae, Hepadnaviridae (Hepatitis), Herpesviridae (such as, Cytomegalovirus, Herpes Simplex, Herpes Zoster), Mononegavirus (e.g., Paramyxoviridae, Morbillivirus, Rhabdoviridae), Orthomyxoviridae (e.g., Inifluenza A, Influenza B, and parainfluenza), Papiloma virus, Papovaviridae, Parvoviridae, Picornaviridae, Poxyiridae (such as Smallpox or Vaccinia), Reoviridae (e.g., Rotavirus), Retroviridae (HTLV-I, HTLV-II, Lentivirus), and Togaviridae (e.g., Rubivirus). Viruses falling within these families can cause a variety of diseases or symptoms, including, but not limited to: arthritis, bronchiollitis, respiratory syncytial virus, encephalitis, eye infections (e.g., conjunctivitis, keratitis), chronic fatigue syndrome, hepatitis (A, B, C, E, Chronic Active, Delta), Japanese B encephalitis, Junin, Chikungunya, Rift Valley fever, yellow fever, meningitis, opportunistic infections (e.g., AIDS), pneumonia, Burkitt's Lymphoma, chickenpox, hemorrhagic fever, Measles, Mumps, Parainfluenza, Rabies, the common cold, Polio, leukemia, Rubella, sexually transmitted diseases, skin diseases (e.g., Kaposi's, warts), and viremia. polynucleotides or polypeptides, or agonists or antagonists of the invention, can be used to treat or detect any of these symptoms or diseases. In specific embodiments, polynucleotides, polypeptides, or agonists or antagonists of the invention are used to treat: meningitis, Dengue, EBV, and/or hepatitis (e.g., hepatitis B). In an additional specific embodiment polynucleotides, polypeptides, or agonists or antagonists of the invention are used to treat patients nonresponsive to one or more other commercially available hepatitis vaccines. In a further specific embodiment polynucleotides, polypeptides, or agonists or antagonists of the invention are used to treat AIDS.

[0789] Similarly, bacterial and fungal agents that can cause disease or symptoms and that can be treated or detected by a polynucleotide or polypeptide and/or agonist or antagonist of the present invention include, but not limited to, the following Gram-Negative and Gram-positive bacteria, bacterial families, and fungi: Actinomyces (e.g., Norcardia), Acinetobacter, Cryptococcus neoformans, Aspergillus, Bacillaceae (e.g., Bacillus anthrasis), Bacteroides (e.g., Bacteroides fragilis), Blastomycosis, Bordetella, Borrelia (e.g., Borrelia burgdorferi), Brucella, Candidia, Campylobacter, Chlamydia, Clostridium (e.g., Clostridium botulinum, Clostridium dificile, Clostridium perftingens, Clostridium tetani), Coccidioides, Corynebacterium (e.g., Corynebacterium diptheriae), Cryptococcus, Dermatocycoses, E. coli (e.g., Enterotoxigenic E. coli and Enterohemorrhagic E. coli), Enterobacter (e.g. Enterobacter aerogenes), Enterobacteriaceae (Klebsiella, Salmonella (e.g., Salmonella typhi, Salmonella enteritidis, Salmonella typhi), Serratia, Yersinia, Shigella), Erysipelothrix, Haemophilus (e.g., Haemophilus influenza type B), Helicobacter, Legionella (e.g., Legionella pneumophila), Leptospira, Listeria (e.g., Listeria monocytogenes), Mycoplasma, Mycobacterium (e.g., Mycobacterium leprae and Mycobacterium tuberculosis), Vibrio (e.g., Vibrio cholerae), Neisseriaceae (e.g., Neisseria gonorrhea, Neisseria meningitidis), Pasteurellacea, Proteus, Pseudomonas (e.g., Pseudomonas aeruginosa), Rickettsiaceae, Spirochetes (e.g., Treponema spp., Leptospira spp., Borrelia spp.), Shigella spp., Staphylococcus (e.g., Staphylococcus aureus), Meningiococcus, Pneumococcus and Streptococcus (e.g., Streptococcus pneumoniae and Groups A, B, and C Streptococci), and Ureaplasmas. These bacterial, parasitic, and fungal families can cause diseases or symptoms, including, but not limited to: antibiotic-resistant infections, bacteremia, endocarditis, septicemia, eye infections (e.g., conjunctivitis), uveitis, tuberculosis, gingivitis, bacterial diarrhea, opportunistic infections (e.g., AIDS related infections), paronychia, prosthesis-related infections, dental caries, Reiter's Disease, respiratory tract infections, such as Whooping Cough or Empyema, sepsis, Lyme Disease, Cat-Scratch Disease, dysentery, paratyphoid fever, food poisoning, Legionella disease, chronic and acute inflammation, erythema, yeast infections, typhoid, pneumonia, gonorrhea, meningitis (e.g., mengitis types A and B), chlamydia, syphillis, diphtheria, leprosy, brucellosis, peptic ulcers, anthrax, spontaneous abortions, birth defects, pneumonia, lung infections, ear infections, deafness, blindness, lethargy, malaise, vomiting, chronic diarrhea, Crohn's disease, colitis, vaginosis, sterility, pelvic inflammatory diseases, candidiasis, paratuberculosis, tuberculosis, lupus, botulism, gangrene, tetanus, impetigo, Rheumatic Fever, Scarlet Fever, sexually transmitted diseases, skin diseases (e.g., cellulitis, dermatocycoses), toxemia, urinary tract infections, wound infections, noscomial infections. Polynucleotides or polypeptides, agonists or antagonists of the invention, can be used to treat or detect any of these symptoms or diseases. In specific embodiments, polynucleotides, polypeptides, agonists or antagonists of the invention are used to treat: tetanus, diptheria, botulism, and/or meningitis type B.

[0790] Moreover, parasitic agents causing disease or symptoms that can be treated, prevented, and/or diagnosed by a polynucleotide or polypeptide and/or agonist or antagonist of the present invention include, but not limited to, the following families or class: Amebiasis, Babesiosis, Coccidiosis, Cryptosporidiosis, Dientamoebiasis, Dourine, Ectoparasitic, Giardias, Helminthiasis, Leishmaniasis, Schistisoma, Theileriasis, Toxoplasmosis, Trypanosomiasis, and Trichomonas and Sporozoans (e.g., Plasmodium virax, Plasmodium falciparium, Plasmodium malariae and Plasmodium ovale). These parasites can cause a variety of diseases or symptoms, including, but not limited to: Scabies, Trombiculiasis, eye infections, intestinal disease (e.g., dysentery, giardiasis), liver disease, lung disease, opportunistic infections (e.g., AIDS related), malaria, pregnancy complications, and toxoplasmosis. polynucleotides or polypeptides, or agonists or antagonists of the invention, can be used to treat, prevent, and/or diagnose any of these symptoms or diseases. In specific embodiments, polynucleotides, polypeptides, or agonists or antagonists of the invention are used to treat, prevent, and/or diagnose malaria.

[0791] Polynucleotides or polypeptides, as well as agonists or antagonists of the present invention of the present invention could either be by administering an effective amount of a polypeptide to the patient, or by removing cells from the patient, supplying the cells with a polynucleotide of the present invention, and returning the engineered cells to the patient (ex vivo therapy). Moreover, the polypeptide or polynucleotide of the present invention can be used as an antigen in a vaccine to raise an immune response against infectious disease.

Regeneration

[0792] Polynucleotides or polypeptides, as well as agonists or antagonists of the present invention can be used to differentiate, proliferate, and attract cells, leading to the regeneration of tissues. (See, Science 276:59-87 (1997)). The regeneration of tissues could be used to repair, replace, or protect tissue damaged by congenital defects, trauma (wounds, burns, incisions, or ulcers), age, disease (e.g. osteoporosis, osteocarthritis, periodontal disease, liver failure), surgery, including cosmetic plastic surgery, fibrosis, reperfusion injury, or systemic cytokine damage.

[0793] Tissues that could be regenerated using the present invention include organs (e.g., pancreas, liver, intestine, kidney, skin, endothelium), muscle (smooth, skeletal or cardiac), vasculature (including vascular and lymphatics), nervous, hematopoietic, and skeletal (bone, cartilage, tendon, and ligament) tissue. Preferably, regeneration occurs without or decreased scarring. Regeneration also may include angiogenesis.

[0794] Moreover, polynucleotides or polypeptides, as well as agonists or antagonists of the present invention, may increase regeneration of tissues difficult to heal. For example, increased tendon/ligament regeneration would quicken recovery time after damage. Polynucleotides or polypeptides, as well as agonists or antagonists of the present invention could also be used prophylactically in an effort to avoid damage. Specific diseases that could be treated include of tendinitis, carpal tunnel syndrome, and other tendon or ligament defects. A further example of tissue regeneration of non-healing wounds includes pressure ulcers, ulcers associated with vascular insufficiency, surgical, and traumatic wounds.

[0795] Similarly, nerve and brain tissue could also be regenerated by using polynucleotides or polypeptides, as well as agonists or antagonists of the present invention, to proliferate and differentiate nerve cells. Diseases that could be treated using this method include central and peripheral nervous system diseases, neuropathies, or mechanical and traumatic disorders (e.g., spinal cord disorders, head trauma, cerebrovascular disease, and stoke). Specifically, diseases associated with peripheral nerve injuries, peripheral neuropathy (e.g., resulting from chemotherapy or other medical therapies), localized neuropathies, and central nervous system diseases (e.g., Alzheimer's disease, Parkinson's disease, Huntington's disease, amyotrophic lateral sclerosis, and Shy-Drager syndrome), could all be treated using the polynucleotides or polypeptides, as well as agonists or antagonists of the present invention.

Gastrointestinal Disorders

[0796] Polynucleotides or polypeptides, or agonists or antagonists of the present invention, may be used to treat, prevent, diagnose, and/or prognose gastrointestinal disorders, including inflammatory diseases and/or conditions, infections, cancers (e.g., intestinal neoplasms (carcinoid tumor of the small intestine, non-Hodgkin's lymphoma of the small intestine, small bowl lymphoma)), and ulcers, such as peptic ulcers.

[0797] Gastrointestinal disorders include dysphagia, odynophagia, inflammation of the esophagus, peptic esophagitis, gastric reflux, submucosal fibrosis and stricturing, Mallory-Weiss lesions, leiomyomas, lipomas, epidermal cancers, adeoncarcinomas, gastric retention disorders, gastroenteritis, gastric atrophy, gastric/stomach cancers, polyps of the stomach, autoimmune disorders such as pernicious anemia, pyloric stenosis, gastritis (bacterial, viral, eosinophilic, stress-induced, chronic erosive, atrophic, plasma cell, and Menetrier's), and peritoneal diseases (e.g., chyloperioneum, hemoperitoneum, mesenteric cyst, mesenteric lymphadenitis, mesenteric vascular occlusion, panniculitis, neoplasms, peritonitis, pneumoperitoneum, bubphrenic abscess,).

[0798] Gastrointestinal disorders also include disorders associated with the small intestine, such as malabsorption syndromes, distension, irritable bowel syndrome, sugar intolerance, celiac disease, duodenal ulcers, duodenitis, tropical sprue, Whipple's disease, intestinal lymphangiectasia, Crohn's disease, appendicitis, obstructions of the ileum, Meckel's diverticulum, multiple diverticula, failure of complete rotation of the small and large intestine, lymphoma, and bacterial and parasitic diseases (such as Traveler's diarrhea, typhoid and paratyphoid, cholera, infection by Roundworms (Ascariasis lumbricoides), Hookworms (Ancylostoma duodenale), Threadworms (Enterobius vermicularis), Tapeworms (Taenia saginata, Echinococcus granulosus, Diphyllobothrium spp., and T. solium).

[0799] Liver diseases and/or disorders include intrahepatic cholestasis (alagille syndrome, biliary liver cirrhosis), fatty liver (alcoholic fatty liver, reye syndrome), hepatic vein thrombosis, hepatolentricular degeneration, hepatomegaly, hepatopulmonary syndrome, hepatorenal syndrome, portal hypertension (esophageal and gastric varices), liver abscess (amebic liver abscess), liver cirrhosis (alcoholic, biliary and experimental), alcoholic liver diseases (fatty liver, hepatitis, cirrhosis), parasitic (hepatic echinococcosis, fascioliasis, amebic liver abscess), jaundice (hemolytic, hepatocellular, and cholestatic), cholestasis, portal hypertension, liver enlargement, ascites, hepatitis (alcoholic hepatitis, animal hepatitis, chronic hepatitis (autoimmune, hepatitis B, hepatitis C, hepatitis D, drug induced), toxic hepatitis, viral human hepatitis (hepatitis A, hepatitis B, hepatitis C, hepatitis D, hepatitis E), Wilson's disease, granulomatous hepatitis, secondary biliary cirrhosis, hepatic encephalopathy, portal hypertension, varices, hepatic encephalopathy, primary biliary cirrhosis, primary sclerosing cholangitis, hepatocellular adenoma, hemangiomas, bile stones, liver failure (hepatic encephalopathy, acute liver failure), and liver neoplasms (angiomyolipoma, calcified liver metastases, cystic liver metastases, epithelial tumors, fibrolamellar hepatocarcinoma, focal nodular hyperplasia, hepatic adenoma, hepatobiliary cystadenoma, hepatoblastoma, hepatocellular carcinoma, hepatoma, liver cancer, liver hemangioendothelioma, mesenchymal hamartoma, mesenchymal tumors of liver, nodular regenerative hyperplasia, benign liver tumors (Hepatic cysts [Simple cysts, Polycystic liver disease, Hepatobiliary cystadenoma, Choledochal cyst], Mesenchymal tumors [Mesenchymal hamartoma, Infantile hemangioendothelioma, Hemangioma, Peliosis hepatis, Lipomas, Inflammatory pseudotumor, Miscellaneous], Epithelial tumors [Bile duct epithelium (Bile duct hamartoma, Bile duct adenoma), Hepatocyte (Adenoma, Focal nodular hyperplasia, Nodular regenerative hyperplasia)], malignant liver tumors [hepatocellular, hepatoblastoma, hepatocellular carcinoma, cholangiocellular, cholangiocarcinoma, cystadenocarcinoma, tumors of blood vessels, angiosarcoma, Karposi's sarcoma, hemangioendothelioma, other tumors, embryonal sarcoma, fibrosarcoma, leiomyosarcoma, rhabdomyosarcoma, carcinosarcoma, teratoma, carcinoid, squamous carcinoma, primary lymphoma]), peliosis hepatis, erythrohepatic porphyria, hepatic porphyria (acute intermittent porphyria, porphyria cutanea tarda), Zellweger syndrome).

[0800] Pancreatic diseases and/or disorders include acute pancreatitis, chronic pancreatitis (acute necrotizing pancreatitis, alcoholic pancreatitis), neoplasms (adenocarcinoma of the pancreas, cystadenocarcinoma, insulinoma, gastrinoma, and glucagonoma, cystic neoplasms, islet-cell tumors, pancreoblastoma), and other pancreatic diseases (e.g., cystic fibrosis, cyst (pancreatic pseudocyst, pancreatic fistula, insufficiency)).

[0801] Gallbladder diseases include gallstones (cholelithiasis and choledocholithiasis), postcholecystectomy syndrome, diverticulosis of the gallbladder, acute cholecystitis, chronic cholecystitis, bile duct tumors, and mucocele.

[0802] Diseases and/or disorders of the large intestine include antibiotic-associated colitis, diverticulitis, ulcerative colitis, acquired megacolon, abscesses, fungal and bacterial infections, anorectal disorders (e.g., fissures, hemorrhoids), colonic diseases (colitis, colonic neoplasms [colon cancer, adenomatous colon polyps (e.g., villous adenoma), colon carcinoma, colorectal cancer], colonic diverticulitis, colonic diverticulosis, megacolon [Hirschsprung disease, toxic megacolon]; sigmoid diseases [proctocolitis, sigmoin neoplasms]), constipation, Crohn's disease, diarrhea (infantile diarrhea, dysentery), duodenal diseases (duodenal neoplasms, duodenal obstruction, duodenal ulcer, duodenitis), enteritis (enterocolitis), HIV enteropathy, ileal diseases (ileal neoplasms, ileitis), immunoproliferative small intestinal disease, inflammatory bowel disease (ulcerative colitis, Crohn's disease), intestinal atresia, parasitic diseases (anisakiasis, balantidiasis, blastocystis infections, cryptosporidiosis, dientamoebiasis, amebic dysentery, giardiasis), intestinal fistula (rectal fistula), intestinal neoplasms (cecal neoplasms, colonic neoplasms, duodenal neoplasms, ileal neoplasms, intestinal polyps, jejunal neoplasms, rectal neoplasms), intestinal obstruction (afferent loop syndrome, duodenal obstruction, impacted feces, intestinal pseudo-obstruction [cecal volvulus], intussusception), intestinal perforation, intestinal polyps (colonic polyps, gardner syndrome, peutz-jeghers syndrome), jejunal diseases Oejunal neoplasms), malabsorption syndromes (blind loop syndrome, celiac disease, lactose intolerance, short bowl syndrome, tropical sprue, whipple's disease), mesenteric vascular occlusion, pneumatosis cystoides intestinalis, protein-losing enteropathies (intestinal lymphagiectasis), rectal diseases (anus diseases, fecal incontinence, hemorrhoids, proctitis, rectal fistula, rectal prolapse, rectocele), peptic ulcer (duodenal ulcer, peptic esophagitis, hemorrhage, perforation, stomach ulcer, Zollinger-Ellison syndrome), postgastrectomy syndromes (dumping syndrome), stomach diseases (e.g., achlorhydria, duodenogastric reflux (bile reflux), gastric antral vascular ectasia, gastric fistula, gastric outlet obstruction, gastritis (atrophic or hypertrophic), gastroparesis, stomach dilatation, stomach diverticulum, stomach neoplasms (gastric cancer, gastric polyps, gastric adenocarcinoma, hyperplastic gastric polyp), stomach rupture, stomach ulcer, stomach volvulus), tuberculosis, visceroptosis, vomiting (e.g., hematemesis, hyperemesis gravidarum, postoperative nausea and vomiting) and hemorrhagic colitis.

[0803] Further diseases and/or disorders of the gastrointestinal system include biliary tract diseases, such as, gastroschisis, fistula (e.g., biliary fistula, esophageal fistula, gastric fistula, intestinal fistula, pancreatic fistula), neoplasms (e.g., biliary tract neoplasms, esophageal neoplasms, such as adenocarcinoma of the esophagus, esophageal squamous cell carcinoma, gastrointestinal neoplasms, pancreatic neoplasms, such as adenocarcinoma of the pancreas, mucinous cystic neoplasm of the pancreas, pancreatic cystic neoplasms, pancreatoblastoma, and peritoneal neoplasms), esophageal disease (e.g., bullous diseases, candidiasis, glycogenic acanthosis, ulceration, barrett esophagus varices, atresia, cyst, diverticulum (e.g., Zenker's diverticulum), fistula (e.g., tracheoesophageal fistula), motility disorders (e.g., CREST syndrome, deglutition disorders, achalasia, spasm, gastroesophageal reflux), neoplasms, perforation (e.g., Boerhaave syndrome, Mallory-Weiss syndrome), stenosis, esophagitis, diaphragmatic hernia (e.g., hiatal hernia); gastrointestinal diseases, such as, gastroenteritis (e.g., cholera morbus, norwalk virus infection), hemorrhage (e.g., hematemesis, melena, peptic ulcer hemorrhage), stomach neoplasms (gastric cancer, gastric polyps, gastric adenocarcinoma, stomach cancer)), hernia (e.g., congenital diaphragmatic hernia, femoral hernia, inguinal hernia, obturator hernia, umbilical hernia, ventral hernia), and intestinal diseases (e.g., cecal diseases (appendicitis, cecal neoplasms)).

Chemotaxis

[0804] Polynucleotides or polypeptides, as well as agonists or antagonists of the present invention may have chemotaxis activity. A chemotaxic molecule attracts or mobilizes cells (e.g., monocytes, fibroblasts, neutrophils, T-cells, mast cells, eosinophils, epithelial and/or endothelial cells) to a particular site in the body, such as inflammation, infection, or site of hyperproliferation. The mobilized cells can then fight off and/or heal the particular trauma or abnormality.

[0805] Polynucleotides or polypeptides, as well as agonists or antagonists of the present invention may increase chemotaxic activity of particular cells. These chemotactic molecules can then be used to treat inflammation, infection, hyperproliferative disorders, or any immune system disorder by increasing the number of cells targeted to a particular location in the body. For example, chemotaxic molecules can be used to treat wounds and other trauma to tissues by attracting immune cells to the injured location. Chemotactic molecules of the present invention can also attract fibroblasts, which can be used to treat wounds.

[0806] It is also contemplated that polynucleotides or polypeptides, as well as agonists or antagonists of the present invention may inhibit chemotactic activity. These molecules could also be used to treat disorders. Thus, polynucleotides or polypeptides, as well as agonists or antagonists of the present invention could be used as an inhibitor of chemotaxis.

Binding Activity

[0807] A polypeptide of the present invention may be used to screen for molecules that bind to the polypeptide or for molecules to which the polypeptide binds. The binding of the polypeptide and the molecule may activate (agonist), increase, inhibit (antagonist), or decrease activity of the polypeptide or the molecule bound. Examples of such molecules include antibodies, oligonucleotides, proteins (e.g., receptors), or small molecules.

[0808] Preferably, the molecule is closely related to the natural ligand of the polypeptide, e.g., a fragment of the ligand, or a natural substrate, a ligand, a structural or functional mimetic. (See, Coligan et al., Current Protocols in Immunology 1(2):Chapter 5 (1991)). Similarly, the molecule can be closely related to the natural receptor to which the polypeptide binds, or at least, a fragment of the receptor capable of being bound by the polypeptide (e.g., active site). In either case, the molecule can be rationally designed using known techniques.

[0809] Preferably, the screening for these molecules involves producing appropriate cells which express the polypeptide. Preferred cells include cells from mammals, yeast, Drosophila, or E. Coli. Cells expressing the polypeptide (or cell membrane containing the expressed polypeptide) are then preferably contacted with a test compound potentially containing the molecule to observe binding, stimulation, or inhibition of activity of either the polypeptide or the molecule.

[0810] The assay may simply test binding of a candidate compound to the polypeptide, wherein binding is detected by a label, or in an assay involving competition with a labeled competitor. Further, the assay may test whether the candidate compound results in a signal generated by binding to the polypeptide.

[0811] Alternatively, the assay can be carried out using cell-free preparations, polypeptide/molecule affixed to a solid support, chemical libraries, or natural product mixtures. The assay may also simply comprise the steps of mixing a candidate compound with a solution containing a polypeptide, measuring polypeptide/molecule activity or binding, and comparing the polypeptide/molecule activity or binding to a standard.

[0812] Preferably, an ELISA assay can measure polypeptide level or activity in a sample (e.g., biological sample) using a monoclonal or polyclonal antibody. The antibody can measure polypeptide level or activity by either binding, directly or indirectly, to the polypeptide or by competing with the polypeptide for a substrate.

[0813] Additionally, the receptor to which the polypeptide of the present invention binds can be identified by numerous methods known to those of skill in the art, for example, ligand panning and FACS sorting (Coligan, et al., Current Protocols in Immun., 1(2), Chapter 5, (1991)). For example, expression cloning is employed wherein polyadenylated RNA is prepared from a cell responsive to the polypeptides, for example, NIH3T3 cells which are known to contain multiple receptors for the FGF family proteins, and SC-3 cells, and a cDNA library created from this RNA is divided into pools and used to transfect COS cells or other cells that are not responsive to the polypeptides. Transfected cells which are grown on glass slides are exposed to the polypeptide of the present invention, after they have been labeled. The polypeptides can be labeled by a variety of means including iodination or inclusion of a recognition site for a site-specific protein kinase.

[0814] Following fixation and incubation, the slides are subjected to auto-radiographic analysis. Positive pools are identified and sub-pools are prepared and re-transfected using an iterative sub-pooling and re-screening process, eventually yielding a single clones that encodes the putative receptor.

[0815] As an alternative approach for receptor identification, the labeled polypeptides can be photoaffinity linked with cell membrane or extract preparations that express the receptor molecule. Cross-linked material is resolved by PAGE analysis and exposed to X-ray film. The labeled complex containing the receptors of the polypeptides can be excised, resolved into peptide fragments, and subjected to protein microsequencing. The amino acid sequence obtained from microsequencing would be used to design a set of degenerate oligonucleotide probes to screen a cDNA library to identify the genes encoding the putative receptors.

[0816] Moreover, the techniques of gene-shuffling, motif-shuffling, exon-shuffling, and/or codon-shuffling (collectively referred to as “DNA shuffling”) may be employed to modulate the activities of the polypeptide of the present invention thereby effectively generating agonists and antagonists of the polypeptide of the present invention. See generally, U.S. Pat. Nos. 5,605,793, 5,811,238, 5,830,721, 5,834,252, and 5,837,458, and Patten, P. A., et al., Curr. Opinion Biotechnol. 8:724-33 (1997); Harayama, S. Trends Biotechnol. 16(2):76-82 (1998); Hansson, L. O., et al., J. Mol. Biol. 287:265-76 (1999); and Lorenzo, M. M. and Blasco, R. Biotechniques 24(2):308-13 (1998); each of these patents and publications are hereby incorporated by reference). In one embodiment, alteration of polynucleotides and corresponding polypeptides may be achieved by DNA shuffling. DNA shuffling involves the assembly of two or more DNA segments into a desired molecule by homologous, or site-specific, recombination. In another embodiment, polynucleotides and corresponding polypeptides may be altered by being subjected to random mutagenesis by error-prone PCR, random nucleotide insertion or other methods prior to recombination. In another embodiment, one or more components, motifs, sections, parts, domains, fragments, etc., of the polypeptide of the present invention may be recombined with one or more components, motifs, sections, parts, domains, fragments, etc. of one or more heterologous molecules. In preferred embodiments, the heterologous molecules are family members. In further preferred embodiments, the heterologous molecule is a growth factor such as, for example, platelet-derived growth factor (PDGF), insulin-like growth factor (IGF-I), transforming growth factor (TGF)-alpha, epidermal growth factor (EGF), fibroblast growth factor (FGF), TGF-beta, bone morphogenetic protein (BMP)-2, BMP-4, BMP-5, BMP-6, BMP-7, activins A and B, decapentaplegic (dpp), 60A, OP-2, dorsalin, growth differentiation factors (GDFs), nodal, MIS, inhibin-alpha, TGF-beta1, TGF-beta2, TGF-beta3, TGF-beta5, and glial-derived neurotrophic factor (GDNF).

[0817] Other preferred fragments are biologically active fragments of the polypeptide of the present invention. Biologically active fragments are those exhibiting activity similar, but not necessarily identical, to an activity of the polypeptide of the present invention. The biological activity of the fragments may include an improved desired activity, or a decreased undesirable activity.

[0818] Additionally, this invention provides a method of screening compounds to identify those which modulate the action of the polypeptide of the present invention. An example of such an assay comprises combining a mammalian fibroblast cell, a the polypeptide of the present invention, the compound to be screened and ³[H] thymidine under cell culture conditions where the fibroblast cell would normally proliferate. A control assay may be performed in the absence of the compound to be screened and compared to the amount of fibroblast proliferation in the presence of the compound to determine if the compound stimulates proliferation by determining the uptake of ³[H] thymidine in each case. The amount of fibroblast cell proliferation is measured by liquid scintillation chromatography which measures the incorporation of ³[H] thymidine. Both agonist and antagonist compounds may be identified by this procedure.

[0819] In another method, a mammalian cell or membrane preparation expressing a receptor for a polypeptide of the present invention is incubated with a labeled polypeptide of the present invention in the presence of the compound. The ability of the compound to enhance or block this interaction could then be measured. Alternatively, the response of a known second messenger system following interaction of a compound to be screened and the receptor is measured and the ability of the compound to bind to the receptor and elicit a second messenger response is measured to determine if the compound is a potential agonist or antagonist. Such second messenger systems include but are not limited to, cAMP guanylate cyclase, ion channels or phosphoinositide hydrolysis.

[0820] All of these above assays can be used as diagnostic or prognostic markers. The molecules discovered using these assays can be used to treat disease or to bring about a particular result in a patient (e.g., blood vessel growth) by activating or inhibiting the polypeptide/molecule. Moreover, the assays can discover agents which may inhibit or enhance the production of the polypeptides of the invention from suitably manipulated cells or tissues.

[0821] Therefore, the invention includes a method of identifying compounds which bind to a polypeptide of the invention comprising the steps of: (a) incubating a candidate binding compound with a polypeptide of the present invention; and (b) determining if binding has occurred. Moreover, the invention includes a method of identifying agonists/antagonists comprising the steps of: (a) incubating a candidate compound with a polypeptide of the present invention, (b) assaying a biological activity, and (b) determining if a biological activity of the polypeptide has been altered.

Targeted Delivery

[0822] In another embodiment, the invention provides a method of delivering compositions to targeted cells expressing a receptor for a polypeptide of the invention, or cells expressing a cell bound form of a polypeptide of the invention.

[0823] As discussed herein, polypeptides or antibodies of the invention may be associated with heterologous polypeptides, heterologous nucleic acids, toxins, or prodrugs via hydrophobic, hydrophilic, ionic and/or covalent interactions. In one embodiment, the invention provides a method for the specific delivery of compositions of the invention to cells by administering polypeptides of the invention (including antibodies) that are associated with heterologous polypeptides or nucleic acids. In one example, the invention provides a method for delivering a therapeutic protein into the targeted cell. In another example, the invention provides a method for delivering a single stranded nucleic acid (e.g., antisense or ribozymes) or double stranded nucleic acid (e.g., DNA that can integrate into the cell's genome or replicate episomally and that can be transcribed) into the targeted cell.

[0824] In another embodiment, the invention provides a method for the specific destruction of cells (e.g., the destruction of tumor cells) by administering polypeptides of the invention (e.g., polypeptides of the invention or antibodies of the invention) in association with toxins or cytotoxic prodrugs.

[0825] By “toxin” is meant compounds that bind and activate endogenous cytotoxic effector systems, radioisotopes, holotoxins, modified toxins, catalytic subunits of toxins, or any molecules or enzymes not normally present in or on the surface of a cell that under defined conditions cause the cell's death. Toxins that may be used according to the methods of the invention include, but are not limited to, radioisotopes known in the art, compounds such as, for example, antibodies (or complement fixing containing portions thereof) that bind an inherent or induced endogenous cytotoxic effector system, thymidine kinase, endonuclease, RNAse, alpha toxin, ricin, abrin, Pseudomonas exotoxin A, diphtheria toxin, saporin, momordin, gelonin, pokeweed antiviral protein, alpha-sarcin and cholera toxin. By “cytotoxic prodrug” is meant a non-toxic compound that is converted by an enzyme, normally present in the cell, into a cytotoxic compound. Cytotoxic prodrugs that may be used according to the methods of the invention include, but are not limited to, glutamyl derivatives of benzoic acid mustard alkylating agent, phosphate derivatives of etoposide or mitomycin C, cytosine arabinoside, daunorubisin, and phenoxyacetamide derivatives of doxorubicin.

Drug Screening

[0826] Further contemplated is the use of the polypeptides of the present invention, or the polynucleotides encoding these polypeptides, to screen for molecules which modify the activities of the polypeptides of the present invention. Such a method would include contacting the polypeptide of the present invention with a selected compound(s) suspected of having antagonist or agonist activity, and assaying the activity of these polypeptides following binding.

[0827] This invention is particularly useful for screening therapeutic compounds by using the polypeptides of the present invention, or binding fragments thereof, in any of a variety of drug screening techniques. The polypeptide or fragment employed in such a test may be affixed to a solid support, expressed on a cell surface, free in solution, or located intracellularly. One method of drug screening utilizes eukaryotic or prokaryotic host cells which are stably transformed with recombinant nucleic acids expressing the polypeptide or fragment. Drugs are screened against such transformed cells in competitive binding assays. One may measure, for example, the formulation of complexes between the agent being tested and a polypeptide of the present invention.

[0828] Thus, the present invention provides methods of screening for drugs or any other agents which affect activities mediated by the polypeptides of the present invention. These methods comprise contacting such an agent with a polypeptide of the present invention or a fragment thereof and assaying for the presence of a complex between the agent and the polypeptide or a fragment thereof, by methods well known in the art. In such a competitive binding assay, the agents to screen are typically labeled. Following incubation, free agent is separated from that present in bound form, and the amount of free or uncomplexed label is a measure of the ability of a particular agent to bind to the polypeptides of the present invention.

[0829] Another technique for drug screening provides high throughput screening for compounds having suitable binding affinity to the polypeptides of the present invention, and is described in great detail in European Patent Application 84/03564, published on Sep. 13, 1984, which is incorporated herein by reference herein. Briefly stated, large numbers of different small peptide test compounds are synthesized on a solid substrate, such as plastic pins or some other surface. The peptide test compounds are reacted with polypeptides of the present invention and washed. Bound polypeptides are then detected by methods well known in the art. Purified polypeptides are coated directly onto plates for use in the aforementioned drug screening techniques. In addition, non-neutralizing antibodies may be used to capture the peptide and immobilize it on the solid support.

[0830] This invention also contemplates the use of competitive drug screening assays in which neutralizing antibodies capable of binding polypeptides of the present invention specifically compete with a test compound for binding to the polypeptides or fragments thereof. In this manner, the antibodies are used to detect the presence of any peptide which shares one or more antigenic epitopes with a polypeptide of the invention.

Antisense and Ribozyme (Antagonists)

[0831] In specific embodiments, antagonists according to the present invention are nucleic acids corresponding to the sequences contained in SEQ ID NO:X, or the complementary strand thereof, and/or to cDNA sequences contained in cDNA Clone ID NO:Z identified for example, in Table 1A and/or 1B. In one embodiment, antisense sequence is generated internally, by the organism, in another embodiment, the antisense sequence is separately administered (see, for example, O'Connor, J., Neurochem. 56:560 (1991). Oligodeoxynucleotides as Antisense Inhibitors of Gene Expression, CRC Press, Boca Raton, Fla. (1988). Antisense technology can be used to control gene expression through antisense DNA or RNA, or through triple-helix formation. Antisense techniques are discussed for example, in Okano, J., Neurochem. 56:560 (1991); Oligodeoxynucleotides as Antisense Inhibitors of Gene Expression, CRC Press, Boca Raton, Fla. (1988). Triple helix formation is discussed in, for instance, Lee et al., Nucleic Acids Research 6:3073 (1979); Cooney et al., Science 241:456 (1988); and Dervan et al., Science 251:1300 (1991). The methods are based on binding of a polynucleotide to a complementary DNA or RNA.

[0832] For example, the use of c-myc and c-myb antisense RNA constructs to inhibit the growth of the non-lymphocytic leukemia cell line HL-60 and other cell lines was previously described. (Wickstrom et al. (1988); Anfossi et al. (1989)). These experiments were performed in vitro by incubating cells with the oligoribonucleotide. A similar procedure for in vivo use is described in WO 91/15580. Briefly, a pair of oligonucleotides for a given antisense RNA is produced as follows: A sequence complimentary to the first 15 bases of the open reading frame is flanked by an EcoRI site on the 5 end and a HindIII site on the 3 end. Next, the pair of oligonucleotides is heated at 90° C. for one minute and then annealed in 2× ligation buffer (20 mM TRIS HCl pH 7.5, 10 mM MgCl2, 10 MM dithiothreitol (DTT) and 0.2 mM ATP) and then ligated to the EcoRI/Hind III site of the retroviral vector PMV7 (WO 91/15580).

[0833] For example, the 5′ coding portion of a polynucleotide that encodes the polypeptide of the present invention may be used to design an antisense RNA oligonucleotide of from about 10 to 40 base pairs in length. A DNA oligonucleotide is designed to be complementary to a region of the gene involved in transcription thereby preventing transcription and the production of the receptor. The antisense RNA oligonucleotide hybridizes to the mRNA in vivo and blocks translation of the mRNA molecule into receptor polypeptide.

[0834] In one embodiment, the antisense nucleic acid of the invention is produced intracellularly by transcription from an exogenous sequence. For example, a vector or a portion thereof, is transcribed, producing an antisense nucleic acid (RNA) of the invention. Such a vector would contain a sequence encoding the antisense nucleic acid. Such a vector can remain episomal or become chromosomally integrated, as long as it can be transcribed to produce the desired antisense RNA. Such vectors can be constructed by recombinant DNA technology methods standard in the art. Vectors can be plasmid, viral, or others known in the art, used for replication and expression in vertebrate cells. Expression of the sequence encoding the polypeptide of the present invention or fragments thereof, can be by any promoter known in the art to act in vertebrate, preferably human cells. Such promoters can be inducible or constitutive. Such promoters include, but are not limited to, the SV40 early promoter region (Bemoist and Chambon, Nature 29:304-310 (1981), the promoter contained in the 3′ long terminal repeat of Rous sarcoma virus (Yamamoto et al., Cell 22:787-797 (1980), the herpes thymidine promoter (Wagner et al., Proc. Natl. Acad. Sci. U.S.A. 78:1441-1445 (1981), the regulatory sequences of the metallothionein gene (Brinster, et al., Nature 296:39-42 (1982)), etc.

[0835] The antisense nucleic acids of the invention comprise a sequence complementary to at least a portion of an RNA transcript of a gene of the present invention. However, absolute complementarity, although preferred, is not required. A sequence “complementary to at least a portion of an RNA,” referred to herein, means a sequence having sufficient complementarity to be able to hybridize with the RNA, forming a stable duplex; in the case of double stranded antisense nucleic acids, a single strand of the duplex DNA may thus be tested, or triplex formation may be assayed. The ability to hybridize will depend on both the degree of complementarity and the length of the antisense nucleic acid. Generally, the larger the hybridizing nucleic acid, the more base mismatches with a RNA it may contain and still form a stable duplex (or triplex as the case may be). One skilled in the art can ascertain a tolerable degree of mismatch by use of standard procedures to determine the melting point of the hybridized complex.

[0836] Oligonucleotides that are complementary to the 5′ end of the message, e.g., the 5′ untranslated sequence up to and including the AUG initiation codon, should work most efficiently at inhibiting translation. However, sequences complementary to the 3′ untranslated sequences of mRNAs have been shown to be effective at inhibiting translation of mRNAs as well. See generally, Wagner, R., 1994, Nature 372:333-335. Thus, oligonucleotides complementary to either the 5′- or 3′-non-translated, non-coding regions of polynucleotide sequences described herein could be used in an antisense approach to inhibit translation of endogenous mRNA. Oligonucleotides complementary to the 5′ untranslated region of the mRNA should include the complement of the AUG start codon. Antisense oligonucleotides complementary to mRNA coding regions are less efficient inhibitors of translation but could be used in accordance with the invention. Whether designed to hybridize to the 5′-, 3′- or coding region of mRNA of the present invention, antisense nucleic acids should be at least six nucleotides in length, and are preferably oligonucleotides ranging from 6 to about 50 nucleotides in length. In specific aspects the oligonucleotide is at least 10 nucleotides, at least 17 nucleotides, at least 25 nucleotides or at least 50 nucleotides.

[0837] The polynucleotides of the invention can be DNA or RNA or chimeric mixtures or derivatives or modified versions thereof, single-stranded or double-stranded. The oligonucleotide can be modified at the base moiety, sugar moiety, or phosphate backbone, for example, to improve stability of the molecule, hybridization, etc. The oligonucleotide may include other appended groups such as peptides (e.g., for targeting host cell receptors in vivo), or agents facilitating transport across the cell membrane (see, e.g., Letsinger et al., 1989, Proc. Natl. Acad. Sci. U.S.A. 86:6553-6556; Lemaitre et al., 1987, Proc. Natl. Acad. Sci. 84:648-652; PCT Publication No. WO88/09810, published Dec. 15, 1988) or the blood-brain barrier (see, e.g., PCT Publication No. WO89/10134, published Apr. 25, 1988), hybridization-triggered cleavage agents. (See, e.g., Krol et al., 1988, BioTechniques 6:958-976) or intercalating agents. (See, e.g., Zon, 1988, Pharm. Res. 5:539-549). To this end, the oligonucleotide may be conjugated to another molecule, e.g., a peptide, hybridization triggered cross-linking agent, transport agent, hybridization-triggered cleavage agent, etc.

[0838] The antisense oligonucleotide may comprise at least one modified base moiety which is selected from the group including, but not limited to, 5-fluorouracil, 5-bromouracil, 5-chlorouracil, 5-iodouracil, hypoxanthine, xantine, 4-acetylcytosine, 5-(carboxyhydroxylmethyl) uracil, 5-carboxymethylaminomethyl-2-thiouridine, 5-carboxymethylaminomethyluracil, dihydrouracil, beta-D-galactosylqueosine, inosine, N6-isopentenyladenine, 1-methylguanine, 1-methylinosine, 2,2-dimethylguanine, 2-methyladenine, 2-methylguanine, 3-methylcytosine, 5-methylcytosine, N6-adenine, 7-methylguanine, 5-methylaminomethyluracil, 5-methoxyaminomethyl-2-thiouracil, beta-D-mannosylqueosine, 5′-methoxycarboxymethyluracil, 5-methoxyuracil, 2-methylthio-N-6-isopentenyladenine, uracil-5-oxyacetic acid (v), wybutoxosine, pseudouracil, queosine, 2-thiocytosine, 5-methyl-2-thiouracil, 2-thiouracil, 4-thiouracil, 5-methyluracil, uracil-5-oxyacetic acid methylester, uracil-5-oxyacetic acid (v), 5-methyl-2-thiouracil, 3-(3-amino-3-N-2-carboxypropyl) uracil, (acp3)w, and 2,6-diaminopurine.

[0839] The antisense oligonucleotide may also comprise at least one modified sugar moiety selected from the group including, but not limited to, arabinose, 2-fluoroarabinose, xylulose, and hexose.

[0840] In yet another embodiment, the antisense oligonucleotide comprises at least one modified phosphate backbone selected from the group including, but not limited to, a phosphorothioate, a phosphorodithioate, a phosphoramidothioate, a phosphoramidate, a phosphordiamidate, a methylphosphonate, an alkyl phosphotriester, and a formacetal or analog thereof.

[0841] In yet another embodiment, the antisense oligonucleotide is an a-anomeric oligonucleotide. An a-anomeric oligonucleotide forms specific double-stranded hybrids with complementary RNA in which, contrary to the usual b-units, the strands run parallel to each other (Gautier et al., 1987, Nucl. Acids Res. 15:6625-6641). The oligonucleotide is a 2′-O-methylribonucleotide (Inoue et al., 1987, Nucl. Acids Res. 15:6131-6148), or a chimeric RNA-DNA analogue (Inoue et al., 1987, FEBS Lett. 215:327-330).

[0842] Polynucleotides of the invention may be synthesized by standard methods known in the art, e.g. by use of an automated DNA synthesizer (such as are commercially available from Biosearch, Applied Biosystems, etc.). As examples, phosphorothioate oligonucleotides may be synthesized by the method of Stein et al. (1988, Nucl. Acids Res. 16:3209), methylphosphonate oligonucleotides can be prepared by use of controlled pore glass polymer supports (Sarin et al., 1988, Proc. Natl. Acad. Sci. U.S.A. 85:7448-7451), etc.

[0843] While antisense nucleotides complementary to the coding region sequence could be used, those complementary to the transcribed untranslated region are most preferred.

[0844] Potential antagonists according to the invention also include catalytic RNA, or a ribozyme (See, e.g., PCT International Publication WO 90/11364, published Oct. 4, 1990; Sarver et al, Science 247:1222-1225 (1990). While ribozymes that cleave mRNA at site specific recognition sequences can be used to destroy mRNAs, the use of hammerhead ribozymes is preferred. Hammerhead ribozymes cleave mRNAs at locations dictated by flanking regions that form complementary base pairs with the target mRNA. The sole requirement is that the target mRNA have the following sequence of two bases: 5′-UG-3′. The construction and production of hammerhead ribozymes is well known in the art and is described more fully in Haseloff and Gerlach, Nature 334:585-591 (1988). There are numerous potential hammerhead ribozyme cleavage sites within the nucleotide sequence of SEQ ID NO:X. Preferably, the ribozyme is engineered so that the cleavage recognition site is located near the 5′ end of the mRNA; i.e., to increase efficiency and minimize the intracellular accumulation of non-functional mRNA transcripts.

[0845] As in the antisense approach, the ribozymes of the invention can be composed of modified oligonucleotides (e.g., for improved stability, targeting, etc.) and should be delivered to cells which express in vivo. DNA constructs encoding the ribozyme may be introduced into the cell in the same manner as described above for the introduction of antisense encoding DNA. A preferred method of delivery involves using a DNA construct “encoding” the ribozyme under the control of a strong constitutive promoter, such as, for example, pol III or pol II promoter, so that transfected cells will produce sufficient quantities of the ribozyme to destroy endogenous messages and inhibit translation. Since ribozymes unlike antisense molecules, are catalytic, a lower intracellular concentration is required for efficiency.

[0846] Antagonist/agonist compounds may be employed to inhibit the cell growth and proliferation effects of the polypeptides of the present invention on neoplastic cells and tissues, i.e. stimulation of angiogenesis of tumors, and, therefore, retard or prevent abnormal cellular growth and proliferation, for example, in tumor formation or growth.

[0847] The antagonist/agonist may also be employed to prevent hyper-vascular diseases, and prevent the proliferation of epithelial lens cells after extracapsular cataract surgery. Prevention of the mitogenic activity of the polypeptides of the present invention may also be desirous in cases such as restenosis after balloon angioplasty.

[0848] The antagonist/agonist may also be employed to prevent the growth of scar tissue during wound healing.

[0849] The antagonist/agonist may also be employed to treat the diseases described herein.

[0850] Thus, the invention provides a method of treating disorders or diseases, including but not limited to the disorders or diseases listed throughout this application, associated with overexpression of a polynucleotide of the present invention by administering to a patient (a) an antisense molecule directed to the polynucleotide of the present invention, and/or (b) a ribozyme directed to the polynucleotide of the present invention.

Binding Peptides and Other Molecules

[0851] The invention also encompasses screening methods for identifying polypeptides and nonpolypeptides that bind polypeptides of the invention, and the binding molecules identified thereby. These binding molecules are useful, for example, as agonists and antagonists of the polypeptides of the invention. Such agonists and antagonists can be used, in accordance with the invention, in the therapeutic embodiments described in detail, below.

[0852] This method comprises the steps of:
[0853] a. contacting polypeptides of the invention with a plurality of molecules; and
[0854] b. identifying a molecule that binds the polypeptides of the invention.

[0855] The step of contacting the polypeptides of the invention with the plurality of molecules may be effected in a number of ways. For example, one may contemplate immobilizing the polypeptides on a solid support and bringing a solution of the plurality of molecules in contact with the immobilized polypeptides. Such a procedure would be akin to an affinity chromatographic process, with the affinity matrix being comprised of the immobilized polypeptides of the invention. The molecules having a selective affinity for the polypeptides can then be purified by affinity selection. The nature of the solid support, process for attachment of the polypeptides to the solid support, solvent, and conditions of the affinity isolation or selection are largely conventional and well known to those of ordinary skill in the art.

[0856] Alternatively, one may also separate a plurality of polypeptides into substantially separate fractions comprising a subset of or individual polypeptides. For instance, one can separate the plurality of polypeptides by gel electrophoresis, column chromatography, or like method known to those of ordinary skill for the separation of polypeptides. The individual polypeptides can also be produced by a transformed host cell in such a way as to be expressed on or about its outer surface (e.g., a recombinant phage). Individual isolates can then be “probed” by the polypeptides of the invention, optionally in the presence of an inducer should one be required for expression, to determine if any selective affinity interaction takes place between the polypeptides and the individual clone. Prior to contacting the polypeptides with each fraction comprising individual polypeptides, the polypeptides could first be transferred to a solid support for additional convenience. Such a solid support may simply be a piece of filter membrane, such as one made of nitrocellulose or nylon. In this manner, positive clones could be identified from a collection of transformed host cells of an expression library, which harbor a DNA construct encoding a polypeptide having a selective affinity for polypeptides of the invention. Furthermore, the amino acid sequence of the polypeptide having a selective affinity for the polypeptides of the invention can be determined directly by conventional means or the coding sequence of the DNA encoding the polypeptide can frequently be determined more conveniently. The primary sequence can then be deduced from the corresponding DNA sequence. If the amino acid sequence is to be determined from the polypeptide itself, one may use microsequencing techniques. The sequencing technique may include mass spectroscopy.

[0857] In certain situations, it may be desirable to wash away any unbound polypeptides from a mixture of the polypeptides of the invention and the plurality of polypeptides prior to attempting to determine or to detect the presence of a selective affinity interaction. Such a wash step may be particularly desirable when the polypeptides of the invention or the plurality of polypeptides are bound to a solid support.

[0858] The plurality of molecules provided according to this method may be provided by way of diversity libraries, such as random or combinatorial peptide or nonpeptide libraries which can be screened for molecules that specifically bind polypeptides of the invention. Many libraries are known in the art that can be used, e.g., chemically synthesized libraries, recombinant (e.g., phage display libraries), and in vitro translation-based libraries. Examples of chemically synthesized libraries are described in Fodor et al., 1991, Science 251:767-773; Houghten et al., 1991, Nature 354:84-86; Lam et al., 1991, Nature 354:82-84; Medynski, 1994, Bio/Technology 12:709-710; Gallop et al., 1994, J. Medicinal Chemistry 37(9):1233-125I; Ohlmeyer et al., 1993, Proc. Natl. Acad. Sci. USA 90:10922-10926; Erb et al., 1994, Proc. Natl. Acad. Sci. USA 91:11422-11426; Houghten et al., 1992, Biotechniques 13:412; Jayawickreme et al., 1994, Proc. Natl. Acad. Sci. USA 91:1614-1618; Salmon et al., 1993, Proc. Natl. Acad. Sci. USA 90:11708-11712; PCT Publication No. WO 93/20242; and Brenner and Lerner, 1992, Proc. Natl. Acad. Sci. USA 89:5381-5383.

[0859] Examples of phage display libraries are described in Scott and Smith, 1990, Science 249:386-390; Devlin et al., 1990, Science, 249:404-406; Christian, R. B., et al., 1992, J. Mol. Biol. 227:711-718); Lenstra, 1992, J. Immunol. Meth. 152:149-157; Kay et al., 1993, Gene 128:59-65; and PCT Publication No. WO 94/18318 dated Aug. 18, 1994.

[0860] In vitro translation-based libraries include but are not limited to those described in PCT Publication No. WO 91/05058 dated Apr. 18, 1991; and Mattheakis et al., 1994, Proc. Natl. Acad. Sci. USA 91:9022-9026.

[0861] By way of examples of nonpeptide libraries, a benzodiazepine library (see e.g., Bunin et al., 1994, Proc. Natl. Acad. Sci. USA 91:4708-4712) can be adapted for use. Peptoid libraries (Simon et al., 1992, Proc. Natl. Acad. Sci. USA 89:9367-9371) can also be used. Another example of a library that can be used, in which the amide functionalities in peptides have been permethylated to generate a chemically transformed combinatorial library, is described by Ostresh et al. (1994, Proc. Natl. Acad. Sci. USA 91:11138-11142).

[0862] The variety of non-peptide libraries that are useful in the present invention is great. For example, Ecker and Crooke, 1995, Bio/Technology 13:351-360 list benzodiazepines, hydantoins, piperazinediones, biphenyls, sugar analogs, beta-mercaptoketones, arylacetic acids, acylpiperidines, benzopyrans, cubanes, xanthines, aminimides, and oxazolones as among the chemical species that form the basis of various libraries.

[0863] Non-peptide libraries can be classified broadly into two types: decorated monomers and oligomers. Decorated monomer libraries employ a relatively simple scaffold structure upon which a variety functional groups is added. Often the scaffold will be a molecule with a known useful pharmacological activity. For example, the scaffold might be the benzodiazepine structure.

[0864] Non-peptide oligomer libraries utilize a large number of monomers that are assembled together in ways that create new shapes that depend on the order of the monomers. Among the monomer units that have been used are carbamates, pyrrolinones, and morpholinos. Peptoids, peptide-like oligomers in which the side chain is attached to the alpha amino group rather than the alpha carbon, form the basis of another version of non-peptide oligomer libraries. The first non-peptide oligomer libraries utilized a single type of monomer and thus contained a repeating backbone. Recent libraries have utilized more than one monomer, giving the libraries added flexibility.

[0865] Screening the libraries can be accomplished by any of a variety of commonly known methods. See, e.g., the following references, which disclose screening of peptide libraries: Parmley and Smith, 1989, Adv. Exp. Med. Biol. 251:215-218; Scott and Smith, 1990, Science 249:386-390; Fowlkes et al., 1992; BioTechniques 13:422-427; Oldenburg et al., 1992, Proc. Natl. Acad. Sci. USA 89:5393-5397; Yu et al., 1994, Cell 76:933-945; Staudt et al., 1988, Science 241:577-580; Bock et al., 1992, Nature 355:564-566; Tuerk et al., 1992, Proc. Natl. Acad. Sci. USA 89:6988-6992; Ellington et al., 1992, Nature 355:850-852; U.S. Pat. No. 5,096,815, U.S. Pat. No. 5,223,409, and U.S. Pat. No. 5,198,346, all to Ladner et al.; Rebar and Pabo, 1993, Science 263:671-673; and CT Publication No. WO 94/18318.

[0866] In a specific embodiment, screening to identify a molecule that binds polypeptides of the invention can be carried out by contacting the library members with polypeptides of the invention immobilized on a solid phase and harvesting those library members that bind to the polypeptides of the invention. Examples of such screening methods, termed “panning” techniques are described by way of example in Parmley and Smith, 1988, Gene 73:305-318; Fowlkes et al., 1992, BioTechniques 13:422-427; PCT Publication No. WO 94/18318; and in references cited herein.

[0867] In another embodiment, the two-hybrid system for selecting interacting proteins in yeast (Fields and Song, 1989, Nature 340:245-246; Chien et al., 1991, Proc. Natl. Acad. Sci. USA 88:9578-9582) can be used to identify molecules that specifically bind to polypeptides of the invention.

[0868] Where the binding molecule is a polypeptide, the polypeptide can be conveniently selected from any peptide library, including random peptide libraries, combinatorial peptide libraries, or biased peptide libraries. The term “biased” is used herein to mean that the method of generating the library is manipulated so as to restrict one or more parameters that govern the diversity of the resulting collection of molecules, in this case peptides.

[0869] Thus, a truly random peptide library would generate a collection of peptides in which the probability of finding a particular amino acid at a given position of the peptide is the same for all 20 amino acids. A bias can be introduced into the library, however, by specifying, for example, that a lysine occur every fifth amino acid or that positions 4, 8, and 9 of a decapeptide library be fixed to include only arginine. Clearly, many types of biases can be contemplated, and the present invention is not restricted to any particular bias. Furthermore, the present invention contemplates specific types of peptide libraries, such as phage displayed peptide libraries and those that utilize a DNA construct comprising a lambda phage vector with a DNA insert.

[0870] As mentioned above, in the case of a binding molecule that is a polypeptide, the polypeptide may have about 6 to less than about 60 amino acid residues, preferably about 6 to about 10 amino acid residues, and most preferably, about 6 to about 22 amino acids. In another embodiment, a binding polypeptide has in the range of 15-100 amino acids, or 20-50 amino acids.

[0871] The selected binding polypeptide can be obtained by chemical synthesis or recombinant expression.

Other Activities

[0872] A polypeptide, polynucleotide, agonist, or antagonist of the present invention, as a result of the ability to stimulate vascular endothelial cell growth, may be employed in treatment for stimulating re-vascularization of ischemic tissues due to various disease conditions such as thrombosis, arteriosclerosis, and other cardiovascular conditions. The polypeptide, polynucleotide, agonist, or antagonist of the present invention may also be employed to stimulate angiogenesis and limb regeneration, as discussed above.

[0873] A polypeptide, polynucleotide, agonist, or antagonist of the present invention may also be employed for treating wounds due to injuries, burns, post-operative tissue repair, and ulcers since they are mitogenic to various cells of different origins, such as fibroblast cells and skeletal muscle cells, and therefore, facilitate the repair or replacement of damaged or diseased tissue.

[0874] A polypeptide, polynucleotide, agonist, or antagonist of the present invention may also be employed stimulate neuronal growth and to treat and prevent neuronal damage which occurs in certain neuronal disorders or neuro-degenerative conditions such as Alzheimer's disease, Parkinson's disease, and AIDS-related complex. A polypeptide, polynucleotide, agonist, or antagonist of the present invention may have the ability to stimulate chondrocyte growth, therefore, they may be employed to enhance bone and periodontal regeneration and aid in tissue transplants or bone grafts.

[0875] A polypeptide, polynucleotide, agonist, or antagonist of the present invention may be also be employed to prevent skin aging due to sunburn by stimulating keratinocyte growth.

[0876] A polypeptide, polynucleotide, agonist, or antagonist of the present invention may also be employed for preventing hair loss, since FGF family members activate hair-forming cells and promotes melanocyte growth. Along the same lines, a polypeptide, polynucleotide, agonist, or antagonist of the present invention may be employed to stimulate growth and differentiation of hematopoietic cells and bone marrow cells when used in combination with other cytokines.

[0877] A polypeptide, polynucleotide, agonist, or antagonist of the present invention may also be employed to maintain organs before transplantation or for supporting cell culture of primary tissues. A polypeptide, polynucleotide, agonist, or antagonist of the present invention may also be employed for inducing tissue of mesodermal origin to differentiate in early embryos.

[0878] A polypeptide, polynucleotide, agonist, or antagonist of the present invention may also increase or decrease the differentiation or proliferation of embryonic stem cells, besides, as discussed above, hematopoietic lineage.

[0879] A polypeptide, polynucleotide, agonist, or antagonist of the present invention may also be used to modulate mammalian characteristics, such as body height, weight, hair color, eye color, skin, percentage of adipose tissue, pigmentation, size, and shape (e.g., cosmetic surgery). Similarly, a polypeptide, polynucleotide, agonist, or antagonist of the present invention may be used to modulate mammalian metabolism affecting catabolism, anabolism, processing, utilization, and storage of energy.

[0880] A polypeptide, polynucleotide, agonist, or antagonist of the present invention may be used to change a mammal's mental state or physical state by influencing biorhythms, caricadic rhythms, depression (including depressive disorders), tendency for violence, tolerance for pain, reproductive capabilities (preferably by Activin or Inhibin-like activity), hormonal or endocrine levels, appetite, libido, memory, stress, or other cognitive qualities.

[0881] A polypeptide, polynucleotide, agonist, or antagonist of the present invention may also be used as a food additive or preservative, such as to increase or decrease storage capabilities, fat content, lipid, protein, carbohydrate, vitamins, minerals, cofactors or other nutritional components.

[0882] The above-recited applications have uses in a wide variety of hosts. Such hosts include, but are not limited to, human, murine, rabbit, goat, guinea pig, camel, horse, mouse, rat, hamster, pig, micro-pig, chicken, goat, cow, sheep, dog, cat, non-human primate, and human. In specific embodiments, the host is a mouse, rabbit, goat, guinea pig, chicken, rat, hamster, pig, sheep, dog or cat. In preferred embodiments, the host is a mammal. In most preferred embodiments, the host is a human.

### Other Preferred Embodiments

[0883] Other preferred embodiments of the claimed invention include an isolated nucleic acid molecule comprising a nucleotide sequence which is at least 95% identical to a sequence of at least about 50 contiguous nucleotides in the nucleotide sequence of SEQ ID NO:X or the complementary strand thereto, the nucleotide sequence as defined in column 5 of Table 1B or columns 8 and 9 of Table 2 or the complementary strand thereto, and/or cDNA contained in Clone ID NO:Z.

[0884] Also preferred is a nucleic acid molecule wherein said sequence of contiguous nucleotides is included in the nucleotide sequence of the portion of SEQ ID NO:X as defined in column 5, “ORF (From-To)”, in Table 1B.

[0885] Also preferred is a nucleic acid molecule wherein said sequence of contiguous nucleotides is included in the nucleotide sequence of the portion of SEQ ID NO:X as defined in columns 8 and 9, “NT From” and “NT To” respectively, in Table 2.

[0886] Also preferred is an isolated nucleic acid molecule comprising a nucleotide sequence which is at least 95% identical to a sequence of at least about 150 contiguous nucleotides in the nucleotide sequence of SEQ ID NO:X or the complementary strand thereto, the nucleotide sequence as defined in column 5 of Table 1B or columns 8 and 9 of Table 2 or the complementary strand thereto, and/or cDNA contained in Clone ID NO:Z.

[0887] Further preferred is an isolated nucleic acid molecule comprising a nucleotide sequence which is at least 95% identical to a sequence of at least about 500 contiguous nucleotides in the nucleotide sequence of SEQ ID NO:X or the complementary strand thereto, the nucleotide sequence as defined in column 5 of Table 1B or columns 8 and 9 of Table 2 or the complementary strand thereto, and/or cDNA contained in Clone ID NO:Z.

[0888] A further preferred embodiment is a nucleic acid molecule comprising a nucleotide sequence which is at least 95% identical to the nucleotide sequence of the portion of SEQ ID NO:X defined in column 5, “ORF (From-To)”, in Table 1B.

[0889] A further preferred embodiment is a nucleic acid molecule comprising a nucleotide sequence which is at least 95% identical to the nucleotide sequence of the portion of SEQ ID NO:X defined in columns 8 and 9, “NT From” and “NT To”, respectively, in Table 2.

[0890] A further preferred embodiment is an isolated nucleic acid molecule comprising a nucleotide sequence which is at least 95% identical to the complete nucleotide sequence of SEQ ID NO:X or the complementary strand thereto, the nucleotide sequence as defined in column 5 of Table 1B or columns 8 and 9 of Table 2 or the complementary strand thereto, and/or cDNA contained in Clone ID NO:Z.

[0891] Also preferred is an isolated nucleic acid molecule which hybridizes under stringent hybridization conditions to a nucleic acid molecule comprising a nucleotide sequence of SEQ ID NO:X or the complementary strand thereto, the nucleotide sequence as defined in column 5 of Table 1B or columns 8 and 9 of Table 2 or the complementary strand thereto, and/or cDNA contained in Clone ID NO:Z, wherein said nucleic acid molecule which hybridizes does not hybridize under stringent hybridization conditions to a nucleic acid molecule having a nucleotide sequence consisting of only A residues or of only T residues.

[0892] Also preferred is a composition of matter comprising a DNA molecule which comprises the cDNA contained in Clone ID NO:Z.

[0893] Also preferred is an isolated nucleic acid molecule comprising a nucleotide sequence which is at least 95% identical to a sequence of at least 50 contiguous nucleotides of the cDNA sequence contained in Clone ID NO:Z.

[0894] Also preferred is an isolated nucleic acid molecule, wherein said sequence of at least 50 contiguous nucleotides is included in the nucleotide sequence of an open reading frame sequence encoded by cDNA contained in Clone ID NO:Z.

[0895] Also preferred is an isolated nucleic acid molecule comprising a nucleotide sequence which is at least 95% identical to sequence of at least 150 contiguous nucleotides in the nucleotide sequence encoded by cDNA contained in Clone ID NO:Z.

[0896] A further preferred embodiment is an isolated nucleic acid molecule comprising a nucleotide sequence which is at least 95% identical to sequence of at least 500 contiguous nucleotides in the nucleotide sequence encoded by cDNA contained in Clone ID NO:Z.

[0897] A further preferred embodiment is an isolated nucleic acid molecule comprising a nucleotide sequence which is at least 95% identical to the complete nucleotide sequence encoded by cDNA contained in Clone ID NO:Z.

[0898] A further preferred embodiment is a method for detecting in a biological sample a nucleic acid molecule comprising a nucleotide sequence which is at least 95% identical to a sequence of at least 50 contiguous nucleotides in a sequence selected from the group consisting of: a nucleotide sequence of SEQ ID NO:X or the complementary strand thereto; the nucleotide sequence as defined in column 5 of Table 1B or columns 8 and 9 of Table 2 or the complementary strand thereto; and a nucleotide sequence encoded by cDNA contained in Clone ID NO:Z; which method comprises a step of comparing a nucleotide sequence of at least one nucleic acid molecule in said sample with a sequence selected from said group and determining whether the sequence of said nucleic acid molecule in said sample is at least 95% identical to said selected sequence.

[0899] Also preferred is the above method wherein said step of comparing sequences comprises determining the extent of nucleic acid hybridization between nucleic acid molecules in said sample and a nucleic acid molecule comprising said sequence selected from said group. Similarly, also preferred is the above method wherein said step of comparing sequences is performed by comparing the nucleotide sequence determined from a nucleic acid molecule in said sample with said sequence selected from said group. The nucleic acid molecules can comprise DNA molecules or RNA molecules.

[0900] A further preferred embodiment is a method for identifying the species, tissue or cell type of a biological sample which method comprises a step of detecting nucleic acid molecules in said sample, if any, comprising a nucleotide sequence that is at least 95% identical to a sequence of at least 50 contiguous nucleotides in a sequence selected from the group consisting of: a nucleotide sequence of SEQ ID NO:X or the complementary strand thereto; the nucleotide sequence as defined in column 5 of Table 1B or columns 8 and 9 of Table 2 or the complementary strand thereto; and a nucleotide sequence of the cDNA contained in Clone ID NO:Z.

[0901] The method for identifying the species, tissue or cell type of a biological sample can comprise a step of detecting nucleic acid molecules comprising a nucleotide sequence in a panel of at least two nucleotide sequences, wherein at least one sequence in said panel is at least 95% identical to a sequence of at least 50 contiguous nucleotides in a sequence selected from said group.

[0902] Also preferred is a method for diagnosing in a subject a pathological condition associated with abnormal structure or expression of a nucleotide sequence of SEQ ID NO:X or the complementary strand thereto; the nucleotide sequence as defined in column 5 of Table 1B or columns 8 and 9 of Table 2 or the complementary strand thereto; or the cDNA contained in Clone ID NO:Z which encodes a protein, wherein the method comprises a step of detecting in a biological sample obtained from said subject nucleic acid molecules, if any, comprising a nucleotide sequence that is at least 95% identical to a sequence of at least 50 contiguous nucleotides in a sequence selected from the group consisting of: a nucleotide sequence of SEQ ID NO:X or the complementary strand thereto; the nucleotide sequence as defined in column 5 of Table 1B or columns 8 and 9 of Table 2 or the complementary strand thereto; and a nucleotide sequence of cDNA contained in Clone ID NO:Z.

[0903] The method for diagnosing a pathological condition can comprise a step of detecting nucleic acid molecules comprising a nucleotide sequence in a panel of at least two nucleotide sequences, wherein at least one sequence in said panel is at least 95% identical to a sequence of at least 50 contiguous nucleotides in a sequence selected from said group.

[0904] Also preferred is a composition of matter comprising isolated nucleic acid molecules wherein the nucleotide sequences of said nucleic acid molecules comprise a panel of at least two nucleotide sequences, wherein at least one sequence in said panel is at least 95% identical to a sequence of at least 50 contiguous nucleotides in a sequence selected from the group consisting of: a nucleotide sequence of SEQ ID NO:X or the complementary strand thereto; the nucleotide sequence as defined in column 5 of Table 1B or columns 8 and 9 of Table 2 or the complementary strand thereto; and a nucleotide sequence encoded by cDNA contained in Clone ID NO:Z. The nucleic acid molecules can comprise DNA molecules or RNA molecules.

[0905] Also preferred is a composition of matter comprising isolated nucleic acid molecules wherein the nucleotide sequences of said nucleic acid molecules comprise a DNA microarray or “chip” of at least 1, 2, 3, 4, 5, 6, 7, 8, 9, 10, 15, 20, 25, 30, 40, 50, 100, 150, 200, 250, 300, 500, 1000, 2000, 3000, or 4000 nucleotide sequences, wherein at least one sequence in said DNA microarray or “chip” is at least 95% identical to a sequence of at least 50 contiguous nucleotides in a sequence selected from the group consisting of: a nucleotide sequence of SEQ ID NO:X wherein X is any integer as defined in Table 1A and/or 1B; and a nucleotide sequence encoded by a human cDNA clone identified by a cDNA “Clone ID” in Table 1A and/or 1B.

[0906] Also preferred is an isolated polypeptide comprising an amino acid sequence at least 90% identical to a sequence of at least about 10 contiguous amino acids in the polypeptide sequence of SEQ ID NO:Y; a polypeptide encoded by SEQ ID NO:X or the complementary strand thereto; the polypeptide encoded by the nucleotide sequence as defined in columns 8 and 9 of Table 2; and/or a polypeptide encoded by cDNA contained in Clone ID NO:Z.

[0907] Also preferred is an isolated polypeptide comprising an amino acid sequence at least 95% identical to a sequence of at least about 30 contiguous amino acids in the amino acid sequence of SEQ ID NO:Y; a polypeptide encoded by SEQ ID NO:X or the complementary strand thereto; the polypeptide encoded by the nucleotide sequence as defined in columns 8 and 9 of Table 2; and/or a polypeptide encoded by cDNA contained in Clone ID NO:Z.

[0908] Further preferred is an isolated polypeptide comprising an amino acid sequence at least 95% identical to a sequence of at least about 100 contiguous amino acids in the amino acid sequence of SEQ ID NO:Y; a polypeptide encoded by SEQ ID NO:X or the complementary strand thereto; the polypeptide encoded by the nucleotide sequence as defined in columns 8 and 9 of Table 2; and/or a polypeptide encoded by cDNA contained in Clone ID NO:Z.

[0909] Further preferred is an isolated polypeptide comprising an amino acid sequence at least 95% identical to the complete amino acid sequence of SEQ ID NO:Y; a polypeptide encoded by SEQ ID NO:X or the complementary strand thereto; the polypeptide encoded by the nucleotide sequence as defined in columns 8 and 9 of Table 2; and/or a polypeptide encoded by cDNA contained in Clone ID NO:Z.

[0910] Further preferred is an isolated polypeptide comprising an amino acid sequence at least 90% identical to a sequence of at least about 10 contiguous amino acids in the complete amino acid sequence of a polypeptide encoded by contained in Clone ID NO:Z

[0911] Also preferred is a polypeptide wherein said sequence of contiguous amino acids is included in the amino acid sequence of a portion of said polypeptide encoded by cDNA contained in Clone ID NO:Z; a polypeptide encoded by SEQ ID NO:X or the complementary strand thereto; the polypeptide encoded by the nucleotide sequence as defined in columns 8 and 9 of Table 2; and/or the polypeptide sequence of SEQ ID NO:Y.

[0912] Also preferred is an isolated polypeptide comprising an amino acid sequence at least 95% identical to a sequence of at least about 30 contiguous amino acids in the amino acid sequence of a polypeptide encoded by the cDNA contained in Clone ID NO:Z.

[0913] Also preferred is an isolated polypeptide comprising an amino acid sequence at least 95% identical to a sequence of at least about 100 contiguous amino acids in the amino acid sequence of a polypeptide encoded by cDNA contained in Clone ID NO:Z.

[0914] Also preferred is an isolated polypeptide comprising an amino acid sequence at least 95% identical to the amino acid sequence of a polypeptide encoded by the cDNA contained in Clone ID NO:Z.

[0915] Further preferred is an isolated antibody which binds specifically to a polypeptide comprising an amino acid sequence that is at least 90% identical to a sequence of at least 10 contiguous amino acids in a sequence selected from the group consisting of: a polypeptide sequence of SEQ ID NO:Y; a polypeptide encoded by SEQ ID NO:X or the complementary strand thereto; the polypeptide encoded by the nucleotide sequence as defined in columns 8 and 9 of Table 2; and a polypeptide encoded by the cDNA contained in Clone ID NO:Z.

[0916] Further preferred is a method for detecting in a biological sample a polypeptide comprising an amino acid sequence which is at least 90% identical to a sequence of at least 10 contiguous amino acids in a sequence selected from the group consisting of: a polypeptide sequence of SEQ ID NO:Y; a polypeptide encoded by SEQ ID NO:X or the complementary strand thereto; the polypeptide encoded by the nucleotide sequence as defined in columns 8 and 9 of Table 2; and a polypeptide encoded by the cDNA contained in Clone ID NO:Z; which method comprises a step of comparing an amino acid sequence of at least one polypeptide molecule in said sample with a sequence selected from said group and determining whether the sequence of said polypeptide molecule in said sample is at least 90% identical to said sequence of at least 10 contiguous amino acids.

[0917] Also preferred is the above method wherein said step of comparing an amino acid sequence of at least one polypeptide molecule in said sample with a sequence selected from said group comprises determining the extent of specific binding of polypeptides in said sample to an antibody which binds specifically to a polypeptide comprising an amino acid sequence that is at least 90% identical to a sequence of at least 10 contiguous amino acids in a sequence selected from the group consisting of: a polypeptide sequence of SEQ ID NO:Y; a polypeptide encoded by SEQ ID NO:X or the complementary strand thereto; the polypeptide encoded by the nucleotide sequence as defined in columns 8 and 9 of Table 2; and a polypeptide encoded by the cDNA contained in Clone ID NO:Z.

[0918] Also preferred is the above method wherein said step of comparing sequences is performed by comparing the amino acid sequence determined from a polypeptide molecule in said sample with said sequence selected from said group.

[0919] Also preferred is a method for identifying the species, tissue or cell type of a biological sample which method comprises a step of detecting polypeptide molecules in said sample, if any, comprising an amino acid sequence that is at least 90% identical to a sequence of at least 10 contiguous amino acids in a sequence selected from the group consisting of: polypeptide sequence of SEQ ID NO:Y; a polypeptide encoded by SEQ ID NO:X or the complementary strand thereto; the polypeptide encoded by the nucleotide sequence as defined in columns 8 and 9 of Table 2; and a polypeptide encoded by the cDNA contained in Clone ID NO:Z.

[0920] Also preferred is the above method for identifying the species, tissue or cell type of a biological sample, which method comprises a step of detecting polypeptide molecules comprising an amino acid sequence in a panel of at least two amino acid sequences, wherein at least one sequence in said panel is at least 90% identical to a sequence of at least 10 contiguous amino acids in a sequence selected from the above group.

[0921] Also preferred is a method for diagnosing in a subject a pathological condition associated with abnormal structure or expression of a nucleic acid sequence identified in Table 1A, 1B or Table 2 encoding a polypeptide, which method comprises a step of detecting in a biological sample obtained from said subject polypeptide molecules comprising an amino acid sequence in a panel of at least two amino acid sequences, wherein at least one sequence in said panel is at least 90% identical to a sequence of at least 10 contiguous amino acids in a sequence selected from the group consisting of: polypeptide sequence of SEQ ID NO:Y; a polypeptide encoded by SEQ ID NO:X or the complementary strand thereto; the polypeptide encoded by the nucleotide sequence as defined in columns 8 and 9 of Table 2; and a polypeptide encoded by the cDNA contained in Clone ID NO:Z.

[0922] In any of these methods, the step of detecting said polypeptide molecules includes using an antibody.

[0923] Also preferred is an isolated nucleic acid molecule comprising a nucleotide sequence which is at least 95% identical to a nucleotide sequence encoding a polypeptide wherein said polypeptide comprises an amino acid sequence that is at least 90% identical to a sequence of at least 10 contiguous amino acids in a sequence selected from the group consisting of: polypeptide sequence of SEQ ID NO:Y; a polypeptide encoded by SEQ ID NO:X or the complementary strand thereto; the polypeptide encoded by the nucleotide sequence as defined in columns 8 and 9 of Table 2; and a polypeptide encoded by the cDNA contained in Clone ID NO:Z.

[0924] Also preferred is an isolated nucleic acid molecule, wherein said nucleotide sequence encoding a polypeptide has been optimized for expression of said polypeptide in a prokaryotic host.

[0925] Also preferred is a polypeptide molecule, wherein said polypeptide comprises an amino acid sequence selected from the group consisting of: polypeptide sequence of SEQ ID NO:Y; a polypeptide encoded by SEQ ID NO:X or the complementary strand thereto; the polypeptide encoded by the nucleotide sequence as defined in columns 8 and 9 of Table 2; and a polypeptide encoded by the cDNA contained in Clone ID NO:Z.

[0926] Further preferred is a method of making a recombinant vector comprising inserting any of the above isolated nucleic acid molecule into a vector. Also preferred is the recombinant vector produced by this method. Also preferred is a method of making a recombinant host cell comprising introducing the vector into a host cell, as well as the recombinant host cell produced by this method.

[0927] Also preferred is a method of making an isolated polypeptide comprising culturing this recombinant host cell under conditions such that said polypeptide is expressed and recovering said polypeptide. Also preferred is this method of making an isolated polypeptide, wherein said recombinant host cell is a eukaryotic cell and said polypeptide is a human protein comprising an amino acid sequence selected from the group consisting of: polypeptide sequence of SEQ ID NO:Y; a polypeptide encoded by SEQ ID NO:X or the complementary strand thereto; the polypeptide encoded by the nucleotide sequence as defined in columns 8 and 9 of Table 2; and a polypeptide encoded by the cDNA contained in Clone ID NO:Z. The isolated polypeptide produced by this method is also preferred.

[0928] Also preferred is a method of treatment of an individual in need of an increased level of a protein activity, which method comprises administering to such an individual a Therapeutic comprising an amount of an isolated polypeptide, polynucleotide, immunogenic fragment or analogue thereof, binding agent, antibody, or antigen binding fragment of the claimed invention effective to increase the level of said protein activity in said individual.

[0929] Also preferred is a method of treatment of an individual in need of a decreased level of a protein activity, which method comprised administering to such an individual a Therapeutic comprising an amount of an isolated polypeptide, polynucleotide, immunogenic fragment or analogue thereof, binding agent, antibody, or antigen binding fragment of the claimed invention effective to decrease the level of said protein activity in said individual.

[0930] Also preferred is a method of treatment of an individual in need of a specific delivery of toxic compositions to diseased cells (e.g., tumors, leukemias or lymphomas), which method comprises administering to such an individual a Therapeutic comprising an amount of an isolated polypeptide of the invention, including, but not limited to a binding agent, or antibody of the claimed invention that are associated with toxin or cytotoxic prodrugs.

[0931] Having generally described the invention, the same will be more readily understood by reference to the following examples, which are provided by way of illustration and are not intended as limiting.

TABLE 6

| ATCC Deposits | Deposit Date | ATCC Designation Number |
|---|---|---|
| LP01, LP02, LP03, LP04, | May-20-97 | 209059, 209060, 209061, |
| LP05, LP06, LP07, LP08, | | 209062, 209063, 209064, |
| LP09, LP10, LP11, | | 209065, 209066, 209067, |
| | | 209068, 209069 |
| LP12 | Jan-12-98 | 209579 |
| LP13 | Jan-12-98 | 209578 |
| LP14 | Jul-16-98 | 203067 |
| LP15 | Jul-16-98 | 203068 |
| LP16 | Feb-1-99 | 203609 |
| LP17 | Feb-1-99 | 203610 |
| LP20 | Nov-17-98 | 203485 |
| LP21 | Jun-18-99 | PTA-252 |
| LP22 | Jun-18-99 | PTA-253 |
| LP23 | Dec-22-99 | PTA-1081 |

### EXAMPLES

### Example 1

### Isolation of a Selected cDNA Clone from the Deposited Sample

[0932] Each Clone ID NO:Z is contained in a plasmid vector. Table 7 identifies the vectors used to construct the cDNA library from which each clone was isolated. In many cases, the vector used to construct the library is a phage vector from which a plasmid has been excised. The following correlates the related plasmid for each phage vector used in constructing the cDNA library. For example, where a particular clone is identified in Table 7 as being isolated in the vector “Lambda Zap,” the corresponding deposited clone is in “pBluescript.”

| Vector Used to | Corresponding |
|---|---|
| Construct Library | Deposited Plasmid |
| Lambda Zap | pBluescript (pBS) |
| Uni-Zap XR | pBluescript (pBS) |
| Zap Express | pBK |
| lafmid BA | plafmid BA |
| pSport1 | pSport1 |
| pCMVSport 2.0 | pCMVSport 2.0 |
| pCMVSport 3.0 | pCMVSport 3.0 |
| pCR ® 2.1 | pCR ® 2.1 |

[0933] Vectors Lambda Zap (U.S. Pat. Nos. 5,128,256 and 5,286,636), Uni-Zap XR (U.S. Pat. Nos. 5,128,256 and 5,286,636), Zap Express (U.S. Pat. Nos. 5,128,256 and 5,286,636), pBluescript (pBS) (Short, J. M. et al., Nucleic Acids Res. 16:7583-7600 (1988); Alting-Mees, M. A. and Short, J. M., Nucleic Acids Res. 17:9494 (1989)) and pBK (Alting-Mees, M. A. et al., Strategies 5:58-61 (1992)) are commercially available from Stratagene Cloning Systems, Inc., 11011 N. Torrey Pines Road, La Jolla, Calif., 92037. pBS contains an ampicillin resistance gene and pBK contains a neomycin resistance gene. Both can be transformed into E. coli strain XL-1 Blue, also available from Stratagene. pBS comes in 4 forms SK+, SK−, KS+ and KS. The S and K refers to the orientation of the polylinker to the T7 and T3 primer sequences which flank the polylinker region (“S” is for SacI and “K” is for KpnI which are the first sites on each respective end of the linker). “+” or “−” refer to the orientation of the f1 origin of replication (“ori”), such that in one orientation, single stranded rescue initiated from the f1 ori generates sense strand DNA and in the other, antisense.

[0934] Vectors pSport1, pCMVSport 2.0 and pCMVSport 3.0, were obtained from Life Technologies, Inc., P.O. Box 6009, Gaithersburg, Md. 20897. All Sport vectors contain an ampicillin resistance gene and may be transformed into E. coli strain DH10B, also available from Life Technologies. (See, for instance, Gruber, C. E., et al., Focus 15:59 (1993)). Vector lafmid BA (Bento Soares, Columbia University, NY) contains an ampicillin resistance gene and can be transformed into E. coli strain XL-1 Blue. Vector pCR®2.1, which is available from Invitrogen, 1600 Faraday Avenue, Carlsbad, Calif. 92008, contains an ampicillin resistance gene and may be transformed into E. coli strain DH10B, available from Life Technologies. (See, for instance, Clark, J. M., Nuc. Acids Res. 16:9677-9686 (1988) and Mead, D. et al., Bio/Technology 9: (1991)). Preferably, a polynucleotide of the present invention does not comprise the phage vector sequences identified for the particular clone in Table 7, as well as the corresponding plasmid vector sequences designated above.

[0935] The deposited material in the sample assigned the ATCC Deposit Number cited by reference to Tables 1, 2, 6 and 7 for any given cDNA clone also may contain one or more additional plasmids, each comprising a cDNA clone different from that given clone. Thus, deposits sharing the same ATCC Deposit Number contain at least a plasmid for each Clone ID NO:Z.

TABLE 7

| | | | ATCC |
|---|---|---|---|
| Libraries owned by Catalog | Catalog Description | Vector | Deposit |
| HUKA HUKB HUKC HUKD HUKE | Human Uterine Cancer | Lambda ZAP II | LP01 |
| HUKF HUKG | | | |
| HCNA HCNB | Human Colon | Lambda Zap II | LP01 |
| HFFA | Human Fetal Brain, random primed | Lambda Zap II | LP01 |
| HTWA | Resting T-Cell | Lambda ZAP II | LP01 |
| HBQA | Early Stage Human Brain, random | Lambda ZAP II | LP01 |
| | primed | | |
| HLMB HLMF HLMG HLMH HLMI | breast lymph node CDNA library | Lambda ZAP II | LP01 |
| HLMJ HLMM HLMN | | | |
| HCQA HCQB | human colon cancer | Lamda ZAP II | LP01 |
| HMEA HMEC HMED HMEE HMEF | Human Microvascular Endothelial | Lambda ZAP II | LP01 |
| HMEG HMEI HMEJ HMEK HMEL | Cells, fract. A | | |
| HUSA HUSC | Human Umbilical Vein Endothelial | Lambda ZAP II | LP01 |
| | Cells, fract. A | | |
| HLQA HLQB | Hepatocellular Tumor | Lambda ZAP II | LP01 |
| HHGA HHGB HHGC HHGD | Hemangiopericytoma | Lambda ZAP II | LP01 |
| HSDM | Human Striatum Depression, re-rescue | Lambda ZAP II | LP01 |
| HUSH | H Umbilical Vein Endothelial Cells, | Lambda ZAP II | LP01 |
| | frac A, re-excision | | |
| HSGS | Salivary gland, subtracted | Lambda ZAP II | LP01 |
| HFXA HFXB HFXC HFXD HFXE | Brain frontal cortex | Lambda ZAP II | LP01 |
| HFXF HFXG HFXH | | | |
| HPQA HPQB HPQC | PERM TF274 | Lambda ZAP II | LP01 |
| HFXJ HFXK | Brain Frontal Cortex, re-excision | Lambda ZAP II | LP01 |
| HCWA HCWB HCWC HCWD HCWE | CD34 positive cells (Cord Blood) | ZAP Express | LP02 |
| HCWF HCWG HCWH HCWI HCWJ | | | |
| HCWK | | | |
| HCUA HCUB HCUC | CD34 depleted Buffy Coat (Cord | ZAP Express | LP02 |
| | Blood) | | |
| HRSM | A-14 cell line | ZAP Express | LP02 |
| HRSA | A1-CELL LINE | ZAP Express | LP02 |
| HCUD HCUE HCUF HCUG HCUH | CD34 depleted Buffy Coat (Cord | ZAP Express | LP02 |
| HCUI | Blood), re-excision | | |
| HBXE HBXF HBXG | H. Whole Brain #2, re-excision | ZAP Express | LP02 |
| HRLM | L8 cell line | ZAP Express | LP02 |
| HBXA HBXB HBXC HBXD | Human Whole Brain #2 - Oligo dT >1.5 Kb | ZAP Express | LP02 |
| HUDA HUDB HUDC | Testes | ZAP Express | LP02 |
| HHTM HHTN HHTO | H. hypothalamus, frac A; re-excision | ZAP Express | LP02 |
| HHTL | H. hypothalamus, frac A | ZAP Express | LP02 |
| HASA HASD | Human Adult Spleen | Uni-ZAP XR | LP03 |
| HFKC HFKD HFKE HFKF HFKG | Human Fetal Kidney | Uni-ZAP XR | LP03 |
| HE8A HE8B HE8C HE8D HE8E HE8F | Human 8 Week Whole Embryo | Uni-ZAP XR | LP03 |
| HE8M HE8N | | | |
| HGBA HGBD HGBE HGBF HGBG | Human Gall Bladder | Uni-ZAP XR | LP03 |
| HGBH HGBI | | | |
| HLHA HLHB HLHC HLHD HLHE | Human Fetal Lung III | Uni-ZAP XR | LP03 |
| HLHF HLHG HLHH HLHQ | | | |
| HPMA HPMB HPMC HPMD HPME | Human Placenta | Uni-ZAP XR | LP03 |
| HPMF HPMG HPMH | | | |
| HPRA HPRB HPRC HPRD | Human Prostate | Uni-ZAP XR | LP03 |
| HSIA HSIC HSID HSIE | Human Adult Small Intestine | Uni-ZAP XR | LP03 |
| HTEA HTEB HTEC HTED HTEE | Human Testes | Uni-ZAP XR | LP03 |
| HTEF HTEG HTEH HTEI HTEJ HTEK | | | |
| HTPA HTPB HTPC HTPD HTPE | Human Pancreas Tumor | Uni-ZAP XR | LP03 |
| HTTA HTTB HTTC HTTD HTTE | Human Testes Tumor | Uni-ZAP XR | LP03 |
| HTTF | | | |
| HAPA HAPB HAPC HAPM | Human Adult Pulmonary | Uni-ZAP XR | LP03 |
| HETA HETB HETC HETD HETE | Human Endometrial Tumor | Uni-ZAP XR | LP03 |
| HETF HETG HETH HETI | | | |
| HHFB HHFC HHFD HHFE HHFF | Human Fetal Heart | Uni-ZAP XR | LP03 |
| HHFG HHFH HHFI | | | |
| HHPB HHPC HHPD HHPE HHPF | Human Hippocampus | Uni-ZAP XR | LP03 |
| HHPG HHPH | | | |
| HCE1 HCE2 HCE3 HCE4 HCE5 HCEB | Human Cerebellum | Uni-ZAP XR | LP03 |
| HCEC HCED HCEE HCEF HCEG | | | |
| HUVB HUVC HUVD HUVE | Human Umbilical Vein, Endo. remake | Uni-ZAP XR | LP03 |
| HSTA HSTB HSTC HSTD | Human Skin Tumor | Uni-ZAP XR | LP03 |
| HTAA HTAB HTAC HTAD HTAE | Human Activated T-Cells | Uni-ZAP XR | LP03 |
| HFEA HFEB HFEC | Human Fetal Epithelium (Skin) | Uni-ZAP XR | LP03 |
| HJPA HJPB HJPC HJPD | HUMAN JURKAT MEMBRANE | Uni-ZAP XR | LP03 |
| | BOUND POLYSOMES | | |
| HESA | Human epithelioid sarcoma | Uni-Zap XR | LP03 |
| HLTA HLTB HLTC HLTD HLTE | Human T-Cell Lymphoma | Uni-ZAP XR | LP03 |
| HLTF | | | |
| HFTA HFTB HFTC HFTD | Human Fetal Dura Mater | Uni-ZAP XR | LP03 |
| HRDA HRDB HRDC HRDD HRDE | Human Rhabdomyosarcoma | Uni-ZAP XR | LP03 |
| HRDF | | | |
| HCAA HCAB HCAC | Cem cells cyclohexamide treated | Uni-ZAP XR | LP03 |
| HRGA HRGB HRGC HRGD | Raji Cells, cyclohexamide treated | Uni-ZAP XR | LP03 |
| HSUA HSUB HSUC HSUM | Supt Cells, cyclohexamide treated | Uni-ZAP XR | LP03 |
| HT4A HT4C HT4D | Activated T-Cells, 12 hrs. | Uni-ZAP XR | LP03 |
| HE9A HE9B HE9C HE9D HE9E HE9F | Nine Week Old Early Stage Human | Uni-ZAP XR | LP03 |
| HE9G HE9H HE9M HE9N | | | |
| HATA HATB HATC HATD HATE | Human Adrenal Gland Tumor | Uni-ZAP XR | LP03 |
| HT5A | Activated T-Cells, 24 hrs. | Uni-ZAP XR | LP03 |
| HFGA HFGM | Human Fetal Brain | Uni-ZAP XR | LP03 |
| HNEA HNEB HNEC HNED HNEE | Human Neutrophil | Uni-ZAP XR | LP03 |
| HBGB HBGD | Human Primary Breast Cancer | Uni-ZAP XR | LP03 |
| HBNA HBNB | Human Normal Breast | Uni-ZAP XR | LP03 |
| HCAS | Cem Cells, cyclohexamide treated, | Uni-ZAP XR | LP03 |
| | subtra | | |
| HHPS | Human Hippocampus, subtracted | pBS | LP03 |
| HKCS HKCU | Human Colon Cancer, subtracted | pBS | LP03 |
| HRGS | Raji cells, cyclohexamide treated, | pBS | LP03 |
| | subtracted | | |
| HSUT | Supt cells, cyclohexamide treated, | pBS | LP03 |
| | differentially expressed | | |
| HT4S | Activated T-Cells, 12 hrs, subtracted | Uni-ZAP XR | LP03 |
| HCDA HCDB HCDC HCDD HCDE | Human Chondrosarcoma | Uni-ZAP XR | LP03 |
| HOAA HOAB HOAC | Human Osteosarcoma | Uni-ZAP XR | LP03 |
| HTLA HTLB HTLC HTLD HTLE | Human adult testis, large inserts | Uni-ZAP XR | LP03 |
| HTLF | | | |
| HLMA HLMC HLMD | Breast Lymph node cDNA library | Uni-ZAP XR | LP03 |
| H6EA H6EB H6EC | HL-60, PMA 4H | Uni-ZAP XR | LP03 |
| HTXA HTXB HTXC HTXD HTXE | Activated T-Cell (12 hs)/Thiouridine | Uni-ZAP XR | LP03 |
| HTXF HTXG HTXH | labelledEco | | |
| HNFA HNFB HNFC HNFD HNFE | Human Neutrophil, Activated | Uni-ZAP XR | LP03 |
| HNFF HNFG HNFH HNFJ | | | |
| HTOB HTOC | HUMAN TONSILS, FRACTION 2 | Uni-ZAP XR | LP03 |
| HMGB | Human OB MG63 control fraction I | Uni-ZAP XR | LP03 |
| HOPB | Human OB HOS control fraction I | Uni-ZAP XR | LP03 |
| HORB | Human OB HOS treated (10 nM E2) | Uni-ZAP XR | LP03 |
| | fraction I | | |
| HSVA HSVB HSVC | Human Chronic Synovitis | Uni-ZAP XR | LP03 |
| HROA | HUMAN STOMACH | Uni-ZAP XR | LP03 |
| HBJA HBJB HBJC HBJD HBJE HBJF | HUMAN B CELL LYMPHOMA | Uni-ZAP XR | LP03 |
| HBJG HBJH HBJI HBJJ HBJK | | | |
| HCRA HCRB HCRC | human corpus colosum | Uni-ZAP XR | LP03 |
| HODA HODB HODC HODD | human ovarian cancer | Uni-ZAP XR | LP03 |
| HDSA | Dermatofibrosarcoma Protuberance | Uni-ZAP XR | LP03 |
| HMWA HMWB HMWC HMWD | Bone Marrow Cell Line (RS4; 11) | Uni-ZAP XR | LP03 |
| HMWE HMWF HMWG HMWH | | | |
| HMWI HMWJ | | | |
| HSOA | stomach cancer (human) | Uni-ZAP XR | LP03 |
| HERA | SKIN | Uni-ZAP XR | LP03 |
| HMDA | Brain-medulloblastoma | Uni-ZAP XR | LP03 |
| HGLA HGLB HGLD | Glioblastoma | Uni-ZAP XR | LP03 |
| HEAA | H. Atrophic Endometrium | Uni-ZAP XR | LP03 |
| HBCA HBCB | H. Lymph node breast Cancer | Uni-ZAP XR | LP03 |
| HPWT | Human Prostate BPH, re-excision | Uni-ZAP XR | LP03 |
| HFVG HFVH HFVI | Fetal Liver, subtraction II | pBS | LP03 |
| HNFI | Human Neutrophils, Activated, re- | pBS | LP03 |
| | excision | | |
| HBMB HBMC HBMD | Human Bone Marrow, re-excision | pBS | LP03 |
| HKML HKMM HKMN | H. Kidney Medulla, re-excision | pBS | LP03 |
| HKIX HKIY | H. Kidney Cortex, subtracted | pBS | LP03 |
| HADT | H. Amygdala Depression, subtracted | pBS | LP03 |
| H6AS | HI-60, untreated, subtracted | Uni-ZAP XR | LP03 |
| H6ES | HL-60, PMA 4 H, subtracted | Uni-ZAP XR | LP03 |
| H6BS | HL-60, RA 4 h, Subtracted | Uni-ZAP XR | LP03 |
| H6CS | HL-60, PMA 1 d, subtracted | Uni-ZAP XR | LP03 |
| HTXJ HTXK | Activated T-cell(12 h)/Thiouridine-re- | Uni-ZAP XR | LP03 |
| | excision | | |
| HMSA HMSB HMSC HMSD HMSE | Monocyte activated | Uni-ZAP XR | LP03 |
| HMSF HMSG HMSH HMSI HMSJ | | | |
| HMSK | | | |
| HAGA HAGB HAGC HAGD HAGE | Human Amygdala | Uni-ZAP XR | LP03 |
| HAGF | | | |
| HSRA HSRB HSRE | STROMAL - OSTEOCLASTOMA | Uni-ZAP XR | LP03 |
| HSRD HSRF HSRG HSRH | Human Osteoclastoma Stromal Cells - | Uni-ZAP XR | LP03 |
| | unamplified | | |
| HSQA HSQB HSQC HSQD HSQE | Stromal cell TF274 | Uni-ZAP XR | LP03 |
| HSQF HSQG | | | |
| HSKA HSKB HSKC HSKD HSKE | Smooth muscle, serum treated | Uni-ZAP XR | LP03 |
| HSKF HSKZ | | | |
| HSLA HSLB HSLC HSLD HSLE | Smooth muscle, control | Uni-ZAP XR | LP03 |
| HSLF HSLG | | | |
| HSDA HSDD HSDE HSDF HSDG | Spinal cord | Uni-ZAP XR | LP03 |
| HSDH | | | |
| HPWS | Prostate-BPH subtracted II | pBS | LP03 |
| HSKW HSKX HSKY | Smooth Muscle- HASTE normalized | pBS | LP03 |
| HFPB HFPC HFPD | H. Frontal cortex, epileptic; re-excision | Uni-ZAP XR | LP03 |
| HSDI HSDJ HSDK | Spinal Cord, re-excision | Uni-ZAP XR | LP03 |
| HSKN HSKO | Smooth Muscle Serum Treated, Norm | pBS | LP03 |
| HSKG HSKH HSKI | Smooth muscle, serum induced, re-exc | pBS | LP03 |
| HFCA HFCB HFCC HFCD HFCE | Human Fetal Brain | Uni-ZAP XR | LP04 |
| HFCF | | | |
| HPTA HPTB HPTD | Human Pituitary | Uni-ZAP XR | LP04 |
| HTHB HTHC HTHD | Human Thymus | Uni-ZAP XR | LP04 |
| HE6B HE6C HE6D HE6E HE6F HE6G | Human Whole Six Week Old Embryo | Uni-ZAP XR | LP04 |
| HE6S | | | |
| HSSA HSSB HSSC HSSD HSSE HSSF | Human Synovial Sarcoma | Uni-ZAP XR | LP04 |
| HSSG HSSH HSSI HSSJ HSSK | | | |
| HE7T | 7 Week Old Early Stage Human, | Uni-ZAP XR | LP04 |
| | subtracted | | |
| HEPA HEPB HEPC | Human Epididymus | Uni-ZAP XR | LP04 |
| HSNA HSNB HSNC HSNM HSNN | Human Synovium | Uni-ZAP XR | LP04 |
| HPFB HPFC HPFD HPFE | Human Prostate Cancer, Stage C | Uni-ZAP XR | LP04 |
| | fraction | | |
| HE2A HE2D HE2E HE2H HE2I HE2M | 12 Week Old Early Stage Human | Uni-ZAP XR | LP04 |
| HE2N HE2O | | | |
| HE2B HE2C HE2F HE2G HE2P HE2Q | 12 Week Old Early Stage Human, II | Uni-ZAP XR | LP04 |
| HPTS HPTT HPTU | Human Pituitary, subtracted | Uni-ZAP XR | LP04 |
| HAUA HAUB HAUC | Amniotic Cells - TNF induced | Uni-ZAP XR | LP04 |
| HAQA HAQB HAQC HAQD | Amniotic Cells - Primary Culture | Uni-ZAP XR | LP04 |
| HWTA HWTB HWTC | wilm's tumor | Uni-ZAP XR | LP04 |
| HBSD | Bone Cancer, re-excision | Uni-ZAP XR | LP04 |
| HSGB | Salivary gland, re-excision | Uni-ZAP XR | LP04 |
| HSJA HSJB HSJC | Smooth muscle-ILb induced | Uni-ZAP XR | LP04 |
| HSXA HSXB HSXC HSXD | Human Substantia Nigra | Uni-ZAP XR | LP04 |
| HSHA HSHB HSHC | Smooth muscle, IL1b induced | Uni-ZAP XR | LP04 |
| HOUA HOUB HOUC HOUD HOUE | Adipocytes | Uni-ZAP XR | LP04 |
| HPWA HPWB HPWC HPWD HPWE | Prostate BPH | Uni-ZAP XR | LP04 |
| HELA HELB HELC HELD HELE | Endothelial cells-control | Uni-ZAP XR | LP04 |
| HELF HELG HELH | | | |
| HEMA HEMB HEMC HEMD HEME | Endothelial-induced | Uni-ZAP XR | LP04 |
| HEMF HEMG HEMH | | | |
| HBIA HBIB HBIC | Human Brain, Striatum | Uni-ZAP XR | LP04 |
| HHSA HHSB HHSC HHSD HHSE | Human Hypothalmus, Schizophrenia | Uni-ZAP XR | LP04 |
| HNGA HNGB HNGC HNGD HNGE | neutrophils control | Uni-ZAP XR | LP04 |
| HNGF HNGG HNGH HNGI HNGJ | | | |
| HNHA HNHB HNHC HNHD HNHE | Neutrophils IL-1 and LPS induced | Uni-ZAP XR | LP04 |
| HNHF HNHG HNHH HNHI HNHJ | | | |
| HSDB HSDC | STRIATUM DEPRESSION | Uni-ZAP XR | LP04 |
| HHPT | Hypothalamus | Uni-ZAP XR | LP04 |
| HSAT HSAU HSAV HSAW HSAX | Anergic T-cell | Uni-ZAP XR | LP04 |
| HSAY HSAZ | | | |
| HBMS HBMT HBMU HBMV HBMW | Bone marrow | Uni-ZAP XR | LP04 |
| HBMX | | | |
| HOEA HOEB HOEC HOED HOEE | Osteoblasts | Uni-ZAP XR | LP04 |
| HOEF HOEJ | | | |
| HAIA HAIB HAIC HAID HAIE HAIF | Epithelial-TNFa and INF induced | Uni-ZAP XR | LP04 |
| HTGA HTGB HTGC HTGD | Apoptotic T-cell | Uni-ZAP XR | LP04 |
| HMCA HMCB HMCC HMCD HMCE | Macrophage-oxLDL | Uni-ZAP XR | LP04 |
| HMAA HMAB HMAC HMAD HMAE | Macrophage (GM-CSF treated) | Uni-ZAP XR | LP04 |
| HMAF HMAG | | | |
| HPHA | Normal Prostate | Uni-ZAP XR | LP04 |
| HPIA HPIB HPIC | LNCAP prostate cell line | Uni-ZAP XR | LP04 |
| HPJA HPJB HPJC | PC3 Prostate cell line | Uni-ZAP XR | LP04 |
| HOSE HOSF HOSG | Human Osteoclastoma, re-excision | Uni-ZAP XR | LP04 |
| HTGE HTGF | Apoptotic T-cell, re-excision | Uni-ZAP XR | LP04 |
| HMAJ HMAK | H Macrophage (GM-CSF treated), re- | Uni-ZAP XR | LP04 |
| | excision | | |
| HACB HACC HACD | Human Adipose Tissue, re-excision | Uni-ZAP XR | LP04 |
| HFPA | H. Frontal Cortex, Epileptic | Uni-ZAP XR | LP04 |
| HFAA HFAB HFAC HFAD HFAE | Alzheimer's, spongy change | Uni-ZAP XR | LP04 |
| HFAM | Frontal Lobe, Dementia | Uni-ZAP XR | LP04 |
| HMIA HMIB HMIC | Human Manic Depression Tissue | Uni-ZAP XR | LP04 |
| HTSA HTSE HTSF HTSG HTSH | Human Thymus | pBS | LP05 |
| HPBA HPBB HPBC HPBD HPBE | Human Pineal Gland | pBS | LP05 |
| HSAA HSAB HSAC | HSA 172 Cells | pBS | LP05 |
| HSBA HSBB HSBC HSBM | HSC172 cells | pBS | LP05 |
| HJAA HJAB HJAC HJAD | Jurkat T-cell G1 phase | pBS | LP05 |
| HJBA HJBB HJBC HJBD | Jurkat T-Cell, S phase | pBS | LP05 |
| HAFA HAFB | Aorta endothelial cells + TNF-a | pBS | LP05 |
| HAWA HAWB HAWC | Human White Adipose | pBS | LP05 |
| HTNA HTNB | Human Thyroid | pBS | LP05 |
| HONA | Normal Ovary, Premenopausal | pBS | LP05 |
| HARA HARB | Human Adult Retina | pBS | LP05 |
| HLJA HLJB | Human Lung | pCMVSport 1 | LP06 |
| HOFM HOFN HOFO | H. Ovarian Tumor, II, OV5232 | pCMVSport 2.0 | LP07 |
| HOGA HOGB HOGC | OV 10-3-95 | pCMVSport 2.0 | LP07 |
| HCGL | CD34+cells, II | pCMVSport 2.0 | LP07 |
| HDLA | Hodgkin's Lymphoma I | pCMVSport 2.0 | LP07 |
| HDTA HDTB HDTC HDTD HDTE | Hodgkin's Lymphoma II | pCMVSport 2.0 | LP07 |
| HKAA HKAB HKAC HKAD HKAE | Keratinocyte | pCMVSport2.0 | LP07 |
| HKAF HKAG HKAH | | | |
| HCIM | CAPFINDER, Crohn's Disease, lib 2 | pCMVSport 2.0 | LP07 |
| HKAL | Keratinocyte, lib 2 | pCMVSport2.0 | LP07 |
| HKAT | Keratinocyte, lib 3 | pCMVSport2.0 | LP07 |
| HNDA | Nasal polyps | pCMVSport2.0 | LP07 |
| HDRA | H. Primary Dendritic Cells, lib 3 | pCMVSport2.0 | LP07 |
| HOHA HOHB HOHC | Human Osteoblasts II | pCMVSport2.0 | LP07 |
| HLDA HLDB HLDC | Liver, Hepatoma | pCMVSport3.0 | LP08 |
| HLDN HLDO HLDP | Human Liver, normal | pCMVSport3.0 | LP08 |
| HMTA | pBMC stimulated w/poly I/C | pCMVSport3.0 | LP08 |
| HNTA | NTERA2, control | pCMVSport3.0 | LP08 |
| HDPA HDPB HDPC HDPD HDPF | Primary Dendritic Cells, lib 1 | pCMVSport3.0 | LP08 |
| HDPG HDPH HDPI HDPJ HDPK | | | |
| HDPM HDPN HDPO HDPP | Primary Dendritic cells, frac 2 | pCMVSport3.0 | LP08 |
| HMUA HMUB HMUC | Myoloid Progenitor Cell Line | pCMVSport3.0 | LP08 |
| HHEA HHEB HHEC HHED | T Cell helper I | pCMVSport3.0 | LP08 |
| HHEM HHEN HHEO HHEP | T cell helper II | pCMVSport3.0 | LP08 |
| HEQA HEQB HEQC | Human endometrial stromal cells | pCMVSport3.0 | LP08 |
| HJMA HJMB | Human endometrial stromal cells- | pCMVSport3.0 | LP08 |
| | treated with progesterone | | |
| HSWA HSWB HSWC | Human endometrial stromal cells- | pCMVSport3.0 | LP08 |
| | treated with estradiol | | |
| HSYA HSYB HSYC | Human Thymus Stromal Cells | pCMVSport3.0 | LP08 |
| HLWA HLWB HLWC | Human Placenta | pCMVSport3.0 | LP08 |
| HRAA HRAB HRAC | Rejected Kidney, lib 4 | pCMVSport3.0 | LP08 |
| HMTM | PCR, pBMC I/C treated | PCRII | LP09 |
| HMJA | H. Meniingima, M6 | pSport 1 | LP10 |
| HMKA HMKB HMKC HMKD HMKE | H. Meningima, M1 | pSport 1 | LP10 |
| HUSG HUSI | Human umbilical vein endothelial cells, | pSport 1 | LP10 |
| | IL-4 induced | | |
| HUSX HUSY | Human Umbilical Vein Endothelial | pSport 1 | LP10 |
| | Cells, uninduced | | |
| HOFA | Ovarian Tumor I, OV5232 | pSport 1 | LP10 |
| HCFA HCFB HCFC HCFD | T-Cell PHA 16 hrs | pSport 1 | LP10 |
| HCFL HCFM HCFN HCFO | T-Cell PHA 24 hrs | pSport 1 | LP10 |
| HADA HADC HADD HADE HADF | Human Adipose | pSport 1 | LP10 |
| HADG | | | |
| HOVA HOVB HOVC | Human Ovary | pSport 1 | LP10 |
| HTWB HTWC HTWD HTWE HTWF | Resting T-Cell Library, II | pSport 1 | LP10 |
| HMMA | Spleen metastic melanoma | pSport 1 | LP10 |
| HLYA HLYB HLYC HLYD HLYE | Spleen, Chronic lymphocytic leukemia | pSport 1 | LP10 |
| HCGA | CD34+ cell, I | pSport 1 | LP10 |
| HEOM HEON | Human Eosinophils | pSport 1 | LP10 |
| HTDA | Human Tonsil, Lib 3 | pSport 1 | LP10 |
| HSPA | Salivary Gland, Lib 2 | pSport 1 | LP10 |
| HCHA HCHB HCHC | Breast Cancer cell line, MDA 36 | pSport 1 | LP10 |
| HCHM HCHN | Breast Cancer Cell line, angiogenic | pSport 1 | LP10 |
| HCIA | Crohn's Disease | pSport 1 | LP10 |
| HDAA HDAB HDAC | HEL cell line | pSport 1 | LP10 |
| HABA | Human Astrocyte | pSport 1 | LP10 |
| HUFA HUFB HUFC | Ulcerative Colitis | pSport 1 | LP10 |
| HNTM | NTERA2 + retinoic acid, 14 days | pSport 1 | LP10 |
| HDQA | Primary Dendritic cells, CapFinder2, | pSport 1 | LP10 |
| | frac 1 | | |
| HDQM | Primary Dendritic Cells, CapFinder, | pSport 1 | LP10 |
| | frac 2 | | |
| HLDX | Human Liver, normal, CapFinder | pSport 1 | LP10 |
| HULA HULB HULC | Human Dermal Endothelial | pSport1 | LP10 |
| | Cells, untreated | | |
| HUMA | Human Dermal Endothelial cells, treated | pSport1 | LP10 |
| HCJA | Human Stromal Endometrial | pSport1 | LP10 |
| | fibroblasts, untreated | | |
| HCJM | Human Stromal endometrial fibroblasts, | pSport1 | LP10 |
| | treated w/ estradiol | | |
| HEDA | Human Stromal endometrial fibroblasts, | pSport1 | LP10 |
| | treated with progesterone | | |
| HFNA | Human ovary tumor cell OV350721 | pSport1 | LP10 |
| HKGA HKGB HKGC HKGD | Merkel Cells | pSport1 | LP10 |
| HLSA HISB HISC | Pancreas Islet Cell Tumor | pSport1 | LP10 |
| HLSA | Skin, burned | pSport1 | LP10 |
| HBZA | Prostate, BPH, Lib 2 | pSport 1 | LP10 |
| HBZS | Prostate BPH, Lib 2, subtracted | pSport 1 | LP10 |
| HFIA HFIB HFIC | Synovial Fibroblasts (control) | pSport 1 | LP10 |
| HFIH HFII HFIJ | Synovial hypoxia | pSport 1 | LP10 |
| HFIT HFIU HFIV | Synovial IL-1/TNF stimulated | pSport 1 | LP10 |
| HGCA | Messangial cell, frac 1 | pSport1 | LP10 |
| HMVA HMVB HMVC | Bone Marrow Stromal Cell, untreated | pSport1 | LP10 |
| HFIX HFIY HFIZ | Synovial Fibroblasts (Il1/TNF), subt | pSport1 | LP10 |
| HFOX HFOY HFOZ | Synovial hypoxia-RSF subtracted | pSport1 | LP10 |
| HMQA HMQB HMQC HMQD | Human Activated Monocytes | Uni-ZAP XR | LP11 |
| HLIA HLIB HLIC | Human Liver | pCMVSport 1 | LP012 |
| HHBA HHBB HHBC HHBD HHBE | Human Heart | pCMVSport 1 | LP012 |
| HBBA HBBB | Human Brain | pCMVSport 1 | LP012 |
| HLJA HLJB HLJC HLJD HLJE | Human Lung | pCMVSport 1 | LP012 |
| HOGA HOGB HOGC | Ovarian Tumor | pCMVSport 2.0 | LP012 |
| HTJM | Human Tonsils, Lib 2 | pCMVSport 2.0 | LP012 |
| HAMF HAMG | KMH2 | pCMVSport 3.0 | LP012 |
| HAJA HAJB HAJC | L428 | pCMVSport 3.0 | LP012 |
| HWBA HWBB HWBC HWBD HWBE | Dendritic cells, pooled | pCMVSport 3.0 | LP012 |
| HWAA HWAB HWAC HWAD HWAE | Human Bone Marrow, treated | pCMVSport 3.0 | LP012 |
| HYAA HYAB HYAC | B Cell lymphoma | pCMVSport 3.0 | LP012 |
| HWHG HWHH HWHI | Healing groin wound, 6.5 hours post | pCMVSport 3.0 | LP012 |
| | incision | | |
| HWHP HWHQ HWHR | Healing groin wound; 7.5 hours post | pCMVSport 3.0 | LP012 |
| | incision | | |
| HARM | Healing groin wound - zero hr post- | pCMVSport 3.0 | LP012 |
| | incision (control) | | |
| HBIM | Olfactory epithelium; nasalcavity | pCMVSport 3.0 | LP012 |
| HWDA | Healing Abdomen wound; 70&90 min | pCMVSport 3.0 | LP012 |
| | post incision | | |
| HWEA | Healing Abdomen Wound; 15 days post | pCMVSport 3.0 | LP012 |
| | incision | | |
| HWJA | Healing Abdomen Wound; 21&29 days | pCMVSport 3.0 | LP012 |
| HNAL | Human Tongue, frac 2 | pSport1 | LP012 |
| HMJA | H. Meniingima, M6 | pSport1 | LP012 |
| HMKA HMKB HMKC HMKD HMKE | H. Meningima, M1 | pSport1 | LP012 |
| HOFA | Ovarian Tumor I, 0V5232 | pSport1 | LP012 |
| HCFA HCFB HCFC HCFD | T-Cell PHA 16 hrs | pSport1 | LP012 |
| HCFL HCFM HCFN HCFO | T-Cell PHA 24 hrs | pSport1 | LP012 |
| HMMA HMMB HMMC | Spleen metastic melanoma | pSport1 | LP012 |
| HTDA | Human Tonsil, Lib 3 | pSport1 | LP012 |
| HDBA | Human Fetal Thymus | pSport1 | LP012 |
| HDUA | Pericardium | pSport1 | LP012 |
| HBZA | Prostate, BPH, Lib 2 | pSport1 | LP012 |
| HWCA | Larynx tumor | pSport1 | LP012 |
| HWKA | Normal lung | pSport1 | LP012 |
| HSMB | Bone marrow stroma, treated | pSport1 | LP012 |
| HBHM | Normal trachea | pSport1 | LP012 |
| HLFC | Human Larynx | pSport1 | LP012 |
| HLRB | Siebben Polyposis | pSport1 | LP012 |
| HNIA | Mammary Gland | pSport1 | LP012 |
| HNJB | Palate carcinoma | pSport1 | LP012 |
| HNKA | Palate normal | pSport1 | LP012 |
| HMZA | Pharynx carcinoma | pSport1 | LP012 |
| HABG | Cheek Carcinoma | pSport1 | LP012 |
| HMZM | Pharynx Carcinoma | pSport1 | LP012 |
| HDRM | Larynx Carcinoma | pSport1 | LP012 |
| HVAA | Pancreas normal PCA4 No | pSport1 | LP012 |
| HICA | Tongue carcinoma | pSport1 | LP012 |
| HUKA HUKB HUKC HUKD HUKE | Human Uterine Cancer | Lambda ZAP II | LP013 |
| HFFA | Human Fetal Brain, random primed | Lambda ZAP II | LP013 |
| HTUA | Activated T-cell labeled with 4-thioluri | Lambda ZAP II | LP013 |
| HBQA | Early Stage Human Brain, random | Lambda ZAP II | LP013 |
| | primed | | |
| HMEB | Human microvascular Endothelial cells, | Lambda ZAP II | LP013 |
| | fract. B | | |
| HUSH | Human Umbilical Vein Endothelial | Lambda ZAP II | LP013 |
| | cells, fract. A, re-excision | | |
| HLQC HLQD | Hepatocellular tumor, re-excision | Lambda ZAP II | LP013 |
| HTWJ HTWK HTWL | Resting T-cell, re-excision | Lambda ZAP II | LP013 |
| HF6S | Human Whole 6 week Old Embryo (II), | pBluescript | LP013 |
| | subt | | |
| HHPS | Human Hippocampus, subtracted | pBluescript | LP013 |
| HL1S | LNCAP, differential expression | pBluescript | LP013 |
| HLHS HLHT | Early Stage Human Lung, Subtracted | pBluescript | LP013 |
| HSUS | Supt cells, cyclohexamide treated, | pBluescript | LP013 |
| | subtracted | | |
| HSUT | Supt cells, cyclohexamide treated, | pBluescript | LP013 |
| | differentially expressed | | |
| HSDS | H. Striatum Depression, subtracted | pBluescript | LP013 |
| HPTZ | Human Pituitary, Subtracted VII | pBluescript | LP013 |
| HSDX | H. Striatum Depression, subt II | pBluescript | LP013 |
| HSDZ | H. Striatum Depression, subt | pBluescript | LP013 |
| HPBA HPBB HPBC HPBD HPBE | Human Pineal Gland | pBluescript SK− | LP013 |
| HRTA | Colorectal Tumor | pBluescript SK− | LP013 |
| HSBA HSBB HSBC HSBM | HSC172 cells | pBluescript SK− | LP013 |
| HJAA HJAB HJAC HJAD | Jurkat T-cell G1 phase | pBluescript SK− | LP013 |
| HJBA HJBB HJBC HJBD | Jurkat T-cell, S1 phase | pBluescript SK− | LP013 |
| HTNA HTNB | Human Thyroid | pBluescript SK− | LP013 |
| HAHA HAHB | Human Adult Heart | Uni-ZAP XR | LP013 |
| HE6A | Whole 6 week Old Embryo | Uni-ZAP XR | LP013 |
| HFCA HFCB HFCC HFCD HFCE | Human Fetal Brain | Uni-ZAP XR | LP013 |
| HFKC HFKD HFKE HFKF HFKG | Human Fetal Kidney | Uni-ZAP XR | LP013 |
| HGBA HGBD HGBE HGBF HGBG | Human Gall Bladder | Uni-ZAP XR | LP013 |
| HPRA HPRB HPRC HPRD | Human Prostate | Uni-ZAP XR | LP013 |
| HTEA HTEB HTEC HTED HTEE | Human Testes | Uni-ZAP XR | LP013 |
| HTTA HTTB HTTC HTTD HTTE | Human Testes Tumor | Uni-ZAP XR | LP013 |
| HYBA HYBB | Human Fetal Bone | Uni-ZAP XR | LP013 |
| HFLA | Human Fetal Liver | Uni-ZAP XR | LP013 |
| HHFB HHFC HHFD HHFE HHFF | Human Fetal Heart | Uni-ZAP XR | LP013 |
| HUVB HUVC HUVD HUVE | Human Umbilical Vein, End. remake | Uni-ZAP XR | LP013 |
| HTHB HTHC HTHD | Human Thymus | Uni-ZAP XR | LP013 |
| HSTA HSTB HSTC HSTD | Human Skin Tumor | Uni-ZAP XR | LP013 |
| HTAA HTAB HTAC HTAD HTAE | Human Activated T-cells | Uni-ZAP XR | LP013 |
| HFEA HFEB HFEC | Human Fetal Epithelium (skin) | Uni-ZAP XR | LP013 |
| HJPA HJPB HJPC HJPD | Human Jurkat Membrane Bound | Uni-ZAP XR | LP013 |
| | Polysomes | | |
| HESA | Human Epithelioid Sarcoma | Uni-ZAP XR | LP013 |
| HALS | Human Adult Liver, Subtracted | Uni-ZAP XR | LP013 |
| HFTA HFTB HFTC HFTD | Human Fetal Dura Mater | Uni-ZAP XR | LP013 |
| HCAA HCAB HCAC | Cem cells, cyclohexamide treated | Uni-ZAP XR | LP013 |
| HRGA HRGB HRGC HRGD | Raji Cells, cyclohexamide treated | Uni-ZAP XR | LP013 |
| HE9A HE9B HE9C HE9D HE9E | Nine Week Old Early Stage Human | Uni-ZAP XR | LP013 |
| HSFA | Human Fibrosarcoma | Uni-ZAP XR | LP013 |
| HATA HATB HATC HATD HATE | Human Adrenal Gland Tumor | Uni-ZAP XR | LP013 |
| HTRA | Human Trachea Tumor | Uni-ZAP XR | LP013 |
| HE2A HE2D HE2E HE2H HE2I | 12 Week Old Early Stage Human | Uni-ZAP XR | LP013 |
| HE2B HE2C HE2F HE2G HE2P | 12 Week Old Early Stage Human, II | Uni-ZAP XR | LP013 |
| HNEA HNEB HNEC HNED HNEE | Human Neutrophil | Uni-ZAP XR | LP013 |
| HBGA | Human Primary Breast Cancer | Uni-ZAP XR | LP013 |
| HPTS HPTT HPTU | Human Pituitary, subtracted | Uni-ZAP XR | LP013 |
| HMQA HMQB HMQC HMQD | Human Activated Monocytes | Uni-ZAP XR | LP013 |
| HOAA HOAB HOAC | Human Osteosarcoma | Uni-ZAP XR | LP013 |
| HTOA HTOD HTOE HTOF HTOG | human tonsils | Uni-ZAP XR | LP013 |
| HMGB | Human OB MG63 control fraction I | Uni-ZAP XR | LP013 |
| HOPB | Human OB HOS control fraction I | Uni-ZAP XR | LP013 |
| HOQB | Human OB HOS treated (1 nM E2) | Uni-ZAP XR | LP013 |
| | fraction I | | |
| HAUA HAUB HAUC | Amniotic Cells - TNF induced | Uni-ZAP XR | LP013 |
| HAQA HAQB HAQC HAQD | Amniotic Cells - Primary Culture | Uni-ZAP XR | LP013 |
| HROA HROC | HUMAN STOMACH | Uni-ZAP XR | LP013 |
| HBJA HBJB HBJC HBJD HBJE | HUMAN B CELL LYMPHOMA | Uni-ZAP XR | LP013 |
| HODA HODB HODC HODD | human ovarian cancer | Uni-ZAP XR | LP013 |
| HCPA | Corpus Callosum | Uni-ZAP XR | LP013 |
| HSOA | stomach cancer (human) | Uni-ZAP XR | LP013 |
| HERA | SKIN | Uni-ZAP XR | LP013 |
| HMDA | Brain-medulloblastoma | Uni-ZAP XR | LP013 |
| HGLA HGLB HGLD | Glioblastoma | Uni-ZAP XR | LP013 |
| HWTA HWTB HWTC | wilm's tumor | Uni-ZAP XR | LP013 |
| HEAA | H. Atrophic Endometrium | Uni-ZAP XR | LP013 |
| HAPN HAPO HAPP HAPQ HAPR | Human Adult Pulmonary; re-excision | Uni-ZAP XR | LP013 |
| HLTG HLTH | Human T-cell lymphoma; re-excision | Uni-ZAP XR | LP013 |
| HAHC HAHD HAHE | Human Adult Heart; re-excision | Uni-ZAP XR | LP013 |
| HAGA HAGB HAGC HAGD HAGE | Human Amygdala | Uni-ZAP XR | LP013 |
| HSJA HSJB HSJC | Smooth muscle-ILb induced | Uni-ZAP XR | LP013 |
| HSHA HSHB HSHC | Smooth muscle, IL 1b induced | Uni-ZAP XR | LP013 |
| HPWA HPWB HPWC HPWD HPWE | Prostate BPH | Uni-ZAP XR | LP013 |
| HPIA HPIB HPIC | LNCAP prostate cell line | Uni-ZAP XR | LP013 |
| HPJA HPJB HPJC | PC3 Prostate cell line | Uni-ZAP XR | LP013 |
| HBTA | Bone Marrow Stroma, TNF&LPS ind | Uni-ZAP XR | LP013 |
| HMCF HMCG HMCH HMCI HMCJ | Macrophage-oxLDL; re-excision | Uni-ZAP XR | LP013 |
| HAGG HAGH HAGI | Human Amygdala; re-excision | Uni-ZAP XR | LP013 |
| HACA | H. Adipose Tissue | Uni-ZAP XR | LP013 |
| HKFB | K562 + PMA (36 hrs), re-excision | ZAP Express | LP013 |
| HCWT HCWU HCWV | CD34 positive cells (cord blood), re-ex | ZAP Express | LP013 |
| HBWA | Whole brain | ZAP Express | LP013 |
| HBXA HBXB HBXC HBXD | Human Whole Brain #2 - Oligo dT >1.5 Kb | ZAP Express | LP013 |
| HAVM | Temporal cortex-Alzheizmer | pT-Adv | LP014 |
| HAVT | Hippocampus, Alzheimer Subtracted | pT-Adv | LP014 |
| HHAS | CHME Cell Line | Uni-ZAP XR | LP014 |
| HAJR | Larynx normal | pSport 1 | LP014 |
| HWLE HWLF HWLG HWLH | Colon Normal | pSport 1 | LP014 |
| HCRM HCRN HCRO | Colon Carcinoma | pSport 1 | LP014 |
| HWLI HWLJ HWLK | Colon Normal | pSport 1 | LP014 |
| HWLQ HWLR HWLS HWLT | Colon Tumor | pSport 1 | LP014 |
| HBFM | Gastrocnemius Muscle | pSport 1 | LP014 |
| HBOD HBOE | Quadriceps Muscle | pSport 1 | LP014 |
| HBKD HBKE | Soleus Muscle | pSport 1 | LP014 |
| HCCM | Pancreatic Langerhans | pSport 1 | LP014 |
| HWGA | Larynx carcinoma | pSport 1 | LP014 |
| HWGM HWGN | Larynx carcinoma | pSport 1 | LP014 |
| HWLA HWLB HWLC | Normal colon | pSport 1 | LP014 |
| HWLM HWLN | Colon Tumor | pSport 1 | LP014 |
| HVAM HVAN HVAO | Pancreas Tumor | pSport 1 | LP014 |
| HWGQ | Larynx carcinoma | pSport 1 | LP104 |
| HAQM HAQN | Salivary Gland | pSport 1 | LP014 |
| HASM | Stomach; normal | pSport 1 | LP014 |
| HBCM | Uterus; normal | pSport 1 | LP014 |
| HCDM | Testis; normal | pSport 1 | LP014 |
| HDJM | Brain; normal | pSport 1 | LP014 |
| HEFM | Adrenal Gland, normal | pSport 1 | LP014 |
| HBAA | Rectum normal | pSport 1 | LP014 |
| HFDM | Rectum tumour | pSport 1 | LP014 |
| HGAM | Colon, normal | pSport 1 | LP014 |
| HHMM | Colon, tumour | pSport 1 | LP014 |
| HCLB HCLC | Human Lung Cancer | Lambda Zap II | LP015 |
| HRLA | L1 Cell line | ZAP Express | LP015 |
| HHAM | Hypothalamus, Alzheimer's | pCMVSport 3.0 | LP015 |
| HKBA | Ku 812F Basophils Line | pSport 1 | LP015 |
| HS2S | Saos2, Dexamethosome Treated | pSport 1 | LP016 |
| HA5A | Lung Carcinoma A549 TNFalpha | pSport 1 | LP016 |
| | activated | | |
| HTFM | TF-1 Cell Line GM-CSF Treated | pSport 1 | LP016 |
| HYAS | Thyroid Tumour | pSport 1 | LP016 |
| HUTS | Larynx Normal | pSport 1 | LP016 |
| HXOA | Larynx Tumor | pSport 1 | LP016 |
| HEAH | Ea.hy.926 cell line | pSport 1 | LP016 |
| HINA | Adenocarcinoma Human | pSport 1 | LP016 |
| HRMA | Lung Mesothelium | pSport 1 | LP016 |
| HLCL | Human Pre-Differentiated Adipocytes | Uni-Zap XR | LP017 |
| HS2A | Saos2 Cells | pSport 1 | LP020 |
| HS2I | Saos2 Cells; Vitamin D3 Treated | pSport 1 | LP020 |
| HUCM | CHME Cell Line, untreated | pSport 1 | LP020 |
| HEPN | Aryepiglottis Normal | pSport 1 | LP020 |
| HPSN | Sinus Piniformis Tumour | pSport 1 | LP020 |
| HNSA | Stomach Normal | pSport 1 | LP020 |
| HNSM | Stomach Tumour | pSport 1 | LP020 |
| HNLA | Liver Normal Met5No | pSport 1 | LP020 |
| HUTA | Liver Tumour Met 5 Tu | pSport 1 | LP020 |
| HOCN | Colon Normal | pSport 1 | LP020 |
| HOCT | Colon Tumor | pSport 1 | LP020 |
| HTNT | Tongue Tumour | pSport 1 | LP020 |
| HLXN | Larynx Normal | pSport 1 | LP020 |
| HLXT | Larynx Tumour | pSport 1 | LP020 |
| HTYN | Thymus | pSport 1 | LP020 |
| HPLN | Placenta | pSport 1 | LP020 |
| HTNG | Tongue Normal | pSport 1 | LP020 |
| HZAA | Thyroid Normal (SDCA2 No) | pSport 1 | LP020 |
| HWES | Thyroid Thyroiditis | pSport 1 | LP020 |
| HFHD | Ficolled Human Stromal Cells, 5Fu | pTrip1Ex2 | LP021 |
| | treated | | |
| HFHM, HFHN | Ficolled Human Stromal Cells, | pTrip1Ex2 | LP021 |
| | Untreated | | |
| HPCI | Hep G2 Cells, lambda library | lambda Zap-CMV XR | LP021 |
| HBCA, HBCB, HBCC | H. Lymph node breast Cancer | Uni-ZAP XR | LP021 |
| HCOK | Chondrocytes | pSPORT1 | LP022 |
| HDCA, HDCB, HDCC | Dendritic Cells From CD34 Cells | pSPORT1 | LP022 |
| HDMA, HDMB | CD40 activated monocyte dendritic | pSPORT1 | LP022 |
| | cells | | |
| HDDM, HDDN, HDDO | LPS activated derived dendritic cells | pSPORT1 | LP022 |
| HPCR | Hep G2 Cells, PCR library | lambda Zap-CMV XR | LP022 |
| HAAA, HAAB, HAAC | Lung, Cancer (4005313A3): Invasive | pSPORT1 | LP022 |
| | Poorly Differentiated Lung | | |
| | Adenocarcinoma | | |
| HIPA, HIPB, HIPC | Lung, Cancer (4005163 B7): Invasive, | pSPORT1 | LP022 |
| | Poorly Diff. Adenocarcinoma, | | |
| | Metastatic | | |
| HOOH, HOOI | Ovary, Cancer: (4004562 B6) Papillary | pSPORT1 | LP022 |
| | Serous Cystic Neoplasm, Low | | |
| | Malignant Pot | | |
| HIDA | Lung, Normal: (4005313 B1) | pSPORT1 | LP022 |
| HUJA, HUJB, HUJC, HUJD, HUJE | B-Cells | pCMVSport 3.0 | LP022 |
| HNOA, HNOB, HNOC, HNOD | Ovary, Normal: (9805C040R) | pSPORT1 | LP022 |
| HNLM | Lung, Normal: (4005313 B1) | pSPORT1 | LP022 |
| HSCL | Stromal Cells | pSPORT1 | LP022 |
| HAAX | Lung, Cancer: (4005313 A3) Invasive | pSPORT1 | LP022 |
| | Poorly-differentiated Metastatic lung | | |
| | adenocarcinoma | | |
| HUUA, HUUB, HUUC, HUUD | B-cells (unstimulated) | pTrip1Ex2 | LP022 |
| HWWA, HWWB, HWWC, HWWD, HWWE, | B-cells (stimulated) | pSPORT1 | LP022 |
| HWWF, HWWG | | | |
| HCCC | Colon, Cancer: (9808C064R) | pCMVSport 3.0 | LP023 |
| HPDO HPDP HPDQ HPDR HPD | Ovary, Cancer (9809C332): Poorly | pSport 1 | LP023 |
| | differentiated adenocarcinoma | | |
| HPCO HPCP HPCQ HPCT | Ovary, Cancer (15395A1F): Grade II | pSport 1 | LP023 |
| | Papillary Carcinoma | | |
| HOCM HOCO HOCP HOCQ | Ovary, Cancer: (15799A1F) Poorly | pSport 1 | LP023 |
| | differentiated carcinoma | | |
| HCBM HCBN HCBO | Breast, Cancer: (4004943 A5) | pSport 1 | LP023 |
| HNBT HNBU HNBV | Breast, Normal: (4005522B2) | pSport 1 | LP023 |
| HBCP HBCQ | Breast, Cancer: (4005522 A2) | pSport 1 | LP023 |
| HBCJ | Breast, Cancer: (9806C012R) | pSport 1 | LP023 |
| HSAM HSAN | Stromal cells 3.88 | pSport 1 | LP023 |
| HVCA HVCB HVCC HVCD | Ovary, Cancer: (4004332 A2) | pSport 1 | LP023 |
| HSCK HSEN HSEO | Stromal cells (HBM3.18) | pSport 1 | LP023 |
| HSCP HSCQ | stromal cell clone 2.5 | pSport 1 | LP023 |
| HUXA | Breast Cancer: (4005385 A2) | pSport 1 | LP023 |
| HCOM HCON HCOO HCOP HCOQ | Ovary, Cancer (4004650 A3): Well- | pSport 1 | LP023 |
| | Differentiated Micropapillary Serous | | |
| | Carcinoma | | |
| HBNM | Breast, Cancer: (9802C020E) | pSport 1 | LP023 |
| HVVA HVVB HVVC HVVD HVVE | Human Bone Marrow, treated | pSport 1 | LP023 |

[0936] Two nonlimiting examples are provided below for isolating a particular clone from the deposited sample of plasmid cDNAs cited for that clone in Table 7. First, a plasmid is directly isolated by screening the clones using a polynucleotide probe corresponding to the nucleotide sequence of SEQ ID NO:X.

[0937] Particularly, a specific polynucleotide with 30-40 nucleotides is synthesized using an Applied Biosystems DNA synthesizer according to the sequence reported. The oligonucleotide is labeled, for instance, with ³²P-γ-ATP using T4 polynucleotide kinase and purified according to routine methods. (E.g., Maniatis et al., Molecular Cloning: A Laboratory Manual, Cold Spring Harbor Press, Cold Spring, N.Y. (1982)). The plasmid mixture is transformed into a suitable host, as indicated above (such as XL-1 Blue (Stratagene)) using techniques known to those of skill in the art, such as those provided by the vector supplier or in related publications or patents cited above. The transformants are plated on 1.5% agar plates (containing the appropriate selection agent, e.g., ampicillin) to a density of about 150 transformants (colonies) per plate. These plates are screened using Nylon membranes according to routine methods for bacterial colony screening (e.g., Sambrook et al., Molecular Cloning: A Laboratory Manual, 2nd Edit., (1989), Cold Spring Harbor Laboratory Press, pages 1.93 to 1.104), or other techniques known to those of skill in the art.

[0938] Alternatively, two primers of 17-20 nucleotides derived from both ends of the nucleotide sequence of SEQ ID NO:X are synthesized and used to amplify the desired cDNA using the deposited cDNA plasmid as a template. The polymerase chain reaction is carried out under routine conditions, for instance, in 25 μl of reaction mixture with 0.5 ug of the above cDNA template. A convenient reaction mixture is 1.5-5 mM MgCl₂, 0.01% (w/v) gelatin, 20 μM each of dATP, dCTP, dGTP, dTTP, 25 pmol of each primer and 0.25 Unit of Taq polymerase. Thirty five cycles of PCR (denaturation at 94° C. for 1 min; annealing at 55° C. for 1 min; elongation at 72° C. for 1 min) are performed with a Perkin-Elmer Cetus automated thermal cycler. The amplified product is analyzed by agarose gel electrophoresis and the DNA band with expected molecular weight is excised and purified. The PCR product is verified to be the selected sequence by subcloning and sequencing the DNA product.

[0939] Several methods are available for the identification of the 5′ or 3′ non-coding portions of a gene which may not be present in the deposited clone. These methods include but are not limited to, filter probing, clone enrichment using specific probes, and protocols similar or identical to 5′ and 3′ “RACE” protocols which are well known in the art. For instance, a method similar to 5′ RACE is available for generating the missing 5′ end of a desired full-length transcript. (Fromont-Racine et al., Nucleic Acids Res. 21(7):1683-1684 (1993)).

[0940] Briefly, a specific RNA oligonucleotide is ligated to the 5′ ends of a population of RNA presumably containing full-length gene RNA transcripts. A primer set containing a primer specific to the ligated RNA oligonucleotide and a primer specific to a known sequence of the gene of interest is used to PCR amplify the 5′ portion of the desired full-length gene. This amplified product may then be sequenced and used to generate the full length gene.

[0941] This above method starts with total RNA isolated from the desired source, although poly-A+ RNA can be used. The RNA preparation can then be treated with phosphatase if necessary to eliminate 5′ phosphate groups on degraded or damaged RNA which may interfere with the later RNA ligase step. The phosphatase should then be inactivated and the RNA treated with tobacco acid pyrophosphatase in order to remove the cap structure present at the 5′ ends of messenger RNAs. This reaction leaves a 5′ phosphate group at the 5′ end of the cap cleaved RNA which can then be ligated to an RNA oligonucleotide using T4 RNA ligase.

[0942] This modified RNA preparation is used as a template for first strand cDNA synthesis using a gene specific oligonucleotide. The first strand synthesis reaction is used as a template for PCR amplification of the desired 5′ end using a primer specific to the ligated RNA oligonucleotide and a primer specific to the known sequence of the gene of interest. The resultant product is then sequenced and analyzed to confirm that the 5′ end sequence belongs to the desired gene.

### Example 2

### Isolation of Genomic Clones Corresponding to a Polynucleotide

[0943] A human genomic P1 library (Genomic Systems, Inc.) is screened by PCR using primers selected for the sequence corresponding to SEQ ID NO:X according to the method described in Example 1. (See also, Sambrook.)

### Example 3

### Tissue Specific Expression Analysis

[0944] The Human Genome Sciences, Inc. (HGS) database is derived from sequencing tissue and/or disease specific cDNA libraries. Libraries generated from a particular tissue are selected and the specific tissue expression pattern of EST groups or assembled contigs within these libraries is determined by comparison of the expression patterns of those groups or contigs within the entire database. ESTs and assembled contigs which show tissue specific expression are selected.

[0945] The original clone from which the specific EST sequence was generated, or in the case of an assembled contig, the clone from which the 5′ most EST sequence was generated, is obtained from the catalogued library of clones and the insert amplified by PCR using methods known in the art. The PCR product is denatured and then transferred in 96 or 384 well format to a nylon membrane (Schleicher and Scheull) generating an array filter of tissue specific clones. Housekeeping genes, maize genes, and known tissue specific genes are included on the filters. These targets can be used in signal normalization and to validate assay sensitivity. Additional targets are included to monitor probe length and specificity of hybridization.

[0946] Radioactively labeled hybridization probes are generated by first strand cDNA synthesis per the manufacturer's instructions (Life Technologies) from mRNA/RNA samples prepared from the specific tissue being analyzed (e.g., prostate, prostate cancer, ovarian, ovarian cancer, etc.). The hybridization probes are purified by gel exclusion chromatography, quantitated, and hybridized with the array filters in hybridization bottles at 65° C. overnight. The filters are washed under stringent conditions and signals are captured using a Fuji phosphorimager.

[0947] Data is extracted using AIS software and following background subtraction, signal normalization is performed. This includes a normalization of filter-wide expression levels between different experimental runs. Genes that are differentially expressed in the tissue of interest are identified.

### Example 4

### Chromosomal Mapping of the Polynucleotides

[0948] An oligonucleotide primer set is designed according to the sequence at the 5′ end of SEQ ID NO:X. This primer preferably spans about 100 nucleotides. This primer set is then used in a polymerase chain reaction under the following set of conditions: 30 seconds, 95° C.; 1 minute, 56° C.; 1 minute, 70° C. This cycle is repeated 32 times followed by one 5 minute cycle at 70° C. Human, mouse, and hamster DNA is used as template in addition to a somatic cell hybrid panel containing individual chromosomes or chromosome fragments (Bios, Inc). The reactions are analyzed on either 8% polyacrylamide gels or 3.5% agarose gels. Chromosome mapping is determined by the presence of an approximately 100 bp PCR fragment in the particular somatic cell hybrid.

### Example 5

### Bacterial Expression of a Polypeptide

[0949] A polynucleotide encoding a polypeptide of the present invention is amplified using PCR oligonucleotide primers corresponding to the 5′ and 3′ ends of the DNA sequence, as outlined in Example 1, to synthesize insertion fragments. The primers used to amplify the cDNA insert should preferably contain restriction sites, such as BamHI and XbaI, at the 5′ end of the primers in order to clone the amplified product into the expression vector. For example, BamHI and XbaI correspond to the restriction enzyme sites on the bacterial expression vector pQE-9. (Qiagen, Inc., Chatsworth, Calif.). This plasmid vector encodes antibiotic resistance (Amp^{r}), a bacterial origin of replication (ori), an IPTG-regulatable promoter/operator (P/O), a ribosome binding site (RBS), a 6-histidine tag (6-His), and restriction enzyme cloning sites.

[0950] The pQE-9 vector is digested with BamHI and XbaI and the amplified fragment is ligated into the pQE-9 vector maintaining the reading frame initiated at the bacterial RBS. The ligation mixture is then used to transform the E. coli strain M15/rep4 (Qiagen, Inc.) which contains multiple copies of the plasmid pREP4, which expresses the lacI repressor and also confers kanamycin resistance (Kan^{r}). Transformants are identified by their ability to grow on LB plates and ampicillin/kanamycin resistant colonies are selected. Plasmid DNA is isolated and confirmed by restriction analysis.

[0951] Clones containing the desired constructs are grown overnight (O/N) in liquid culture in LB media supplemented with both Amp (100 ug/ml) and Kan (25 ug/ml). The O/N culture is used to inoculate a large culture at a ratio of 1:100 to 1:250. The cells are grown to an optical density 600 (O.D.⁶⁰⁰) of between 0.4 and 0.6. IPTG (Isopropyl-B-D-thiogalacto pyranoside) is then added to a final concentration of 1 mM. IPTG induces by inactivating the lacI repressor, clearing the P/O leading to increased gene expression.

[0952] Cells are grown for an extra 3 to 4 hours. Cells are then harvested by centrifugation (20 mins at 6000×g). The cell pellet is solubilized in the chaotropic agent 6 Molar Guanidine HCl by stirring for 3-4 hours at 4° C. The cell debris is removed by centrifugation, and the supernatant containing the polypeptide is loaded onto a nickel-nitrilo-tri-acetic acid (“Ni-NTA”) affinity resin column (available from QIAGEN, Inc., supra). Proteins with a 6×His tag bind to the Ni-NTA resin with high affinity and can be purified in a simple one-step procedure (for details see: The QIAexpressionist (1995) QIAGEN, Inc., supra).

[0953] Briefly, the supernatant is loaded onto the column in 6 M guanidine-HCl, pH 8. The column is first washed with 10 volumes of 6 M guanidine-HCl, pH 8, then washed with 10 volumes of 6 M guanidine-HCl pH 6, and finally the polypeptide is eluted with 6 M guanidine-HCl, pH 5.

[0954] The purified protein is then renatured by dialyzing it against phosphate-buffered saline (PBS) or 50 mM Na-acetate, pH 6 buffer plus 200 mM NaCl. Alternatively, the protein can be successfully refolded while immobilized on the Ni-NTA column. The recommended conditions are as follows: renature using a linear 6M-1M urea gradient in 500 mM NaCl, 20% glycerol, 20 mM Tris/HCl pH 7.4, containing protease inhibitors. The renaturation should be performed over a period of 1.5 hours or more. After renaturation the proteins are eluted by the addition of 250 mM immidazole. Immidazole is removed by a final dialyzing step against PBS or 50 mM sodium acetate pH 6 buffer plus 200 mM NaCl. The purified protein is stored at 4° C. or frozen at −80° C.

[0955] In addition to the above expression vector, the present invention further includes an expression vector, called pHE4a (ATCC Accession Number 209645, deposited on Feb. 25, 1998) which contains phage operator and promoter elements operatively linked to a polynucleotide of the present invention, called pHE4a. (ATCC Accession Number 209645, deposited on Feb. 25, 1998.) This vector contains: 1) a neomycinphosphotransferase gene as a selection marker, 2) an E. coli origin of replication, 3) a T5 phage promoter sequence, 4) two lac operator sequences, 5) a Shine-Delgarno sequence, and 6) the lactose operon repressor gene (lacIq). The origin of replication (oriC) is derived from pUC19 (LTI, Gaithersburg, Md.). The promoter and operator sequences are made synthetically.

[0956] DNA can be inserted into the pHE4a by restricting the vector with NdeI and XbaI, BamHI, XhoI, or Asp718, running the restricted product on a gel, and isolating the larger fragment (the stuffer fragment should be about 310 base pairs). The DNA insert is generated according to the PCR protocol described in Example 1, using PCR primers having restriction sites for NdeI (5′ primer) and XbaI, BamHI, XhoI, or Asp718 (3′ primer). The PCR insert is gel purified and restricted with compatible enzymes. The insert and vector are ligated according to standard protocols.

[0957] The engineered vector could easily be substituted in the above protocol to express protein in a bacterial system.

### Example 6

### Purification of a Polypeptide from an Inclusion Body

[0958] The following alternative method can be used to purify a polypeptide expressed in E coli when it is present in the form of inclusion bodies. Unless otherwise specified, all of the following steps are conducted at 4-10° C.

[0959] Upon completion of the production phase of the E. coli fermentation, the cell culture is cooled to 4-10° C. and the cells harvested by continuous centrifugation at 15,000 rpm (Heraeus Sepatech). On the basis of the expected yield of protein per unit weight of cell paste and the amount of purified protein required, an appropriate amount of cell paste, by weight, is suspended in a buffer solution containing 100 mM Tris, 50 mM EDTA, pH 7.4. The cells are dispersed to a homogeneous suspension using a high shear mixer.

[0960] The cells are then lysed by passing the solution through a microfluidizer (Microfuidics, Corp. or APV Gaulin, Inc.) twice at 4000-6000 psi. The homogenate is then mixed with NaCl solution to a final concentration of 0.5 M NaCl, followed by centrifugation at 7000×g for 15 min. The resultant pellet is washed again using 0.5M NaCl, 100 mM Tris, 50 mM EDTA, pH 7.4.

[0961] The resulting washed inclusion bodies are solubilized with 1.5 M guanidine hydrochloride (GuHCl) for 2-4 hours. After 7000×g centrifugation for 15 min., the pellet is discarded and the polypeptide containing supernatant is incubated at 4° C. overnight to allow further GuHCl extraction.

[0962] Following high speed centrifugation (30,000×g) to remove insoluble particles, the GuHCl solubilized protein is refolded by quickly mixing the GuHCl extract with 20 volumes of buffer containing 50 mM sodium, pH 4.5, 150 mM NaCl, 2 mM EDTA by vigorous stirring. The refolded diluted protein solution is kept at 4° C. without mixing for 12 hours prior to further purification steps.

[0963] To clarify the refolded polypeptide solution, a previously prepared tangential filtration unit equipped with 0.16 μm membrane filter with appropriate surface area (e.g., Filtron), equilibrated with 40 mM sodium acetate, pH 6.0 is employed. The filtered sample is loaded onto a cation exchange resin (e.g., Poros HS-50, Perseptive Biosystems). The column is washed with 40 mM sodium acetate, pH 6.0 and eluted with 250 mM, 500 mM, 1000 mM, and 1500 mM NaCl in the same buffer, in a stepwise manner. The absorbance at 280 nm of the effluent is continuously monitored. Fractions are collected and further analyzed by SDS-PAGE.

[0964] Fractions containing the polypeptide are then pooled and mixed with 4 volumes of water. The diluted sample is then loaded onto a previously prepared set of tandem columns of strong anion (Poros HQ-50, Perseptive Biosystems) and weak anion (Poros CM-20, Perseptive Biosystems) exchange resins. The columns are equilibrated with 40 mM sodium acetate, pH 6.0. Both columns are washed with 40 mM sodium acetate, pH 6.0, 200 mM NaCl. The CM-20 column is then eluted using a 10 column volume linear gradient ranging from 0.2 M NaCl, 50 mM sodium acetate, pH 6.0 to 1.0 M NaCl, 50 mM sodium acetate, pH 6.5. Fractions are collected under constant A₂₈₀ monitoring of the effluent. Fractions containing the polypeptide (determined, for instance, by 16% SDS-PAGE) are then pooled.

[0965] The resultant polypeptide should exhibit greater than 95% purity after the above refolding and purification steps. No major contaminant bands should be observed from Commassie blue stained 16% SDS-PAGE gel when 5 μg of purified protein is loaded. The purified protein can also be tested for endotoxin/LPS contamination, and typically the LPS content is less than 0.1 ng/ml according to LAL assays.

### Example 7

### Cloning and Expression of a Polypeptide in a Baculovirus Expression System

[0966] In this example, the plasmid shuttle vector pA2 is used to insert a polynucleotide into a baculovirus to express a polypeptide. This expression vector contains the strong polyhedrin promoter of the Autographa californica nuclear polyhedrosis virus (AcMNPV) followed by convenient restriction sites such as BamHI, Xba I and Asp718. The polyadenylation site of the simian virus 40 (“SV40”) is used for efficient polyadenylation. For easy selection of recombinant virus, the plasmid contains the beta-galactosidase gene from E. coli under control of a weak Drosophila promoter in the same orientation, followed by the polyadenylation signal of the polyhedrin gene. The inserted genes are flanked on both sides by viral sequences for cell-mediated homologous recombination with wild-type viral DNA to generate a viable virus that express the cloned polynucleotide.

[0967] Many other baculovirus vectors can be used in place of the vector above, such as pAc373, pVL941, and pAcIM1, as one skilled in the art would readily appreciate, as long as the construct provides appropriately located signals for transcription, translation, secretion and the like, including a signal peptide and an in-frame AUG as required. Such vectors are described, for instance, in Luckow et al., Virology 170:31-39 (1989).

[0968] Specifically, the cDNA sequence contained in the deposited clone, including the AUG initiation codon, is amplified using the PCR protocol described in Example 1. If a naturally occurring signal sequence is used to produce the polypeptide of the present invention, the pA2 vector does not need a second signal peptide. Alternatively, the vector can be modified (pA2 GP) to include a baculovirus leader sequence, using the standard methods described in Summers et al., “A Manual of Methods for Baculovirus Vectors and Insect Cell Culture Procedures,” Texas Agricultural Experimental Station Bulletin No. 1555 (1987).

[0969] The amplified fragment is isolated from a 1% agarose gel using a commercially available kit (“Geneclean,” BIO 101 Inc., La Jolla, Calif.). The fragment then is digested with appropriate restriction enzymes and again purified on a 1% agarose gel.

[0970] The plasmid is digested with the corresponding restriction enzymes and optionally, can be dephosphorylated using calf intestinal phosphatase, using routine procedures known in the art. The DNA is then isolated from a 1% agarose gel using a commercially available kit (“Geneclean” BIO 101 Inc., La Jolla, Calif.).

[0971] The fragment and the dephosphorylated plasmid are ligated together with T4 DNA ligase. E. coli HB101 or other suitable E. coli hosts such as XL-1 Blue (Stratagene Cloning Systems, La Jolla, Calif.) cells are transformed with the ligation mixture and spread on culture plates. Bacteria containing the plasmid are identified by digesting DNA from individual colonies and analyzing the digestion product by gel electrophoresis. The sequence of the cloned fragment is confirmed by DNA sequencing.

[0972] Five μg of a plasmid containing the polynucleotide is co-transfected with 1.0 μg of a commercially available linearized baculovirus DNA (“BaculoGold™ baculovirus DNA, Pharmingen, San Diego, Calif.), using the lipofection method described by Felgner et al., Proc. Natl. Acad. Sci. USA 84:7413-7417 (1987). One μg of BaculoGold™ virus DNA and 5 μg of the plasmid are mixed in a sterile well of a microtiter plate containing 50 μl of serum-free Grace's medium (Life Technologies Inc., Gaithersburg, Md.). Afterwards, 10 μl Lipofectin plus 90 μl Grace's medium are added, mixed and incubated for 15 minutes at room temperature. Then the transfection mixture is added drop-wise to Sf9 insect cells (ATCC CRL 1711) seeded in a 35 mm tissue culture plate with 1 ml Grace's medium without serum. The plate is then incubated for 5 hours at 27° C. The transfection solution is then removed from the plate and 1 ml of Grace's insect medium supplemented with 10% fetal calf serum is added. Cultivation is then continued at 27° C. for four days.

[0973] After four days the supernatant is collected and a plaque assay is performed, as described by Summers and Smith, supra. An agarose gel with “Blue Gal” (Life Technologies Inc., Gaithersburg) is used to allow easy identification and isolation of gal-expressing clones, which produce blue-stained plaques. (A detailed description of a “plaque assay” of this type can also be found in the user's guide for insect cell culture and baculovirology distributed by Life Technologies Inc., Gaithersburg, page 9-10.) After appropriate incubation, blue stained plaques are picked with the tip of a micropipettor (e.g., Eppendorf). The agar containing the recombinant viruses is then resuspended in a microcentrifuge tube containing 200 μl of Grace's medium and the suspension containing the recombinant baculovirus is used to infect Sf9 cells seeded in 35 mm dishes. Four days later the supernatants of these culture dishes are harvested and then they are stored at 4° C.

[0974] To verify the expression of the polypeptide, Sf9 cells are grown in Grace's medium supplemented with 10% heat-inactivated FBS. The cells are infected with the recombinant baculovirus containing the polynucleotide at a multiplicity of infection (“MOI”) of about 2. If radiolabeled proteins are desired, 6 hours later the medium is removed and is replaced with SF900 II medium minus methionine and cysteine (available from Life Technologies Inc., Rockville, Md.). After 42 hours, 5 μCi of ³⁵S-methionine and 5 μCi ³⁵S-cysteine (available from Amersham) are added. The cells are further incubated for 16 hours and then are harvested by centrifugation. The proteins in the supernatant as well as the intracellular proteins are analyzed by SDS-PAGE followed by autoradiography (if radiolabeled).

[0975] Microsequencing of the amino acid sequence of the amino terminus of purified protein may be used to determine the amino terminal sequence of the produced protein.

### Example 8

### Expression of a Polypeptide in Mammalian Cells

[0976] The polypeptide of the present invention can be expressed in a mammalian cell. A typical mammalian expression vector contains a promoter element, which mediates the initiation of transcription of mRNA, a protein coding sequence, and signals required for the termination of transcription and polyadenylation of the transcript. Additional elements include enhancers, Kozak sequences and intervening sequences flanked by donor and acceptor sites for RNA splicing. Highly efficient transcription is achieved with the early and late promoters from SV40, the long terminal repeats (LTRs) from Retroviruses, e.g., RSV, HTLVI, HIVI and the early promoter of the cytomegalovirus (CMV). However, cellular elements can also be used (e.g., the human actin promoter).

[0977] Suitable expression vectors for use in practicing the present invention include, for example, vectors such as pSVL and pMSG (Pharmacia, Uppsala, Sweden), pRSVcat (ATCC 37152), pSV2dhfr (ATCC 37146), pBC12MI (ATCC 67109), pCMVSport 2.0, and pCMVSport 3.0. Mammalian host cells that could be used include, human Hela, 293, H9 and Jurkat cells, mouse NIH3T3 and C127 cells, Cos 1, Cos 7 and CV1, quail QC₁₋₃ cells, mouse L cells and Chinese hamster ovary (CHO) cells.

[0978] Alternatively, the polypeptide can be expressed in stable cell lines containing the polynucleotide integrated into a chromosome. The co-transfection with a selectable marker such as DHFR, gpt, neomycin, or hygromycin allows the identification and isolation of the transfected cells.

[0979] The transfected gene can also be amplified to express large amounts of the encoded protein. The DHFR (dihydrofolate reductase) marker is useful in developing cell lines that carry several hundred or even several thousand copies of the gene of interest. (See, e.g., Alt, F. W., et al., J. Biol. Chem. 253:1357-1370 (1978); Hamlin, J. L. and Ma, C., Biochem. et Biophys. Acta, 1097:107-143 (1990); Page, M. J. and Sydenham, M. A., Biotechnology 9:64-68 (1991)). Another useful selection marker is the enzyme glutamine synthase (GS) (Murphy et al., Biochem J. 227:277-279 (1991); Bebbington et al., Bio/Technology 10:169-175 (1992). Using these markers, the mammalian cells are grown in selective medium and the cells with the highest resistance are selected. These cell lines contain the amplified gene(s) integrated into a chromosome. Chinese hamster ovary (CHO) and NSO cells are often used for the production of proteins.

[0980] Derivatives of the plasmid pSV2-dhfr (ATCC Accession No. 37146), the expression vectors pC4 (ATCC Accession No. 209646) and pC6 (ATCC Accession No. 209647) contain the strong promoter (LTR) of the Rous Sarcoma Virus (Cullen et al., Molecular and Cellular Biology, 438-447 (March, 1985)) plus a fragment of the CMV-enhancer (Boshart et al., Cell 41:521-530 (1985)). Multiple cloning sites, e.g., with the restriction enzyme cleavage sites BamHI, XbaI and Asp718, facilitate the cloning of the gene of interest. The vectors also contain the 3′ intron, the polyadenylation and termination signal of the rat preproinsulin gene, and the mouse DHFR gene under control of the SV40 early promoter.

[0981] Specifically, the plasmid pC6, for example, is digested with appropriate restriction enzymes and then dephosphorylated using calf intestinal phosphates by procedures known in the art. The vector is then isolated from a 1% agarose gel.

[0982] A polynucleotide of the present invention is amplified according to the protocol outlined in Example 1. If a naturally occurring signal sequence is used to produce the polypeptide of the present invention, the vector does not need a second signal peptide. Alternatively, if a naturally occurring signal sequence is not used, the vector can be modified to include a heterologous signal sequence. (See, e.g., International Publication No. WO 96/34891.)

[0983] The amplified fragment is isolated from a 1% agarose gel using a commercially available kit (“Geneclean,” BIO 101 Inc., La Jolla, Calif.). The fragment then is digested with appropriate restriction enzymes and again purified on a 1% agarose gel.

[0984] The amplified fragment is then digested with the same restriction enzyme and purified on a 1% agarose gel. The isolated fragment and the dephosphorylated vector are then ligated with T4 DNA ligase. E. coli HB101 or XL-1 Blue cells are then transformed and bacteria are identified that contain the fragment inserted into plasmid pC6 using, for instance, restriction enzyme analysis.

[0985] Chinese hamster ovary cells lacking an active DHFR gene is used for transfection. Five μg of the expression plasmid pC6 or pC4 is cotransfected with 0.5 μg of the plasmid pSVneo using lipofectin (Felgner et al., supra). The plasmid pSV2-neo contains a dominant selectable marker, the neo gene from Tn5 encoding an enzyme that confers resistance to a group of antibiotics including G418. The cells are seeded in alpha minus MEM supplemented with 1 mg/ml G418. After 2 days, the cells are trypsinized and seeded in hybridoma cloning plates (Greiner, Germany) in alpha minus MEM supplemented with 10, 25, or 50 ng/ml of methotrexate plus 1 mg/ml G418. After about 10-14 days single clones are trypsinized and then seeded in 6-well petri dishes or 10 ml flasks using different concentrations of methotrexate (50 nM, 100 nM, 200 nM, 400 nM, 800 nM). Clones growing at the highest concentrations of methotrexate are then transferred to new 6-well plates containing even higher concentrations of methotrexate (1 μM, 2 μM, 5 μM, 10 mM, 20 mM). The same procedure is repeated until clones are obtained which grow at a concentration of 100-200 μM. Expression of the desired gene product is analyzed, for instance, by SDS-PAGE and Western blot or by reversed phase HPLC analysis.

### Example 9

### Protein Fusions

[0986] The polypeptides of the present invention are preferably fused to other nroteins. These fusion proteins can be used for a variety of applications. For example, fusion of the present polypeptides to His-tag, HA-tag, protein A, IgG domains, and maltose binding protein facilitates purification. (See Example 5; see also EP A 394,827; Traunecker, et al., Nature 331:84-86 (1988)). Similarly, fusion to IgG-1, IgG-3, and albumin increases the halflife time in vivo. Nuclear localization signals fused to the polypeptides of the present invention can target the protein to a specific subcellular localization, while covalent heterodimer or homodimers can increase or decrease the activity of a fusion protein. Fusion proteins can also create chimeric molecules having more than one function. Finally, fusion proteins can increase solubility and/or stability of the fused protein compared to the non-fused protein. All of the types of fusion proteins described above can be made by modifying the following protocol, which outlines the fusion of a polypeptide to an IgG molecule, or the protocol described in Example 5.

[0987] Briefly, the human Fc portion of the IgG molecule can be PCR amplified, using primers that span the 5′ and 3′ ends of the sequence described below. These primers also should have convenient restriction enzyme sites that will facilitate cloning into an expression vector, preferably a mammalian expression vector.

[0988] For example, if pC4 (ATCC Accession No. 209646) is used, the human Fc portion can be ligated into the BamHI cloning site. Note that the 3′ BamHI site should be destroyed. Next, the vector containing the human Fc portion is re-restricted with BamHI, linearizing the vector, and a polynucleotide of the present invention, isolated by the PCR protocol described in Example 1, is ligated into this BamHI site. Note that the polynucleotide is cloned without a stop codon, otherwise a fusion protein will not be produced.

[0989] If the naturally occurring signal sequence is used to produce the polypeptide of the present invention, pC4 does not need a second signal peptide. Alternatively, if the naturally occurring signal sequence is not used, the vector can be modified to include a heterologous signal sequence. (See, e.g., International Publication No. WO 96/34891.)

| | |
|---|---|
| Human IgG Fc region: | (SEQ ID NO: 1) |

GGGATCCGGAGCCCAAATCTTCTGACAAAACTCACACATGCCCACCGTGC
CCAGCACCTGAATTCGAGGGTGCACCGTCAGTCTTCCTCTTCCCCCCAAA
ACCCAAGGACACCCTCATGATCTCCCGGACTCCTGAGGTCACATGCGTGG
TGGTGGACGTAAGCCACGAAGACCCTGAGGTCAAGTTCAACTGGTACGTG
GACGGCGTGGAGGTGCATAATGCCAAGACAAAGCCGCGGGAGGAGCAGTA
CAACAGCACGTACCGTGTGGTCAGCGTCCTCACCGTCCTGCACCAGGACT
GGCTGAATGGCAAGGAGTACAAGTGCAAGGTCTCCAACAAAGCCCTCCCA
ACCCCCATCGAGAAAACCATCTCCAAAGCCAAAGGGCAGCCCCGAGAACC
ACAGGTGTACACCCTGCCCCCATCCCGGGATGAGCTGACCAAGAACCAGG
TCAGCCTGACCTGCCTGGTCAAAGGCTTCTATCCAAGCGACATCGCCGTG
GAGTGGGAGAGCAATGGGCAGCCGGAGAACAACTACAAGACCACGCCTCC
CGTGCTGGACTCCGACGGCTCCTTCTTCCTCTACAGCAAGCTCACCGTGG
ACAAGAGCAGGTGGCAGCAGGGGAACGTCTTCTCATGCTCCGTGATGCAT
GAGGCTCTGCACAACCACTACACGCAGAAGAGCCTCTCCCTGTCTCCGGG
TAAATGAGTGCGACGGCCGCGACTCTAGAGGAT

### Example 10

### Production of an Antibody from a Polypeptide

a) Hybridoma Technology

[0990] The antibodies of the present invention can be prepared by a variety of methods. (See, Current Protocols, Chapter 2.) As one example of such methods, cells expressing a polypeptide of the present invention are administered to an animal to induce the production of sera containing polyclonal antibodies. In a preferred method, a preparation of a polypeptide of the present invention is prepared and purified to render it substantially free of natural contaminants. Such a preparation is then introduced into an animal in order to produce polyclonal antisera of greater specific activity.

[0991] Monoclonal antibodies specific for a polypeptide of the present invention are prepared using hybridoma technology (Kohler et al., Nature 256:495 (1975); Kohler et al., Eur. J. Immunol. 6:511 (1976); Kohler et al., Eur. J. Immunol. 6:292 (1976); Hammerling et al., in: Monoclonal Antibodies and T-Cell Hybridomas, Elsevier, N.Y., pp. 563-681 (1981)). In general, an animal (preferably a mouse) is immunized with a polypeptide of the present invention or, more preferably, with a secreted polypeptide-expressing cell. Such polypeptide-expressing cells are cultured in any suitable tissue culture medium, preferably in Earle's modified Eagle's medium supplemented with 10% fetal bovine serum (inactivated at about 56° C.), and supplemented with about 10 g/l of nonessential amino acids, about 1,000 U/ml of penicillin, and about 100 μg/ml of streptomycin.

[0992] The splenocytes of such mice are extracted and fused with a suitable myeloma cell line. Any suitable myeloma cell line may be employed in accordance with the present invention; however, it is preferable to employ the parent myeloma cell line (SP20), available from the ATCC. After fusion, the resulting hybridoma cells are selectively maintained in HAT medium, and then cloned by limiting dilution as described by Wands et al. (Gastroenterology 80:225-232 (1981)). The hybridoma cells obtained through such a selection are then assayed to identify clones which secrete antibodies capable of binding the polypeptide of the present invention.

[0993] Alternatively, additional antibodies capable of binding to a polypeptide of the present invention can be produced in a two-step procedure using anti-idiotypic antibodies. Such a method makes use of the fact that antibodies are themselves antigens, and therefore, it is possible to obtain an antibody which binds to a second antibody. In accordance with this method, protein specific antibodies are used to immunize an animal, preferably a mouse. The splenocytes of such an animal are then used to produce hybridoma cells, and the hybridoma cells are screened to identify clones which produce an antibody whose ability to bind to the polypeptide-specific antibody can be blocked by said polypeptide. Such antibodies comprise anti-idiotypic antibodies to the polypeptide-specific antibody and are used to immunize an animal to induce formation of further polypeptide-specific antibodies.

[0994] For in vivo use of antibodies in humans, an antibody is “humanized”. Such antibodies can be produced using genetic constructs derived from hybridoma cells producing the monoclonal antibodies described above. Methods for producing chimeric and humanized antibodies are known in the art and are discussed herein. (See, for review, Morrison, Science 229:1202 (1985); Oi et al., BioTechniques 4:214 (1986); Cabilly et al., U.S. Pat. No. 4,816,567; Taniguchi et al., EP 171496; Morrison et al., EP 173494; Neuberger et al., WO 8601533; Robinson et al., International Publication No. WO 8702671; Boulianne et al., Nature 312:643 (1984); Neuberger et al., Nature 314:268 (1985)).

B) Isolation of Antibody Fragments Directed Against a Polypeptide of the Present Invention from a Library of ScFvs

[0995] Naturally occurring V-genes isolated from human PBLs are constructed into a library of antibody fragments which contain reactivities against a polypeptide of the present invention to which the donor may or may not have been exposed (see e.g., U.S. Pat. No. 5,885,793 incorporated herein by reference in its entirety).

[0996] Rescue of the Library. A library of scFvs is constructed from the RNA of human PBLs as described in International Publication No. WO 92/01047. To rescue phage displaying antibody fragments, approximately 10⁹ E. coli harboring the phagemid are used to inoculate 50 ml of 2×TY containing 1% glucose and 100 μg/ml of ampicillin (2×TY-AMP-GLU) and grown to an O.D. of 0.8 with shaking. Five ml of this culture is used to inoculate 50 ml of 2×TY-AMP-GLU, 2×108 TU of delta gene 3 helper (M13 delta gene III, see International Publication No. WO 92/01047) are added and the culture incubated at 37° C. for 45 minutes without shaking and then at 37° C. for 45 minutes with shaking. The culture is centrifuged at 4000 r.p.m. for 10 min. and the pellet resuspended in 2 liters of 2×TY containing 100 μg/ml ampicillin and 50 ug/ml kanamycin and grown overnight. Phage are prepared as described in International Publication No. WO 92/01047.

[0997] M13 delta gene III is prepared as follows: M13 delta gene III helper phage does not encode gene III protein, hence the phage(mid) displaying antibody fragments have a greater avidity of binding to antigen. Infectious M13 delta gene III particles are made by growing the helper phage in cells harboring a pUC19 derivative supplying the wild type gene III protein during phage morphogenesis. The culture is incubated for 1 hour at 37° C. without shaking and then for a further hour at 37° C. with shaking. Cells are spun down (IEC-Centra 8,400 r.p.m. for 10 min), resuspended in 300 ml 2×TY broth containing 100 μg ampicillin/ml and 25 μg kanamycin/ml (2×TY-AMP-KAN) and grown overnight, shaking at 37° C. Phage particles are purified and concentrated from the culture medium by two PEG-precipitations (Sambrook et al., 1990), resuspended in 2 ml PBS and passed through a 0.45 μm filter (Minisart NML; Sartorius) to give a final concentration of approximately 10¹³ transducing units/ml (ampicillin-resistant clones).

[0998] Panning of the Library. Immunotubes (Nunc) are coated overnight in PBS with 4 ml of either 100 μg/ml or 10 μg/ml of a polypeptide of the present invention. Tubes are blocked with 2% Marvel-PBS for 2 hours at 37° C. and then washed 3 times in PBS. Approximately 10¹³ TU of phage is applied to the tube and incubated for 30 minutes at room temperature tumbling on an over and under turntable and then left to stand for another 1.5 hours. Tubes are washed 10 times with PBS 0.1% Tween-20 and 10 times with PBS. Phage are eluted by adding 1 ml of 100 mM triethylamine and rotating 15 minutes on an under and over turntable after which the solution is immediately neutralized with 0.5 ml of 1.0M Tris-HCl, pH 7.4. Phage are then used to infect 10 ml of mid-log E. coli TG1 by incubating eluted phage with bacteria for 30 minutes at 37° C. The E. coli are then plated on TYE plates containing 1% glucose and 100 μg/ml ampicillin. The resulting bacterial library is then rescued with delta gene 3 helper phage as described above to prepare phage for a subsequent round of selection. This process is then repeated for a total of 4 rounds of affinity purification with tube-washing increased to 20 times with PBS, 0.1% Tween-20 and 20 times with PBS for rounds 3 and 4.

[0999] Characterization of Binders. Eluted phage from the 3rd and 4th rounds of selection are used to infect E. coli HB 2151 and soluble scFv is produced (Marks, et al., 1991) from single colonies for assay. ELISAs are performed with microtitre plates coated with either 10 pg/ml of the polypeptide of the present invention in 50 mM bicarbonate pH 9.6. Clones positive in ELISA are further characterized by PCR fingerprinting (see, e.g., International Publication No. WO 92/01047) and then by sequencing. These ELISA positive clones may also be further characterized by techniques known in the art, such as, for example, epitope mapping, binding affinity, receptor signal transduction, ability to block or competitively inhibit antibody/antigen binding, and competitive agonistic or antagonistic activity.

### Example 11

### Method of Determining Alterations in a Gene Corresponding to a Polynucleotide

[1000] RNA isolated from entire families or individual patients presenting with a phenotype of interest (such as a disease) is isolated. cDNA is then generated from these RNA samples using protocols known in the art. (See, Sambrook.) The cDNA is then used as a template for PCR, employing primers surrounding regions of interest in SEQ ID NO:X; and/or the nucleotide sequence of the cDNA contained in Clone ID NO:Z. Suggested PCR conditions consist of 35 cycles at 95 degrees C. for 30 seconds; 60-120 seconds at 52-58 degrees C.; and 60-120 seconds at 70 degrees C., using buffer solutions described in Sidransky et al., Science 252:706 (1991).

[1001] PCR products are then sequenced using primers labeled at their 5′ end with T4 polynucleotide kinase, employing SequiTherm Polymerase (Epicentre Technologies). The intron-exon boundaries of selected exons is also determined and genomic PCR products analyzed to confirm the results. PCR products harboring suspected mutations are then cloned and sequenced to validate the results of the direct sequencing.

[1002] PCR products are cloned into T-tailed vectors as described in Holton et al., Nucleic Acids Research, 19:1156 (1991) and sequenced with T7 polymerase (United States Biochemical). Affected individuals are identified by mutations not present in unaffected individuals.

[1003] Genomic rearrangements are also observed as a method of determining alterations in a gene corresponding to a polynucleotide. Genomic clones isolated according to Example 2 are nick-translated with digoxigenindeoxy-uridine 5′-triphosphate (Boehringer Manheim), and FISH performed as described in Johnson et al., Methods Cell Biol. 35:73-99 (1991). Hybridization with the labeled probe is carried out using a vast excess of human cot-1 DNA for specific hybridization to the corresponding genomic locus.

[1004] Chromosomes are counterstained with 4,6-diamino-2-phenylidole and propidium iodide, producing a combination of C- and R-bands. Aligned images for precise mapping are obtained using a triple-band filter set (Chroma Technology, Brattleboro, Vt.) in combination with a cooled charge-coupled device camera (Photometrics, Tucson, Ariz.) and variable excitation wavelength filters. (Johnson et al., Genet. Anal. Tech. Appl., 8:75 (1991)). Image collection, analysis and chromosomal fractional length measurements are performed using the ISee Graphical Program System. (Inovision Corporation, Durham, N.C.) Chromosome alterations of the genomic region hybridized by the probe are identified as insertions, deletions, and translocations. These alterations are used as a diagnostic marker for an associated disease.

### Example 12

### Method of Detecting Abnormal Levels of a Polypeptide in a Biological Sample

[1005] A polypeptide of the present invention can be detected in a biological sample, and if an increased or decreased level of the polypeptide is detected, this polypeptide is a marker for a particular phenotype. Methods of detection are numerous, and thus, it is understood that one skilled in the art can modify the following assay to fit their particular needs.

[1006] For example, antibody-sandwich ELISAs are used to detect polypeptides in a sample, preferably a biological sample. Wells of a microtiter plate are coated with specific antibodies, at a final concentration of 0.2 to 10 ug/ml. The antibodies are either monoclonal or polyclonal and are produced by the method described in Example 10. The wells are blocked so that non-specific binding of the polypeptide to the well is reduced.

[1007] The coated wells are then incubated for >2 hours at RT with a sample containing the polypeptide. Preferably, serial dilutions of the sample should be used to validate results. The plates are then washed three times with deionized or distilled water to remove unbound polypeptide.

[1008] Next, 50 ul of specific antibody-alkaline phosphatase conjugate, at a concentration of 25-400 ng, is added and incubated for 2 hours at room temperature. The plates are again washed three times with deionized or distilled water to remove unbound conjugate.

[1009] Add 75 ul of 4-methylumbelliferyl phosphate (MUP) or p-nitrophenyl phosphate (NPP) substrate solution to each well and incubate 1 hour at room temperature. Measure the reaction by a microtiter plate reader. Prepare a standard curve, using serial dilutions of a control sample, and plot polypeptide concentration on the X-axis (log scale) and fluorescence or absorbance of the Y-axis (linear scale). Interpolate the concentration of the polypeptide in the sample using the standard curve.

### Example 13

### Formulation

[1010] The invention also provides methods of treatment and/or prevention of diseases or disorders (such as, for example, any one or more of the diseases or disorders disclosed herein) by administration to a subject of an effective amount of a Therapeutic. By therapeutic is meant polynucleotides or polypeptides of the invention (including fragments and variants), agonists or antagonists thereof, and/or antibodies thereto, in combination with a pharmaceutically acceptable carrier type (e.g., a sterile carrier).

[1011] The Therapeutic will be formulated and dosed in a fashion consistent with good medical practice, taking into account the clinical condition of the individual patient (especially the side effects of treatment with the Therapeutic alone), the site of delivery, the method of administration, the scheduling of administration, and other factors known to practitioners. The “effective amount” for purposes herein is thus determined by such considerations.

[1012] As a general proposition, the total pharmaceutically effective amount of the Therapeutic administered parenterally per dose will be in the range of about 1 ug/kg/day to 10 mg/kg/day of patient body weight, although, as noted above, this will be subject to therapeutic discretion. More preferably, this dose is at least 0.01 mg/kg/day, and most preferably for humans between about 0.01 and 1 mg/kg/day for the hormone. If given continuously, the Therapeutic is typically administered at a dose rate of about 1 ug/kg/hour to about 50 ug/kg/hour, either by 1-4 injections per day or by continuous subcutaneous infusions, for example, using a mini-pump. An intravenous bag solution may also be employed. The length of treatment needed to observe changes and the interval following treatment for responses to occur appears to vary depending on the desired effect.

[1013] Therapeutics can be are administered orally, rectally, parenterally, intracistemally, intravaginally, intraperitoneally, topically (as by powders, ointments, gels, drops or transdermal patch), bucally, or as an oral or nasal spray. “Pharmaceutically acceptable carrier” refers to a non-toxic solid, semisolid or liquid filler, diluent, encapsulating material or formulation auxiliary of any. The term “parenteral” as used herein refers to modes of administration which include intravenous, intramuscular, intraperitoneal, intrasternal, subcutaneous and intraarticular injection and infusion.

[1014] Therapeutics of the invention are also suitably administered by sustained-release systems. Suitable examples of sustained-release Therapeutics are administered orally, rectally, parenterally, intracistemally, intravaginally, intraperitoneally, topically (as by powders, ointments, gels, drops or transdermal patch), bucally, or as an oral or nasal spray. “Pharmaceutically acceptable carrier” refers to a non-toxic solid, semisolid or liquid filler, diluent, encapsulating material or formulation auxiliary of any type. The term “parenteral” as used herein refers to modes of administration which include intravenous, intramuscular, intraperitoneal, intrasternal, subcutaneous and intraarticular injection and infusion.

[1015] Therapeutics of the invention are also suitably administered by sustained-release systems. Suitable examples of sustained-release Therapeutics include suitable polymeric materials (such as, for example, semi-permeable polymer matrices in the form of shaped articles, e.g., films, or mirocapsules), suitable hydrophobic materials (for example as an emulsion in an acceptable oil) or ion exchange resins, and sparingly soluble derivatives (such as, for example, a sparingly soluble salt).

[1016] Sustained-release matrices include polylactides (U.S. Pat. No. 3,773,919, EP 58,481), copolymers of L-glutamic acid and gamma-ethyl-L-glutamate (Sidman et al., Biopolymers 22:547-556 (1983)), poly(2-hydroxyethyl methacrylate) (Langer et al., J. Biomed. Mater. Res. 15:167-277 (1981), and Langer, Chem. Tech. 12:98-105 (1982)), ethylene vinyl acetate (Langer et al., Id.) or poly-D-(−)-3-hydroxybutyric acid (EP 133,988).

[1017] In a preferred embodiment, polypeptide, polynucleotide, and antibody compositions of the invention are formulated in a biodegradable, polymeric drug delivery system, for example as described in U.S. Pat. Nos. 4,938,763; 5,278,201; 5,278,202; 5,324,519; 5,340,849; and 5,487,897 and in International Publication Numbers WO01/35929, WO00/24374, and WO00/06117 which are hereby incorporated by reference in their entirety. In specific preferred embodiments the polypeptide, polynucleotide, and antibody compositions of the invention are formulated using the ATRIGEL® Biodegradable System of Atrix Laboratories, Inc. (Fort Collins, Colo.).

[1018] Examples of biodegradable polymers which can be used in the formulation of polypeptide, polynucleotide, and antibody compositions, include but are not limited to, polylactides, polyglycolides, polycaprolactones, polyanhydrides, polyamides, polyurethanes, polyesteramides, polyorthoesters, polydioxanones, polyacetals, polyketals, polycarbonates, polyorthocarbonates, polyphosphazenes, polyhydroxybutyrates, polyhydroxyvalerates, polyalkylene oxalates, polyalkylene succinates, poly(malic acid), poly(amino acids), poly(methyl vinyl ether), poly(maleic anhydride), polyvinylpyrrolidone, polyethylene glycol, polyhydroxycellulose, chitin, chitosan, and copolymers, terpolymers, or combinations or mixtures of the above materials. The preferred polymers are those that have a lower degree of crystallization and are more hydrophobic. These polymers and copolymers are more soluble in the biocompatible solvents than the highly crystalline polymers such as polyglycolide and chitin which also have a high degree of hydrogen-bonding. Preferred materials with the desired solubility parameters are the polylactides, polycaprolactones, and copolymers of these with glycolide in which there are more amorphous regions to enhance solubility. In specific preferred embodiments, the biodegradable polymers which can be used in the formulation of polypeptide, polynucleotide, and antibody compositions are poly(lactide-co-glycolides). Polymer properties such as molecular weight, hydrophobicity, and lactide/glycolide ratio may be modified to obtain the desired polypeptide, polynucleotide, or antibody release profile (See, e.g., Ravivarapu et al., Journal of Pharmaceutical Sciences 89:732-741 (2000), which is hereby incorporated by reference in its entirety).

[1019] It is also preferred that the solvent for the biodegradable polymer be non-toxic, water miscible, and otherwise biocompatible. Examples of such solvents include, but are not limited to, N-methyl-2-pyrrolidone, 2-pyrrolidone, C2 to C6 alkanols, C1 to C₁₋₅ alchohols, dils, triols, and tetraols such as ethanol, glycerine propylene glycol, butanol; C3 to C15 alkyl ketones such as acetone, diethyl ketone and methyl ethyl ketone; C3 to C15 esters such as methyl acetate, ethyl acetate, ethyl lactate; alkyl ketones such as methyl ethyl ketone, C1 to C15 amides such as dimethylformamide, dimethylacetamide and caprolactam; C3 to C20 ethers such as tetrahydrofuran, or solketal; tweens, triacetin, propylene carbonate, decylmethylsulfoxide, dimethyl sulfoxide, oleic acid, 1-dodecylazacycloheptan-2-one, Other preferred solvents are benzyl alchohol, benzyl benzoate, dipropylene glycol, tributyrin, ethyl oleate, glycerin, glycofural, isopropyl myristate, isopropyl palmitate, oleic acid, polyethylene glycol, propylene carbonate, and triethyl citrate. The most preferred solvents are N-methyl-2-pyrrolidone, 2-pyrrolidone, dimethyl sulfoxide, triacetin, and propylene carbonate because of the solvating ability and their compatibility.

[1020] Additionally, formulations comprising polypeptide, polynucleotide, and antibody compositions and a biodegradable polymer may also include release-rate modification agents and/or pore-forming agents. Examples of release-rate modification agents include, but are not limited to, fatty acids, triglycerides, other like hydrophobic compounds, organic solvents, plasticizing compounds and hydrophilic compounds. Suitable release rate modification agents include, for example, esters of mono-, di-, and tricarboxylic acids, such as 2-ethoxyethyl acetate, methyl acetate, ethyl acetate, diethyl phthalate, dimethyl phthalate, dibutyl phthalate, dimethyl adipate, dimethyl succinate, dimethyl oxalate, dimethyl citrate, triethyl citrate, acetyl tributyl citrate, acetyl triethyl citrate, glycerol triacetate, di(n-butyl) sebecate, and the like; polyhydroxy alcohols, such as propylene glycol, polyethylene glycol, glycerin, sorbitol, and the like; fatty acids; triesters of glycerol, such as triglycerides, epoxidized soybean oil, and other epoxidized vegetable oils; sterols, such as cholesterol; alcohols, such as C.sub.6-C.sub. 12 alkanols, 2-ethoxyethanol. The release rate modification agent may be used singly or in combination with other such agents. Suitable combinations of release rate modification agents include, but are not limited to, glycerin/propylene glycol, sorbitol/glycerine, ethylene oxide/propylene oxide, butylene glycol/adipic acid, and the like. Preferred release rate modification agents include, but are not limited to, dimethyl citrate, triethyl citrate, ethyl heptanoate, glycerin, and hexanediol. Suitable pore-forming agents that may be used in the polymer composition include, but are not limited to, sugars such as sucrose and dextrose, salts such as sodium chloride and sodium carbonate, polymers such as hydroxylpropylcellulose, carboxymethylcellulose, polyethylene glycol, and polyvinylpyrrolidone. Solid crystals that will provide a defined pore size, such as salt or sugar, are preferred.

[1021] In specific preferred embodiments the polypeptide, polynucleotide, and antibody compositions of the invention are formulated using the BEMA™ BioErodible Mucoadhesive System, MCA™ MucoCutaneous Absorption System, SMP™ Solvent MicroParticle System, or BCP™ BioCompatible Polymer System of Atrix Laboratories, Inc. (Fort Collins, Colo.).

[1022] Sustained-release Therapeutics also include liposomally entrapped Therapeutics of the invention (see generally, Langer, Science 249:1527-1533 (1990); Treat et al., in Liposomes in the Therapy of Infectious Disease and Cancer, Lopez-Berestein and Fidler (eds.), Liss, New York, pp. 317-327 and 353-365 (1989)). Liposomes containing the Therapeutic are prepared by methods known per se: DE 3,218,121; Epstein et al., Proc. Natl. Acad. Sci. (USA) 82:3688-3692 (1985); Hwang et al., Proc. Natl. Acad. Sci. (USA) 77:4030-4034 (1980); EP 52,322; EP 36,676; EP 88,046; EP 143,949; EP 142,641; Japanese Pat. Appl. 83-118008; U.S. Pat. Nos. 4,485,045 and 4,544,545; and EP 102,324. Ordinarily, the liposomes are of the small (about 200-800 Angstroms) unilamellar type in which the lipid content is greater than about 30 mol. percent cholesterol, the selected proportion being adjusted for the optimal Therapeutic.

[1023] In yet an additional embodiment, the Therapeutics of the invention are delivered by way of a pump (see Langer, supra; Sefton, CRC Crit. Ref. Biomed. Eng. 14:201 (1987); Buchwald et al., Surgery 88:507 (1980); Saudek et al., N. Engl. J. Med. 321:574 (1989)).

[1024] Other controlled release systems are discussed in the review by Langer (Science 249:1527-1533 (1990)).

[1025] For parenteral administration, in one embodiment, the Therapeutic is formulated generally by mixing it at the desired degree of purity, in a unit dosage injectable form (solution, suspension, or emulsion), with a pharmaceutically acceptable carrier, i.e., one that is non-toxic to recipients at the dosages and concentrations employed and is compatible with other ingredients of the formulation. For example, the formulation preferably does not include oxidizing agents and other compounds that are known to be deleterious to the Therapeutic.

[1026] Generally, the formulations are prepared by contacting the Therapeutic uniformly and intimately with liquid carriers or finely divided solid carriers or both. Then, if necessary, the product is shaped into the desired formulation. Preferably the carrier is a parenteral carrier, more preferably a solution that is isotonic with the blood of the recipient. Examples of such carrier vehicles include water, saline, Ringer's solution, and dextrose solution. Non-aqueous vehicles such as fixed oils and ethyl oleate are also useful herein, as well as liposomes.

[1027] The carrier suitably contains minor amounts of additives such as substances that enhance isotonicity and chemical stability. Such materials are non-toxic to recipients at the dosages and concentrations employed, and include buffers such as phosphate, citrate, succinate, acetic acid, and other organic acids or their salts; antioxidants such as ascorbic acid; low molecular weight (less than about ten residues) polypeptides, e.g., polyarginine or tripeptides; proteins, such as serum albumin, gelatin, or immunoglobulins; hydrophilic polymers such as polyvinylpyrrolidone; amino acids, such as glycine, glutamic acid, aspartic acid, or arginine; monosaccharides, disaccharides, and other carbohydrates including cellulose or its derivatives, glucose, manose, or dextrins; chelating agents such as EDTA; sugar alcohols such as mannitol or sorbitol; counterions such as sodium; and/or nonionic surfactants such as polysorbates, poloxamers, or PEG.

[1028] The Therapeutic is typically formulated in such vehicles at a concentration of about 0.1 mg/ml to 100 mg/ml, preferably 1-10 mg/ml, at a pH of about 3 to 8. It will be understood that the use of certain of the foregoing excipients, carriers, or stabilizers will result in the formation of polypeptide salts.

[1029] Any pharmaceutical used for therapeutic administration can be sterile. Sterility is readily accomplished by filtration through sterile filtration membranes (e.g., 0.2 micron membranes). Therapeutics generally are placed into a container having a sterile access port, for example, an intravenous solution bag or vial having a stopper pierceable by a hypodermic injection needle.

[1030] Therapeutics ordinarily will be stored in unit or multi-dose containers, for example, sealed ampoules or vials, as an aqueous solution or as a lyophilized formulation for reconstitution. As an example of a lyophilized formulation, 10-ml vials are filled with 5 ml of sterile-filtered 1% (w/v) aqueous Therapeutic solution, and the resulting mixture is lyophilized. The infusion solution is prepared by reconstituting the lyophilized Therapeutic using bacteriostatic Water-for-Injection.

[1031] The invention also provides a pharmaceutical pack or kit comprising one or more containers filled with one or more of the ingredients of the Therapeutics of the invention. Associated with such container(s) can be a notice in the form prescribed by a governmental agency regulating the manufacture, use or sale of pharmaceuticals or biological products, which notice reflects approval by the agency of manufacture, use or sale for human administration. In addition, the Therapeutics may be employed in conjunction with other therapeutic compounds.

[1032] The Therapeutics of the invention may be administered alone or in combination with adjuvants. Adjuvants that may be administered with the Therapeutics of the invention include, but are not limited to, alum, alum plus deoxycholate (ImmunoAg), MTP-PE (Biocine Corp.), QS21 (Genentech, Inc.), BCG (e.g., THERACYS®), MPL and nonviable prepartions of Corynebacterium parvum. In a specific embodiment, Therapeutics of the invention are administered in combination with alum. In another specific embodiment, Therapeutics of the invention are administered in combination with QS-21. Further adjuvants that may be administered with the Therapeutics of the invention include, but are not limited to, Monophosphoryl lipid immunomodulator, AdjuVax 100a, QS-21, QS-18, CRL1005, Aluminum salts, MF-59, and Virosomal adjuvant technology. Vaccines that may be administered with the Therapeutics of the invention include, but are not limited to, vaccines directed toward protection against MMR (measles, mumps, rubella), polio, varicella, tetanus/diptheria, hepatitis A, hepatitis B, haemophilus influenzae B, whooping cough, pneumonia, influenza, Lyme's Disease, rotavirus, cholera, yellow fever, Japanese encephalitis, poliomyelitis, rabies, typhoid fever, and pertussis. Combinations may be administered either concomitantly, e.g., as an admixture, separately but simultaneously or concurrently; or sequentially. This includes presentations in which the combined agents are administered together as a therapeutic mixture, and also procedures in which the combined agents are administered separately but simultaneously, e.g., as through separate intravenous lines into the same individual. Administration “in combination” further includes the separate administration of one of the compounds or agents given first, followed by the second.

[1033] The Therapeutics of the invention may be administered alone or in combination with other therapeutic agents. Therapeutic agents that may be administered in combination with the Therapeutics of the invention, include but not limited to, chemotherapeutic agents, antibiotics, steroidal and non-steroidal anti-inflammatories, conventional immunotherapeutic agents, and/or therapeutic treatments described below. Combinations may be administered either concomitantly, e.g., as an admixture, separately but simultaneously or concurrently; or sequentially. This includes presentations in which the combined agents are administered together as a therapeutic mixture, and also procedures in which the combined agents are administered separately but simultaneously, e.g., as through separate intravenous lines into the same individual. Administration “in combination” further includes the separate administration of one of the compounds or agents given first, followed by the second.

[1034] In one embodiment, the Therapeutics of the invention are administered in combination with an anticoagulant. Anticoagulants that may be administered with the compositions of the invention include, but are not limited to, heparin, low molecular weight heparin, warfarin sodium (e.g., COUMADIN®), dicumarol, 4-hydroxycoumarin, anisindione (e.g., MIRADON™), acenocoumarol (e.g., nicoumalone, SINTHROME™), indan-1,3-dione, phenprocoumon (e.g., MARCUMAR™), ethyl biscoumacetate (e.g., TROMEXAN™), and aspirin. In a specific embodiment, compositions of the invention are administered in combination with heparin and/or warfarin. In another specific embodiment, compositions of the invention are administered in combination with warfarin. In another specific embodiment, compositions of the invention are administered in combination with warfarin and aspirin. In another specific embodiment, compositions of the invention are administered in combination with heparin. In another specific embodiment, compositions of the invention are administered in combination with heparin and aspirin.

[1035] In another embodiment, the Therapeutics of the invention are administered in combination with thrombolytic drugs. Thrombolytic drugs that may be administered with the compositions of the invention include, but are not limited to, plasminogen, lys-plasminogen, alpha2-antiplasmin, streptokinae (e.g., KABIKINASE™), antiresplace (e.g., EMINASE™), tissue plasminogen activator (t-PA, altevase, ACTIVASE™), urokinase (e.g., ABBOKINASE™), sauruplase, (Prourokinase, single chain urokinase), and aminocaproic acid (e.g., AMICAR™). In a specific embodiment, compositions of the invention are administered in combination with tissue plasminogen activator and aspirin.

[1036] In another embodiment, the Therapeutics of the invention are administered in combination with antiplatelet drugs. Antiplatelet drugs that may be administered with the compositions of the invention include, but are not limited to, aspirin, dipyridamole (e.g., PERSANTINE™), and ticlopidine (e.g., TICLID™).

[1037] In specific embodiments, the use of anti-coagulants, thrombolytic and/or antiplatelet drugs in combination with Therapeutics of the invention is contemplated for the prevention, diagnosis, and/or treatment of thrombosis, arterial thrombosis, venous thrombosis, thromboembolism, pulmonary embolism, atherosclerosis, myocardial infarction, transient ischemic attack, unstable angina. In specific embodiments, the use of anticoagulants, thrombolytic drugs and/or antiplatelet drugs in combination with Therapeutics of the invention is contemplated for the prevention of occulsion of saphenous grafts, for reducing the risk of periprocedural thrombosis as might accompany angioplasty procedures, for reducing the risk of stroke in patients with atrial fibrillation including nonrheumatic atrial fibrillation, for reducing the risk of embolism associated with mechanical heart valves and or mitral valves disease. Other uses for the therapeutics of the invention, alone or in combination with antiplatelet, anticoagulant, and/or thrombolytic drugs, include, but are not limited to, the prevention of occlusions in extracorporeal devices (e.g., intravascular canulas, vascular access shunts in hemodialysis patients, hemodialysis machines, and cardiopulmonary bypass machines).

[1038] In certain embodiments, Therapeutics of the invention are administered in combination with antiretroviral agents, nucleoside/nucleotide reverse transcriptase inhibitors (NRTIs), non-nucleoside reverse transcriptase inhibitors (NNRTIs), and/or protease inhibitors (PIs). NRTIs that may be administered in combination with the Therapeutics of the invention, include, but are not limited to, RETROVIR™ (zidovudine/AZT), VIDEX™ (didanosine/ddI), HIVID™ (zalcitabine/ddC), ZERIT™ (stavudine/d4T), EPIVIR™ (lamivudine/3TC), and COMBIVIR™ (zidovudine/lamivudine). NNRTIs that may be administered in combination with the Therapeutics of the invention, include, but are not limited to, VIRAMUNE™ (nevirapine), RESCRIPTOR™ (delavirdine), and SUSTIVA™ (efavirenz). Protease inhibitors that may be administered in combination with the Therapeutics of the invention, include, but are not limited to, CRIXIVAN™ (indinavir), NORVIR™ (ritonavir), INVIRASE™ (saquinavir), and VIRACEPT™ (nelfinavir). In a specific embodiment, antiretroviral agents, nucleoside reverse transcriptase inhibitors, non-nucleoside reverse transcriptase inhibitors, and/or protease inhibitors may be used in any combination with Therapeutics of the invention to treat AIDS and/or to prevent or treat HIV infection.

[1039] Additional NRTIs include LODENOSINE™ (F-ddA; an acid-stable adenosine NRTI; Triangle/Abbott; COVIRACIL™ (emtricitabine/FTC; structurally related to lamivudine (3TC) but with 3- to 10-fold greater activity in vitro; Triangle/Abbott); dOTC (BCH-10652, also structurally related to lamivudine but retains activity against a substantial proportion of lamivudine-resistant isolates; Biochem Pharma); Adefovir (refused approval for anti-HIV therapy by FDA; Gilead Sciences); PREVEON® (Adefovir Dipivoxil, the active prodrug of adefovir; its active form is PMEA-pp); TENOFOVIR™ (bis-POC PMPA, a PMPA prodrug; Gilead); DAPD/DXG (active metabolite of DAPD; Triangle/Abbott); D-D4FC (related to 3TC, with activity against AZT/3TC-resistant virus); GW420867X (Glaxo Wellcome); ZIAGEN™ (abacavir/159U89; Glaxo Wellcome Inc.); CS-87 (3′azido-2′,3′-dideoxyuridine; WO 99/66936); and S-acyl-2-thioethyl (SATE)-bearing prodrug forms of β-L-FD4C and β-L-FddC (WO 98/17281).

[1040] Additional NNRTIs include COACTINON™ (Emivirine/MKC-442, potent NNRTI of the HEPT class; Triangle/Abbott); CAPRAVIRINE™ (AG-1549/S-1153, a next generation NNRTI with activity against viruses containing the K103N mutation; Agouron); PNU-142721 (has 20- to 50-fold greater activity than its predecessor delavirdine and is active against K103N mutants; Pharmacia & Upjohn); DPC-961 and DPC-963 (second-generation derivatives of efavirenz, designed to be active against viruses with the K103N mutation; DuPont); GW-420867× (has 25-fold greater activity than HBY097 and is active against K103N mutants; Glaxo Wellcome); CALANOLIDE A (naturally occurring agent from the latex tree; active against viruses containing either or both the Y181C and K103N mutations); and Propolis (WO 99/49830).

[1041] Additional protease inhibitors include LOPINAVIR™ (ABT378/r; Abbott Laboratories); BMS-232632 (an azapeptide; Bristol-Myres Squibb); TIPRANAVIR™ (PNU-140690, a non-peptic dihydropyrone; Pharmacia & Upjohn); PD-178390 (a nonpeptidic dihydropyrone; Parke-Davis); BMS 232632 (an azapeptide; Bristol-Myers Squibb); L-756,423 (an indinavir analog; Merck); DMP-450 (a cyclic urea compound; Avid & DuPont); AG-1776 (a peptidomimetic with in vitro activity against protease inhibitor-resistant viruses; Agouron); VX-175/GW-433908 (phosphate prodrug of amprenavir; Vertex & Glaxo Welcome); CGP61755 (Ciba); and AGENERASE™ (amprenavir; Glaxo Wellcome Inc.).

[1042] Additional antiretroviral agents include fusion inhibitors/gp41 binders. Fusion inhibitors/gp41 binders include T-20 (a peptide from residues 643-678 of the HIV gp41 transmembrane protein ectodomain which binds to gp41 in its resting state and prevents transformation to the fusogenic state; Trimeris) and T-1249 (a second-generation fusion inhibitor; Trimeris).

[1043] Additional antiretroviral agents include fusion inhibitors/chemokine receptor antagonists. Fusion inhibitors/chemokine receptor antagonists include CXCR4 antagonists such as AMD 3100 (a bicyclam), SDF-1 and its analogs, and ALX40-4C (a cationic peptide), T22 (an 18 amino acid peptide; Trimeris) and the T22 analogs T134 and T140; CCR5 antagonists such as RANTES (9-68), AOP-RANTES, NNY-RANTES, and TAK-779; and CCR5/CXCR4 antagonists such as NSC 651016 (a distamycin analog). Also included are CCR2B, CCR3, and CCR6 antagonists. Chemokine recpetor agonists such as RANTES, SDF-1, MIP-1α, MIP-1β, etc., may also inhibit fusion.

[1044] Additional antiretroviral agents include integrase inhibitors. Integrase inhibitors include dicaffeoylquinic (DFQA) acids; L-chicoric acid (a dicaffeoyltartaric (DCTA) acid); quinalizarin (QLC) and related anthraquinones; ZINTEVIR™ (AR 177, an oligonucleotide that probably acts at cell surface rather than being a true integrase inhibitor; Arondex); and naphthols such as those disclosed in WO 98/50347.

[1045] Additional antiretroviral agents include hydroxyurea-like compunds such as BCX-34 (a purine nucleoside phosphorylase inhibitor; Biocryst); ribonucleotide reductase inhibitors such as DIDOX™ (Molecules for Health); inosine monophosphate dehydrogenase (IMPDH) inhibitors sucha as VX-497 (Vertex); and mycopholic acids such as CellCept (mycophenolate mofetil; Roche).

[1046] Additional antiretroviral agents include inhibitors of viral integrase, inhibitors of viral genome nuclear translocation such as arylene bis(methylketone) compounds; inhibitors of HIV entry such as AOP-RANTES, NNY-RANTES, RANTES-IgG fusion protein, soluble complexes of RANTES and glycosaminoglycans (GAG), and AMD-3100; nucleocapsid zinc finger inhibitors such as dithiane compounds; targets of HIV Tat and Rev; and pharmacoenhancers such as ABT-378.

[1047] Other antiretroviral therapies and adjunct therapies include cytokines and lymphokines such as MIP-1α, MIP-1β, SDF-1α, IL-2, PROLEUKIN™ (aldesleukin/L2-7001; Chiron), IL-4, IL-10, IL-12, and IL-13; interferons such as IFN-α2a; antagonists of TNFs, NFκB, GM-CSF, M-CSF, and IL-10; agents that modulate immune activation such as cyclosporin and prednisone; vaccines such as Remune™ (HIV Immunogen), APL 400-003 (Apollon), recombinant gp120 and fragments, bivalent (B/E) recombinant envelope glycoprotein, rgp120CM235, MN rgp120, SF-2 rgp120, gp120/soluble CD4 complex, Delta JR-FL protein, branched synthetic peptide derived from discontinuous gp120 C3/C4 domain, fusion-competent immunogens, and Gag, Pol, Nef, and Tat vaccines; gene-based therapies such as genetic suppressor elements (GSEs; WO 98/54366), and intrakines (genetically modified CC chemokines targetted to the ER to block surface expression of newly synthesized CCR5 (Yang et al., PNAS 94:11567-72 (1997); Chen et al., Nat. Med. 3:1110-16 (1997)); antibodies such as the anti-CXCR4 antibody 12G5, the anti-CCR5 antibodies 2D7, 5C7, PA8, PA9, PA10, PA11, PA12, and PA14, the anti-CD4 antibodies Q4120 and RPA-T4, the anti-CCR3 antibody 7B11, the anti-gp120 antibodies 17b, 48d, 447-52D, 257-D, 268-D and 50.1, anti-Tat antibodies, anti-TNF-α antibodies, and monoclonal antibody 33A; aryl hydrocarbon (AH) receptor agonists and antagonists such as TCDD, 3,3′,4,4′,5-pentachlorobiphenyl, 3,3′,4,4′-tetrachlorobiphenyl, and α-naphthoflavone (WO 98/30213); and antioxidants such as γ-L-glutamyl-L-cysteine ethyl ester (γ-GCE; WO 99/56764).

[1048] In a further embodiment, the Therapeutics of the invention are adrninistered in combination with an antiviral agent. Antiviral agents that may be administered with the Therapeutics of the invention include, but are not limited to, acyclovir, ribavirin, amantadine, and remantidine.

[1049] In other embodiments, Therapeutics of the invention may be administered in combination with anti-opportunistic infection agents. Anti-opportunistic agents that may be administered in combination with the Therapeutics of the invention, include, but are not limited to, TRIMETHOPRIM-SULFAMETHOXAZOLE™, DAPSONE™, PENTAMIDINE™, ATOVAQUONE™, ISONIAZID™, RIFAMPIN™, PYRAZINAMIDE™, ETHAMBUTOL™, RIFABUTIN™, CLARITHROMYCIN™, AZITHROMYCIN™, GANCICLOVIR™, FOSCARNET™, CIDOFOVIR™, FLUCONAZOLE™, ITRACONAZOLE™, KETOCONAZOLE™, ACYCLOVIR™, FAMCICOLVIR™, PYRIMETHAMINE™, LEUCOVORIN™, NEUPOGEN™(filgrastim/G-CSF), and LEUKINE™(sargramostim/GM-CSF). In a specific embodiment, Therapeutics of the invention are used in any combination with TRIMETHOPRIM-SULFAMETHOXAZOLE™, DAPSONE™, PENTAMIDINE™, and/or ATOVAQUONE™ to prophylactically treat or prevent an opportunistic Pneumocystis carinii pneumonia infection. In another specific embodiment, Therapeutics of the invention are used in any combination with ISONIAZID™, RIFAMPIN™, PYRAZINAMIDE™, and/or ETHAMBUTOL™ to prophylactically treat or prevent an opportunistic Mycobacterium avium complex infection. In another specific embodiment, Therapeutics of the invention are used in any combination with RIFABUTIN™, CLARITHROMYCIN™, and/or AZITHROMYCIN™ to prophylactically treat or prevent an opportunistic Mycobacterium tuberculosis infection. In another specific embodiment, Therapeutics of the invention are used in any combination with GANCICLOVIR™, FOSCARNET™, and/or CIDOFOVIR™ to prophylactically treat or prevent an opportunistic cytomegalovirus infection. In another specific embodiment, Therapeutics of the invention are used in any combination with FLUCONAZOLE™, ITRACONAZOLE™, and/or KETOCONAZOLE™ to prophylactically treat or prevent an opportunistic fungal infection. In another specific embodiment, Therapeutics of the invention are used in any combination with ACYCLOVIR™ and/or FAMCICOLVIR™ to prophylactically treat or prevent an opportunistic herpes simplex virus type I and/or type II infection. In another specific embodiment, Therapeutics of the invention are used in any combination with PYRIMETHAMINE™ and/or LEUCOVORIN™ to prophylactically treat or prevent an opportunistic Toxoplasma gondii infection. In another specific embodiment, Therapeutics of the invention are used in any combination with LEUCOVORIN™ and/or NEUPOGEN™ to prophylactically treat or prevent an opportunistic bacterial infection.

[1050] In a further embodiment, the Therapeutics of the invention are administered in combination with an antibiotic agent. Antibiotic agents that may be administered with the Therapeutics of the invention include, but are not limited to, amoxicillin, beta-lactamases, aminoglycosides, beta-lactam (glycopeptide), beta-lactamases, Clindamycin, chloramphenicol, cephalosporins, ciprofloxacin, erythromycin, fluoroquinolones, macrolides, metronidazole, penicillins, quinolones, rapamycin, rifampin, streptomycin, sulfonamide, tetracyclines, trimethoprim, trimethoprim-sulfamethoxazole, and vancomycin.

[1051] In other embodiments, the Therapeutics of the invention are administered in combination with immunestimulants. Immunostimulants that may be administered in combination with the Therapeutics of the invention include, but are not limited to, levamisole (e.g., ERGAMISOL™), isoprinosine (e.g. INOSIPLEX™), interferons (e.g. interferon alpha), and interleukins (e.g., IL-2).

[1052] In other embodiments, Therapeutics of the invention are administered in combination with immunosuppressive agents. Immunosuppressive agents that may be administered in combination with the Therapeutics of the invention include, but are not limited to, steroids, cyclosporine, cyclosporine analogs, cyclophosphamide methylprednisone, prednisone, azathioprine, FK-506, 15-deoxyspergualin, and other immunosuppressive agents that act by suppressing the function of responding T cells. Other immunosuppressive agents that may be administered in combination with the Therapeutics of the invention include, but are not limited to, prednisolone, methotrexate, thalidomide, methoxsalen, rapamycin, leflunomide, mizoribine (BREDININ™), brequinar, deoxyspergualin, and azaspirane (SKF 105685), ORTHOCLONE OKT® 3 (muromonab-CD3), SANDIMMUNE™, NEORAL™, SANGDYA™ (cyclosporine), PROGRAF® (FK506, tacrolimus), CELLCEPT® (mycophenolate motefil, of which the active metabolite is mycophenolic acid), IMURAN™ (azathioprine), glucocorticosteroids, adrenocortical steroids such as DELTASONE™ (prednisone) and HYDELTRASOL™ (prednisolone), FOLEX™ and MEXATE™ (methotrxate), OXSORALEN-ULTRA™ (methoxsalen) and RAPAMUNE™ (sirolimus). In a specific embodiment, immunosuppressants may be used to prevent rejection of organ or bone marrow transplantation.

[1053] In an additional embodiment, Therapeutics of the invention are administered alone or in combination with one or more intravenous immune globulin preparations. Intravenous immune globulin preparations that may be administered with the Therapeutics of the invention include, but not limited to, GAMMAR™, IVEEGAM™, SANDOGLOBULIN™, GAMMAGARD S/D™, ATGAM™ (antithymocyte glubulin), and GAMIMUNE™. In a specific embodiment, Therapeutics of the invention are administered in combination with intravenous immune globulin preparations in transplantation therapy (e.g., bone marrow transplant).

[1054] In certain embodiments, the Therapeutics of the invention are administered alone or in combination with an anti-inflammatory agent. Anti-inflammatory agents that may be administered with the Therapeutics of the invention include, but are not limited to, corticosteroids (e.g. betamethasone, budesonide, cortisone, dexamethasone, hydrocortisone, methylprednisolone, prednisolone, prednisone, and triamcinolone), nonsteroidal anti-inflammatory drugs (e.g., diclofenac, diflunisal, etodolac, fenoprofen, floctafenine, flurbiprofen, ibuprofen, indomethacin, ketoprofen, meclofenamate, mefenamic acid, meloxicam, nabumetone, naproxen, oxaprozin, phenylbutazone, piroxicam, sulindac, tenoxicam, tiaprofenic acid, and tolmetin.), as well as antihistamines, aminoarylcarboxylic acid derivatives, arylacetic acid derivatives, arylbutyric acid derivatives, arylcarboxylic acids, arylpropionic acid derivatives, pyrazoles, pyrazolones, salicylic acid derivatives, thiazinecarboxamides, e-acetamidocaproic acid, S-adenosylmethionine, 3-amino-4-hydroxybutyric acid, amixetrine, bendazac, benzydamine, bucolome, difenpiramide, ditazol, emorfazone, guaiazulene, nabumetone, nimesulide, orgotein, oxaceprol, paranyline, perisoxal, pifoxime, proquazone, proxazole, and tenidap.

[1055] In an additional embodiment, the compositions of the invention are administered alone or in combination with an anti-angiogenic agent. Anti-angiogenic agents that may be administered with the compositions of the invention include, but are not limited to, Angiostatin (Entremed, Rockville, Md.), Troponin-1 (Boston Life Sciences, Boston, Mass.), anti-Invasive Factor, retinoic acid and derivatives thereof, paclitaxel (Taxol), Suramin, Tissue Inhibitor of Metalloproteinase-1, Tissue Inhibitor of Metalloproteinase-2, VEGI, Plasminogen Activator Inhibitor-1, Plasminogen Activator Inhibitor-2, and various forms of the lighter “d group” transition metals.

[1056] Lighter “d group” transition metals include, for example, vanadium, molybdenum, tungsten, titanium, niobium, and tantalum species. Such transition metal species may form transition metal complexes. Suitable complexes of the above-mentioned transition metal species include oxo transition metal complexes.

[1057] Representative examples of vanadium complexes include oxo vanadium complexes such as vanadate and vanadyl complexes. Suitable vanadate complexes include metavanadate and orthovanadate complexes such as, for example, ammonium metavanadate, sodium metavanadate, and sodium orthovanadate. Suitable vanadyl complexes include, for example, vanadyl acetylacetonate and vanadyl sulfate including vanadyl sulfate hydrates such as vanadyl sulfate mono- and trihydrates.

[1058] Representative examples of tungsten and molybdenum complexes also include oxo complexes. Suitable oxo tungsten complexes include tungstate and tungsten oxide complexes. Suitable tungstate complexes include ammonium tungstate, calcium tungstate, sodium tungstate dihydrate, and tungstic acid. Suitable tungsten oxides include tungsten (IV) oxide and tungsten (VI) oxide. Suitable oxo molybdenum complexes include molybdate, molybdenum oxide, and molybdenyl complexes. Suitable molybdate complexes include ammonium molybdate and its hydrates, sodium molybdate and its hydrates, and potassium molybdate and its hydrates. Suitable molybdenum oxides include molybdenum (VI) oxide, molybdenum (VI) oxide, and molybdic acid. Suitable molybdenyl complexes include, for example, molybdenyl acetylacetonate. Other suitable tungsten and molybdenum complexes include hydroxo derivatives derived from, for example, glycerol, tartaric acid, and sugars.

[1059] A wide variety of other anti-angiogenic factors may also be utilized within the context of the present invention. Representative examples include, but are not limited to, platelet factor 4; protamine sulphate; sulphated chitin derivatives (prepared from queen crab shells), (Murata et al., Cancer Res. 51:22-26, (1991)); Sulphated Polysaccharide Peptidoglycan Complex (SP-PG) (the function of this compound may be enhanced by the presence of steroids such as estrogen, and tamoxifen citrate); Staurosporine; modulators of matrix metabolism, including for example, proline analogs, cishydroxyproline, d,L-3,4-dehydroproline, Thiaproline, alpha,alpha-dipyridyl, aminopropionitrile fumarate; 4-propyl-5-(4-pyridinyl)-2(3H)-oxazolone; Methotrexate; Mitoxantrone; Heparin; Interferons; 2 Macroglobulin-serum; ChIMP-3 (Pavloff et al., J. Bio. Chem. 267:17321-17326, (1992)); Chymostatin (Tomkinson et al., Biochem J. 286:475-480, (1992)); Cyclodextrin Tetradecasulfate; Eponemycin; Camptothecin; Fumagillin (Ingber et al., Nature 348:555-557, (1990)); Gold Sodium Thiomalate (“GST”; Matsubara and Ziff, J. Clin. Invest. 79:1440-1446, (1987)); anticollagenase-serum; alpha2-antiplasmin (Holmes et al., J. Biol. Chem. 262(4):1659-1664, (1987)); Bisantrene (National Cancer Institute); Lobenzarit disodium (N-(2)-carboxyphenyl-4-chloroanthronilic acid disodium or “CCA”; (Takeuchi et al., Agents Actions 36:312-316, (1992)); and metalloproteinase inhibitors such as BB94.

[1060] Additional anti-angiogenic factors that may also be utilized within the context of the present invention include Thalidomide, (Celgene, Warren, N.J.); Angiostatic steroid; AGM-1470 (H. Brem and J. Folkman J Pediatr. Surg 28:445-51 (1993)); an integrin alpha v beta 3 antagonist (C. Storgard et al., J. Clin. Invest. 103:47-54 (1999)); carboxynaminolmidazole; Carboxyamidotriazole (CAI) (National Cancer Institute, Bethesda, Md.); Conbretastatin A-4 (CA4P) (OXiGENE, Boston, Mass.); Squalamine (Magainin Pharmaceuticals, Plymouth Meeting, Pa.); TNP-470, (Tap Pharmaceuticals, Deerfield, Ill.); ZD-0101 AstraZeneca (London, UK); APRA (CT2584); Benefin, Byrostatin-1 (SC339555); CGP-41251 (PKC 412); CM101; Dexrazoxane (ICRF187); DMXAA; Endostatin; Flavopridiol; Genestein; GTE; ImmTher; Iressa (ZD1839); Octreotide (Somatostatin); Panretin; Penacillamine; Photopoint; PI-88; Prinomastat (AG-3340) Purlytin; Suradista (FCE26644); Tamoxifen (Nolvadex); Tazarotene; Tetrathiomolybdate; Xeloda (Capecitabine); and 5-Fluorouracil.

[1061] Anti-angiogenic agents that may be administed in combination with the compounds of the invention may work through a variety of mechanisms including, but not limited to, inhibiting proteolysis of the extracellular matrix, blocking the function of endothelial cell-extracellular matrix adhesion molecules, by antagonizing the function of angiogenesis inducers such as growth factors, and inhibiting integrin receptors expressed on proliferating endothelial cells. Examples of anti-angiogenic inhibitors that interfere with extracellular matrix proteolysis and which may be administered in combination with the compositons of the invention include, but are not Imited to, AG-3340 (Agouron, La Jolla, Calif.), BAY-12-9566 (Bayer, West Haven, Conn.), BMS-275291 (Bristol Myers Squibb, Princeton, N.J.), CGS-27032A (Novartis, East Hanover, N.J.), Marimastat (British Biotech, Oxford, UK), and Metastat (Aetema, St-Foy, Quebec). Examples of anti-angiogenic inhibitors that act by blocking the function of endothelial cell-extracellular matrix adhesion molecules and which may be administered in combination with the compositons of the invention include, but are not Imited to, EMD-121974 (Merck KcgaA Darmstadt, Germany) and Vitaxin (Ixsys, La Jolla, Calif./Medimmune, Gaithersburg, Md.). Examples of anti-angiogenic agents that act by directly antagonizing or inhibiting angiogenesis inducers and which may be administered in combination with the compositons of the invention include, but are not lmited to, Angiozyme (Ribozyme, Boulder, Colo.), Anti-VEGF antibody (Genentech, S. San Francisco, Calif.), PTK-787/ZK-225846 (Novartis, Basel, Switzerland), SU-101 (Sugen, S. San Francisco, Calif.), SU-5416 (Sugen/Pharmacia Upjohn, Bridgewater, N.J.), and SU-6668 (Sugen). Other anti-angiogenic agents act to indirectly inhibit angiogenesis. Examples of indirect inhibitors of angiogenesis which may be administered in combination with the compositons of the invention include, but are not limited to, IM-862 (Cytran, Kirkland, Wash.), Interferon-alpha, IL-12 (Roche, Nutley, N.J.), and Pentosan polysulfate (Georgetown University, Washington, D.C.).

[1062] In particular embodiments, the use of compositions of the invention in combination with anti-angiogenic agents is contemplated for the treatment, prevention, and/or amelioration of an autoimmune disease, such as for example, an autoimmune disease described herein.

[1063] In a particular embodiment, the use of compositions of the invention in combination with anti-angiogenic agents is contemplated for the treatment, prevention, and/or amelioration of arthritis. In a more particular embodiment, the use of compositions of the invention in combination with anti-angiogenic agents is contemplated for the treatment, prevention, and/or amelioration of rheumatoid arthritis.

[1064] In another embodiment, the polynucleotides encoding a polypeptide of the present invention are administered in combination with an angiogenic protein, or polynucleotides encoding an angiogenic protein. Examples of angiogenic proteins that may be administered with the compositions of the invention include, but are not limited to, acidic and basic fibroblast growth factors, VEGF-1, VEGF-2, VEGF-3, epidermal growth factor alpha and beta, platelet-derived endothelial cell growth factor, platelet-derived growth factor, tumor necrosis factor alpha, hepatocyte growth factor, insulin-like growth factor, colony stimulating factor, macrophage colony stimulating factor, granulocyte/macrophage colony stimulating factor, and nitric oxide synthase.

[1065] In additional embodiments, compositions of the invention are administered in combination with a chemotherapeutic agent. Chemotherapeutic agents that may be administered with the Therapeutics of the invention include, but are not limited to alkylating agents such as nitrogen mustards (for example, Mechlorethamine, cyclophosphamide, Cyclophosphamide Ifosfamide, Melphalan (L-sarcolysin), and Chlorambucil), ethylenimines and methylmelamines (for example, Hexamethylmelamine and Thiotepa), alkyl sulfonates (for example, Busulfan), nitrosoureas (for example, Carmustine (BCNU), Lomustine (CCNU), Semustine (methyl-CCNU), and Streptozocin (streptozotocin)), triazenes (for example, Dacarbazine (DTIC; dimethyltriazenoimidazolecarboxamide)), folic acid analogs (for example, Methotrexate (amethopterin)), pyrimidine analogs (for example, Fluorouacil (5-fluorouracil; 5-FU), Floxuridine (fluorodeoxyuridine; FudR), and Cytarabine (cytosine arabinoside)), purine analogs and related inhibitors (for example, Mercaptopurine (6-mercaptopurine; 6-MP), Thioguanine (6-thioguanine; TG), and Pentostatin (2′-deoxycoformycin)), vinca alkaloids (for example, Vinblastine (VLB, vinblastine sulfate)) and Vincristine (vincristine sulfate)), epipodophyllotoxins (for example, Etoposide and Teniposide), antibiotics (for example, Dactinomycin (actinomycin D), Daunorubicin (daunomycin; rubidomycin), Doxorubicin, Bleomycin, Plicamycin (mithramycin), and Mitomycin (mitomycin C), enzymes (for example, L-Asparaginase), biological response modifiers (for example, Interferon-alpha and interferon-alpha-2b), platinum coordination compounds (for example, Cisplatin (cis-DDP) and Carboplatin), anthracenedione (Mitoxantrone), substituted ureas (for example, Hydroxyurea), methylhydrazine derivatives (for example, Procarbazine (N-methylhydrazine; MIH), adrenocorticosteroids (for example, Prednisone), progestins (for example, Hydroxyprogesterone caproate, Medroxyprogesterone, Medroxyprogesterone acetate, and Megestrol acetate), estrogens (for example, Diethylstilbestrol (DES), Diethylstilbestrol diphosphate, Estradiol, and Ethinyl estradiol), antiestrogens (for example, Tamoxifen), androgens (Testosterone proprionate, and Fluoxymesterone), antiandrogens (for example, Flutamide), gonadotropin-releasing horomone analogs (for example, Leuprolide), other hormones and hormone analogs (for example, methyltestosterone, estramustine, estramustine phosphate sodium, chlorotrianisene, and testolactone), and others (for example, dicarbazine, glutamic acid, and mitotane).

[1066] In one embodiment, the compositions of the invention are administered in combination with one or more of the following drugs: infliximab (also known as Remicade™ Centocor, Inc.), Trocade (Roche, RO-32-3555), Leflunomide (also known as Arava™ from Hoechst Marion Roussel), Kineret™ (an IL-1 Receptor antagonist also known as Anakinra from Amgen, Inc.)

[1067] In a specific embodiment, compositions of the invention are administered in combination with CHOP (cyclophosphamide, doxorubicin, vincristine, and prednisone) or combination of one or more of the components of CHOP. In one embodiment, the compositions of the invention are administered in combination with anti-CD20 antibodies, human monoclonal anti-CD20 antibodies. In another embodiment, the compositions of the invention are administered in combination with anti-CD20 antibodies and CHOP, or anti-CD20 antibodies and any combination of one or more of the components of CHOP, particularly cyclophosphamide and/or prednisone. In a specific embodiment, compositions of the invention are administered in combination with Rituximab. In a further embodiment, compositions of the invention are administered with Rituximab and CHOP, or Rituximab and any combination of one or more of the components of CHOP, particularly cyclophosphamide and/or prednisone. In a specific embodiment, compositions of the invention are administered in combination with tositumomab. In a further embodiment, compositions of the invention are administered with tositumomab and CHOP, or tositumomab and any combination of one or more of the components of CHOP, particularly cyclophosphamide and/or prednisone. The anti-CD20 antibodies may optionally be associated with radioisotopes, toxins or cytotoxic prodrugs.

[1068] In another specific embodiment, the compositions of the invention are administered in combination Zevalin™. In a further embodiment, compositions of the invention are administered with Zevalin™ and CHOP, or Zevalin™ and any combination of one or more of the components of CHOP, particularly cyclophosphamide and/or prednisone. Zevalin™ may be associated with one or more radisotopes. Particularly preferred isotopes are ⁹⁰Y and ¹¹¹In.

[1069] In an additional embodiment, the Therapeutics of the invention are administered in combination with cytokines. Cytokines that may be administered with the Therapeutics of the invention include, but are not limited to, IL2, IL3, IL4, IL5, IL6, IL7, IL10, IL12, IL13, IL15, anti-CD40, CD40L, IFN-gamma and TNF-alpha. In another embodiment, Therapeutics of the invention may be administered with any interleukin, including, but not limited to, IL-1alpha, IL-1beta, IL-2, IL-3, IL-4, IL-5, IL-6, IL-7, IL-8, IL-9, IL-10, IL-11, IL-12, IL-13, IL-14, IL-15, IL-16, IL-17, IL-18, IL-19, IL-20, and IL-21.

[1070] In one embodiment, the Therapeutics of the invention are administered in combination with members of the TNF family. TNF, TNF-related or TNF-like molecules that may be administered with the Therapeutics of the invention include, but are not limited to, soluble forms of TNF-alpha, lymphotoxin-alpha (LT-alpha, also known as TNF-beta), LT-beta (found in complex heterotrimer LT-alpha2-beta), OPGL, FasL, CD27L, CD30L, CD40L, 4-1BBL, DcR3, OX40L, TNF-gamma (International Publication No. WO 96/14328), AIM-I (International Publication No. WO 97/33899), endokine-alpha (International Publication No. WO 98/07880), OPG, and neutrokine-alpha (International Publication No. WO 98/18921, OX40, and nerve growth factor (NGF), and soluble forms of Fas, CD30, CD27, CD40 and 4-IBB, TR2 (International Publication No. WO 96/34095), DR3 (International Publication No. WO 97/33904), DR4 (International Publication No. WO 98/32856), TR5 (International Publication No. WO 98/30693), TRANK, TR9 (International Publication No. WO 98/56892), TR10 (International Publication No. WO 98/54202), 312C2 (International Publication No. WO 98/06842), and TR12, and soluble forms CD154, CD70, and CD153.

[1071] In an additional embodiment, the Therapeutics of the invention are administered in combination with angiogenic proteins. Angiogenic proteins that may be administered with the Therapeutics of the invention include, but are not limited to, Glioma Derived Growth Factor (GDGF), as disclosed in European Patent Number EP-399816; Platelet Derived Growth Factor-A (PDGF-A), as disclosed in European Patent Number EP-682110; Platelet Derived Growth Factor-B (PDGF-B), as disclosed in European Patent Number EP-282317; Placental Growth Factor (PlGF), as disclosed in International Publication Number WO 92/06194; Placental Growth Factor-2 (PlGF-2), as disclosed in Hauser et al., Growth Factors, 4:259-268 (1993); Vascular Endothelial Growth Factor (VEGF), as disclosed in International Publication Number WO 90/13649; Vascular Endothelial Growth Factor-A (VEGF-A), as disclosed in European Patent Number EP-506477; Vascular Endothelial Growth Factor-2 (VEGF-2), as disclosed in International Publication Number WO 96/39515; Vascular Endothelial Growth Factor B (VEGF-3); Vascular Endothelial Growth Factor B-186 (VEGF-B186), as disclosed in International Publication Number WO 96/26736; Vascular Endothelial Growth Factor-D (VEGF-D), as disclosed in International Publication Number WO 98/02543; Vascular Endothelial Growth Factor-D (VEGF-D), as disclosed in International Publication Number WO 98/07832; and Vascular Endothelial Growth Factor-E (VEGF-E), as disclosed in German Patent Number DE19639601. The above mentioned references are herein incorporated by reference in their entireties.

[1072] In an additional embodiment, the Therapeutics of the invention are administered in combination with Fibroblast Growth Factors. Fibroblast Growth Factors that may be administered with the Therapeutics of the invention include, but are not limited to, FGF-1, FGF-2, FGF-3, FGF-4, FGF-5, FGF-6, FGF-7, FGF-8, FGF-9, FGF-10, FGF-11, FGF-12, FGF-13, FGF-14, and FGF-15.

[1073] In an additional embodiment, the Therapeutics of the invention are administered in combination with hematopoietic growth factors. Hematopoietic growth factors that may be administered with the Therapeutics of the invention include, but are not limited to, granulocyte macrophage colony stimulating factor (GM-CSF) (sargramostim, LEUKINE™, PROKINE™), granulocyte colony stimulating factor (G-CSF) (filgrastim, NEUPOGEN™), macrophage colony stimulating factor (M-CSF, CSF-1) erythropoietin (epoetin alfa, EPOGEN™, PROCRIT™), stem cell factor (SCF, c-kit ligand, steel factor), megakaryocyte colony stimulating factor, PIXY321 (a GMCSF/IL-3 fusion protein), interleukins, especially any one or more of IL-1 through IL-12, interferon-gamma, or thrombopoietin.

[1074] In certain embodiments, Therapeutics of the present invention are administered in combination with adrenergic blockers, such as, for example, acebutolol, atenolol, betaxolol, bisoprolol, carteolol, labetalol, metoprolol, nadolol, oxprenolol, penbutolol, pindolol, propranolol, sotalol, and timolol.

[1075] In another embodiment, the Therapeutics of the invention are administered in combination with an antiarrhythmic drug (e.g., adenosine, amidoarone, bretylium, digitalis, digoxin, digitoxin, diliazem, disopyramide, esmolol, flecainide, lidocaine, mexiletine, moricizine, phenyloin, procainamide, N-acetyl procainamide, propafenone, propranolol, quinidine, sotalol, tocainide, and verapamil).

[1076] In another embodiment, the Therapeutics of the invention are administered in combination with diuretic agents, such as carbonic anhydrase-inhibiting agents (e.g., acetazolamide, dichlorphenamide, and methazolamide), osmotic diuretics (e.g., glycerin, isosorbide, mannitol, and urea), diuretics that inhibit Na⁺—K⁺-2Cl⁻ symport (e.g., furosemide, bumetanide, azosemide, piretanide, tripamide, ethacrynic acid, muzolimine, and torsemide), thiazide and thiazide-like diuretics (e.g., bendroflumethiazide, benzthiazide, chlorothiazide, hydrochlorothiazide, hydroflumethiazide, methyclothiazide, polythiazide, trichormethiazide, chlorthalidone, indapamide, metolazone, and quinethazone), potassium sparing diuretics (e.g., amiloride and triamterene), and mineralcorticoid receptor antagonists (e.g., spironolactone, canrenone, and potassium canrenoate).

[1077] In one embodiment, the Therapeutics of the invention are administered in combination with treatments for endocrine and/or hormone imbalance disorders. Treatments for endocrine and/or hormone imbalance disorders include, but are not limited to, ¹²⁷I, radioactive isotopes of iodine such as ¹³¹I and ¹²³I; recombinant growth hormone, such as HUMATROPE™ (recombinant somatropin); growth hormone analogs such as PROTROPIN™ (somatrem); dopamine agonists such as PARLODEL™ (bromocriptine); somatostatin analogs such as SANDOSTATIN™ (octreotide); gonadotropin preparations such as PREGNYL™, A. P. L.™ and PROFASI™ (chorionic gonadotropin (CG)), PERGONAL™ (menotropins), and METRODIN™ (urofollitropin (uFSH)); synthetic human gonadotropin releasing hormone preparations such as FACTREL™ and LUTREPULSE™ (gonadorelin hydrochloride); synthetic gonadotropin agonists such as LUPRON™ (leuprolide acetate), SUPPRELIN™ (histrelin acetate), SYNAREL™ (nafarelin acetate), and ZOLADEX™ (goserelin acetate); synthetic preparations of thyrotropin-releasing hormone such as RELEFACT TRH™ and THYPINONE™ (protirelin); recombinant human TSH such as THYROGEN™; synthetic preparations of the sodium salts of the natural isomers of thyroid hormones such as L-T₄™, SYNTHROID™ and LEVOTHROID™ (levothyroxine sodium), L-T₃™, CYTOMEL™ and TRIOSTAT™ (liothyroine sodium), and THYROLAR™ (liotrix); antithyroid compounds such as 6-n-propylthiouracil (propylthiouracil), 1-methyl-2-mercaptoimidazole and TAPAZOLE™ (methimazole), NEO-MERCAZOLE™ (carbimazole); beta-adrenergic receptor antagonists such as propranolol and esmolol; Ca²⁺ channel blockers; dexamethasone and iodinated radiological contrast agents such as TELEPAQUE™ (iopanoic acid) and ORAGRAFIN™ (sodium ipodate).

[1078] Additional treatments for endocrine and/or hormone imbalance disorders include, but are not limited to, estrogens or congugated estrogens such as ESTRACE™(estradiol), ESTINYL™ (ethinyl estradiol), PREMARIN™, ESTRATAB™, ORTHO-EST™, OGEN™ and estropipate (estrone), ESTROVIS™(quinestrol), ESTRADERM™(estradiol), DELESTROGEN™and VALERGEN™(estradiol valerate), DEPO-ESTRADIOL CYPIONATE™and ESTROJECT LA™(estradiol cypionate); antiestrogens such as NOLVADEX™(tamoxifen), SEROPHENE™and CLOMID™(clomiphene); progestins such as DURALUTIN™(hydroxyprogesterone caproate), MPA™and DEPO-PROVERA™(medroxyprogesterone acetate), PROVERA™and CYCRIN™(MPA), MEGACE™(megestrol acetate), NORLUTIN™(norethindrone), and NORLUTATE™and AYGESTIN™(norethindrone acetate); progesterone implants such as NORPLANT SYSTEM™(subdermal implants of norgestrel); antiprogestins such as RU 486™(mifepristone); hormonal contraceptives such as ENOVID™(norethynodrel plus mestranol), PROGESTASER™(intrauterine device that releases progesterone), LOESTRIN™, BREVICON™, MODICON™, GENORA™, NELONA™, NORINYL™, OVACON-35™ and OVACON-50™ (ethinyl estradiol/norethindrone), LEVLEN™, NORDETTE™, TRI-LEVLEN™and TRIPHASIL-21™(ethinyl estradiol/levonorgestrel) LO/OVRAL™ and OVRAL™(ethinyl estradiol/norgestrel), DEMULEN™(ethinyl estradiol/ethynodiol diacetate), NORINYL™, ORTHO-NOVUM™, NORETHIN™, GENORA™, and NELOVA™(norethindrone/mestranol), DESOGEN™and ORTHO-CEP™(ethinyl estradiol/desogestrel), ORTHO-CYCLEN™and ORTHO-TRICYCLEN™(ethinyl estradiol/norgestimate), MICRONOR™and NOR-QD™ (norethindrone), and OVRETTE™ (norgestrel).

[1079] Additional treatments for endocrine and/or hormone imbalance disorders include, but are not limited to, testosterone esters such as methenolone acetate and testosterone undecanoate; parenteral and oral androgens such as TESTOJECT-50™ (testosterone), TESTEX™ (testosterone propionate), DELATESTRYL™ (testosterone enanthate), DEPO-TESTOSTERONE™ (testosterone cypionate), DANOCRINE™ (danazol), HALOTESTIN™ (fluoxymesterone), ORETON METHYL™, TESTRED™ and VIRILON™ (methyltestosterone), and OXANDRIN™ (oxandrolone); testosterone transdermal systems such as TESTODERM™; androgen receptor antagonist and 5-alpha-reductase inhibitors such as ANDROCUR™ (cyproterone acetate), EULEXIN™ (flutamide), and PROSCAR™ (finasteride); adrenocorticotropic hormone preparations such as CORTROSYN™ (cosyntropin); adrenocortical steroids and their synthetic analogs such as ACLOVATE™ (alclometasone dipropionate), CYCLOCORT™ (amcinonide), BECLOVENT™ and VANCERIL™ (beclomethasone dipropionate), CELESTONE™ (betamethasone), BENISONE™ and UTICORT™ (betamethasone benzoate), DIPROSONE™ (betamethasone dipropionate), CELESTONE PHOSPHATE™ (betamethasone sodium phosphate), CELESTONE SOLUSPAN™ (betamethasone sodium phosphate and acetate), BETA-VAL™ and VALISONE™ (betamethasone valerate), TEMOVATE™ (clobetasol propionate), CLODERM™ (clocortolone pivalate), CORTEF™ and HYDROCORTONE™ (cortisol (hydrocortisone)), HYDROCORTONE ACETATE™ (cortisol (hydrocortisone) acetate), LOCOID™ (cortisol (hydrocortisone) butyrate), HYDROCORTONE PHOSPHATE™ (cortisol (hydrocortisone) sodium phosphate), A-HYDROCOR™ and SOLU CORTEF™ (cortisol (hydrocortisone) sodium succinate), WESTCOR™ (cortisol (hydrocortisone) valerate), CORTISONE ACETATE™ (cortisone acetate), DESOWEN™ and TRIDESILON™ (desonide), TOPICORT™ (desoximetasone), DECADRON™ (dexamethasone), DECADRON LA™ (dexamethasone acetate), DECADRON PHOSPHATE™ and HEXADROL PHOSPHATE™ (dexamethasone sodium phosphate), FLORONE™ and MAXIFLOR™ (diflorasone diacetate), FLORINEF ACETATE™ (fludrocortisone acetate), AEROBID™ and NASALIDE™ (flunisolide), FLUONID™ and SYNALAR™ (fluocinolone acetonide), LIDEX™ (fluocinonide), FLUOR-OP™ and FML™ (fluorometholone), CORDRAN™ (flurandrenolide), HALOG™ (halcinonide), HMS LIZUIFILM™ (medrysone), MEDROL™ (methylprednisolone), DEPO-MEDROLT” and MEDROL ACETATE™ (methylprednisone acetate), A-METHAPRED™ and SOLUMEDROL™ (methylprednisolone sodium succinate), ELOCON™ (mometasone furoate), HALDRONE™ (paramethasone acetate), DELTA-CORTEF™ (prednisolone), ECONOPRED™ (prednisolone acetate), HYDELTRASOL™ (prednisolone sodium phosphate), HYDELTRA-T.B.A™ (prednisolone tebutate), DELTASONE™ (prednisone), ARISTOCORT™ and KENACORT™ (triamcinolone), KENALOG™ (triamcinolone acetonide), ARISTOCORT™ and KENACORT DIACETATE™ (triamcinolone diacetate), and ARISTOSPAN™ (triamcinolone hexacetonide); inhibitors of biosynthesis and action of adrenocortical steroids such as CYTADREN™ (aminoglutethimide), NIZORAL™ (ketoconazole), MODRASTANE™ (trilostane), and METOPIRONE™ (metyrapone); bovine, porcine or human insulin or mixtures thereof; insulin analogs; recombinant human insulin such as HUMULIN™ and NOVOLIN™; oral hypoglycemic agents such as ORAMIDE™ and ORINASE™ (tolbutamide), DIABINESE™ (chlorpropamide), TOLAMIDE™ and TOLINASE™ (tolazamide), DYMELOR™ (acetohexamide), glibenclamide, MICRONASE™, DIBETA™ and GLYNASE™ (glyburide), GLUCOTROL™ (glipizide), and DIAMICRON™ (gliclazide), GLUCOPHAGE™ (metformin), ciglitazone, pioglitazone, and alpha-glucosidase inhibitors; bovine or porcine glucagon; somatostatins such as SANDOSTATIN™ (octreotide); and diazoxides such as PROGLYCEM™ (diazoxide).

[1080] In one embodiment, the Therapeutics of the invention are administered in combination with treatments for uterine motility disorders. Treatments for uterine motility disorders include, but are not limited to, estrogen drugs such as conjugated estrogens (e.g., PREMARIN® and ESTRATAB®), estradiols (e.g., CLIMARA® and ALORA®), estropipate, and chlorotrianisene; progestin drugs (e.g., AMEN® (medroxyprogesterone), MICRONOR® (norethidrone acetate), PROMETRIUM® progesterone, and megestrol acetate); and estrogen/progesterone combination therapies such as, for example, conjugated estrogens/medroxyprogesterone (e.g., PREMPRO™ and PREMPHASE®) and norethindrone acetate/ethinyl estsradiol (e.g., FEMHRT™).

[1081] In an additional embodiment, the Therapeutics of the invention are administered in combination with drugs effective in treating iron deficiency and hypochromic anemias, including but not limited to, ferrous sulfate (iron sulfate, FEOSOL™), ferrous fumarate (e.g., FEOSTAT™), ferrous gluconate (e.g., FERGON™), polysaccharide-iron complex (e.g., NIFEREX™), iron dextran injection (e.g., INFED™), cupric sulfate, pyroxidine, riboflavin, Vitamin B₁₂, cyancobalamin injection (e.g., REDISOL™, RUBRAMIN PC™), hydroxocobalamin, folic acid (e.g., FOLVITE™), leucovorin (folinic acid, 5-CHOH4PteGlu, citrovorum factor) or WELLCOVORIN (Calcium salt of leucovorin), transferrin or ferritin.

[1082] In certain embodiments, the Therapeutics of the invention are administered in combination with agents used to treat psychiatric disorders. Psychiatric drugs that may be administered with the Therapeutics of the invention include, but are not limited to, antipsychotic agents (e.g., chlorpromazine, chlorprothixene, clozapine, fluphenazine, haloperidol, loxapine, mesoridazine, molindone, olanzapine, perphenazine, pimozide, quetiapine, risperidone, thioridazine, thiothixene, trifluoperazine, and triflupromazine), antimanic agents (e.g., carbamazepine, divalproex sodium, lithium carbonate, and lithium citrate), antidepressants (e.g., amitriptyline, amoxapine, bupropion, citalopram, clomipramine, desipramine, doxepin, fluvoxamine, fluoxetine, imipramine, isocarboxazid, maprotiline, mirtazapine, nefazodone, nortriptyline, paroxetine, phenelzine, protriptyline, sertraline, tranylcypromine, trazodone, trimipramine, and venlafaxine), antianxiety agents (e.g., alprazolam, buspirone, chlordiazepoxide, clorazepate, diazepam, halazepam, lorazepam, oxazeparn, and prazepam), and stimulants (e.g., d-amphetamine, methylphenidate, and pemoline).

[1083] In other embodiments, the Therapeutics of the invention are administered in combination with agents used to treat neurological disorders. Neurological agents that may be administered with the Therapeutics of the invention include, but are not limited to, antiepileptic agents (e.g., carbamazepine, clonazepam, ethosuximide, phenobarbital, phenyloin, primidone, valproic acid, divalproex sodium, felbamate, gabapentin, lamotrigine, levetiracetam, oxcarbazepine, tiagabine, topiramate, zonisamide, diazepam, lorazepam, and clonazepam), antiparkinsonian agents (e.g., levodopa/carbidopa, selegiline, amantidine, bromocriptine, pergolide, ropinirole, pramipexole, benztropine; biperiden; ethopropazine; procyclidine; trihexyphenidyl, tolcapone), and ALS therapeutics (e.g. riluzole).

[1084] In another embodiment, Therapeutics of the invention are administered in combination with vasodilating agents and/or calcium channel blocking agents. Vasodilating agents that may be administered with the Therapeutics of the invention include, but are not limited to, Angiotensin Converting Enzyme (ACE) inhibitors (e.g., papaverine, isoxsuprine, benazepril, captopril, cilazapril, enalapril, enalaprilat, fosinopril, lisinopril, moexipril, perindopril, quinapril, ramipril, spirapril, trandolapril, and nylidrin), and nitrates (e.g., isosorbide dinitrate, isosorbide mononitrate, and nitroglycerin). Examples of calcium channel blocking agents that may be administered in combination with the Therapeutics of the invention include, but are not limited to amlodipine, bepridil, diltiazem, felodipine, flunarizine, isradipine, nicardipine, nifedipine, nimodipine, and verapamil.

[1085] In certain embodiments, the Therapeutics of the invention are administered in combination with treatments for gastrointestinal disorders. Treatments for gastrointestinal disorders that may be administered with the Therapeutic of the invention include, but are not limited to, H₂ histamine receptor antagonists (e.g., TAGAMET™ (cimetidine), ZANTAC™ (ranitidine), PEPCID™ (famotidine), and AXID™ (nizatidine)); inhibitors of H⁺, K⁺ ATPase (e.g., PREVACID™ (lansoprazole) and PRILOSEC™ (omeprazole)); Bismuth compounds (e.g., PEPTO-BISMOL™ (bismuth subsalicylate) and DE-NOL™ (bismuth subcitrate)); various antacids; sucralfate; prostaglandin analogs (e.g. CYTOTEC™ (misoprostol)); muscarinic cholinergic antagonists; laxatives (e.g., surfactant laxatives, stimulant laxatives, saline and osmotic laxatives); antidiarrheal agents (e.g., LOMOTIL™ (diphenoxylate), MOTOFEN™ (diphenoxin), and IMODIUM™ (loperamide hydrochloride)), synthetic analogs of somatostatin such as SANDOSTATIN™ (octreotide), antiemetic agents (e.g., ZOFRAN™ (ondansetron), KYTRIL™ (granisetron hydrochloride), tropisetron, dolasetron, metoclopramide, chlorpromazine, perphenazine, prochlorperazine, promethazine, thiethylperazine, triflupromazine, domperidone, haloperidol, droperidol, trimethobenzamide, dexamethasone, methylprednisolone, dronabinol, and nabilone); D2 antagonists (e.g., metoclopramide, trimethobenzamide and chlorpromazine); bile salts; chenodeoxycholic acid; ursodeoxycholic acid; and pancreatic enzyme preparations such as pancreatin and pancrelipase.

[1086] In additional embodiments, the Therapeutics of the invention are administered in combination with other therapeutic or prophylactic regimens, such as, for example, radiation therapy.

### Example 14

### Method of Treating Decreased Levels of the Polypeptide

[1087] The present invention relates to a method for treating an individual in need of an increased level of a polypeptide of the invention in the body comprising administering to such an individual a composition comprising a therapeutically effective amount of an agonist of the invention (including polypeptides of the invention). Moreover, it will be appreciated that conditions caused by a decrease in the standard or normal expression level of a polypeptide of the present invention in an individual can be treated by administering the agonist or antagonist of the present invention. Thus, the invention also provides a method of treatment of an individual in need of an increased level of the polypeptide comprising administering to such an individual a Therapeutic comprising an amount of the agonist or antagonist to increase the activity level of the polypeptide in such an individual.

[1088] For example, a patient with decreased levels of a polypeptide receives a daily dose 0.1-100 ug/kg of the agonist or antagonist for six consecutive days. The exact details of the dosing scheme, based on administration and formulation, are provided in Example 13.

### Example 15

### Method of Treating Increased Levels of the Polypeptide

[1089] The present invention also relates to a method of treating an individual in need of a decreased level of a polypeptide of the invention in the body comprising administering to such an individual a composition comprising a therapeutically effective amount of an antagonist of the invention (including polypeptides and antibodies of the invention).

[1090] In one example, antisense technology is used to inhibit production of a polypeptide of the present invention. This technology is one example of a method of decreasing levels of a polypeptide, due to a variety of etiologies, such as cancer.

[1091] For example, a patient diagnosed with abnormally increased levels of a polypeptide is administered intravenously antisense polynucleotides at 0.5, 1.0, 1.5, 2.0 and 3.0 mg/kg day for 21 days. This treatment is repeated after a 7-day rest period if the treatment was well tolerated. The antisense polynucleotides of the present invention can be formulated using techniques and formulations described herein (e.g. see Example 13), or otherwise known in the art.

### Example 16

### Method of Treatment Using Gene Therapy-Ex Vivo

[1092] One method of gene therapy transplants fibroblasts, which are capable of expressing a polypeptide, onto a patient. Generally, fibroblasts are obtained from a subject by skin biopsy. The resulting tissue is placed in tissue-culture medium and separated into small pieces. Small chunks of the tissue are placed on a wet surface of a tissue culture flask, approximately ten pieces are placed in each flask. The flask is turned upside down, closed tight and left at room temperature over night. After 24 hours at room temperature, the flask is inverted and the chunks of tissue remain fixed to the bottom of the flask and fresh media (e.g., Ham's F12 media, with 10% FBS, penicillin and streptomycin) is added. The flasks are then incubated at 37 degree C. for approximately one week.

[1093] At this time, fresh media is added and subsequently changed every several days. After an additional two weeks in culture, a monolayer of fibroblasts emerge. The monolayer is trypsinized and scaled into larger flasks.

[1094] pMV-7 (Kirschmeier, P. T. et al., DNA, 7:219-25 (1988)), flanked by the long terminal repeats of the Moloney murine sarcoma virus, is digested with EcoRI and HindIII and subsequently treated with calf intestinal phosphatase. The linear vector is fractionated on agarose gel and purified, using glass beads.

[1095] The cDNA encoding a polypeptide of the present invention can be amplified using PCR primers which correspond to the 5′ and 3′ end sequences respectively as set forth in Example 1 using primers and having appropriate restriction sites and initiation/stop codons, if necessary. Preferably, the 5′ primer contains an EcoRI site and the 3′ primer includes a HindIII site. Equal quantities of the Moloney murine sarcoma virus linear backbone and the amplified EcoRI and HindIII fragment are added together, in the presence of T4 DNA ligase. The resulting mixture is maintained under conditions appropriate for ligation of the two fragments. The ligation mixture is then used to transform bacteria HB101, which are then plated onto agar containing kanamycin for the purpose of confirming that the vector has the gene of interest properly inserted.

[1096] The amphotropic pA317 or GP+am12 packaging cells are grown in tissue culture to confluent density in Dulbecco's Modified Eagles Medium (DMEM) with 10% calf serum (CS), penicillin and streptomycin. The MSV vector containing the gene is then added to the media and the packaging cells transduced with the vector. The packaging cells now produce infectious viral particles containing the gene (the packaging cells are now referred to as producer cells).

[1097] Fresh media is added to the transduced producer cells, and subsequently, the media is harvested from a 10 cm plate of confluent producer cells. The spent media, containing the infectious viral particles, is filtered through a millipore filter to remove detached producer cells and this media is then used to infect fibroblast cells. Media is removed from a sub-confluent plate of fibroblasts and quickly replaced with the media from the producer cells. This media is removed and replaced with fresh media. If the titer of virus is high, then virtually all fibroblasts will be infected and no selection is required. If the titer is very low, then it is necessary to use a retroviral vector that has a selectable marker, such as neo or his. Once the fibroblasts have been efficiently infected, the fibroblasts are analyzed to determine whether protein is produced.

[1098] The engineered fibroblasts are then transplanted onto the host, either alone or after having been grown to confluence on cytodex 3 microcarrier beads.

### Example 17

### Gene Therapy Using Endogenous Genes Corresponding to Polynucleotides of the Invention

[1099] Another method of gene therapy according to the present invention involves operably associating the endogenous polynucleotide sequence of the invention with a promoter via homologous recombination as described, for example, in U.S. Pat. No. 5,641,670, issued Jun. 24, 1997; International Publication NO: WO 96/29411, published Sep. 26, 1996; International Publication NO: WO 94/12650, published Aug. 4, 1994; Koller et al., Proc. Natl. Acad. Sci. USA, 86:8932-8935 (1989); and Zijlstra et al., Nature, 342:435-438 (1989). This method involves the activation of a gene which is present in the target cells, but which is not expressed in the cells, or is expressed at a lower level than desired.

[1100] Polynucleotide constructs are made which contain a promoter and targeting sequences, which are homologous to the 5′ non-coding sequence of endogenous polynucleotide sequence, flanking the promoter. The targeting sequence will be sufficiently near the 5′ end of the polynucleotide sequence so the promoter will be operably linked to the endogenous sequence upon homologous recombination. The promoter and the targeting sequences can be amplified using PCR. Preferably, the amplified promoter contains distinct restriction enzyme sites on the 5′ and 3′ ends. Preferably, the 3′ end of the first targeting sequence contains the same restriction enzyme site as the 5′ end of the amplified promoter and the 5′ end of the second targeting sequence contains the same restriction site as the 3′ end of the amplified promoter.

[1101] The amplified promoter and the amplified targeting sequences are digested with the appropriate restriction enzymes and subsequently treated with calf intestinal phosphatase. The digested promoter and digested targeting sequences are added together in the presence of T4 DNA ligase. The resulting mixture is maintained under conditions appropriate for ligation of the two fragments. The construct is size fractionated on an agarose gel, then purified by phenol extraction and ethanol precipitation.

[1102] In this Example, the polynucleotide constructs are administered as naked polynucleotides via electroporation. However, the polynucleotide constructs may also be administered with transfection-facilitating agents, such as liposomes, viral sequences, viral particles, precipitating agents, etc. Such methods of delivery are known in the art.

[1103] Once the cells are transfected, homologous recombination will take place which results in the promoter being operably linked to the endogenous polynucleotide sequence. This results in the expression of polynucleotide corresponding to the polynucleotide in the cell. Expression may be detected by immunological staining, or any other method known in the art.

[1104] Fibroblasts are obtained from a subject by skin biopsy. The resulting tissue is placed in DMEM+10% fetal calf serum. Exponentially growing or early stationary phase fibroblasts are trypsinized and rinsed from the plastic surface with nutrient medium. An aliquot of the cell suspension is removed for counting, and the remaining cells are subjected to centrifugation. The supernatant is aspirated and the pellet is resuspended in 5 ml of electroporation buffer (20 mM HEPES pH 7.3, 137 mM NaCl, 5 mM KCl, 0.7 mM Na₂ HPO₄, 6 mM dextrose). The cells are recentrifuged, the supernatant aspirated, and the cells resuspended in electroporation buffer containing 1 mg/ml acetylated bovine serum albumin. The final cell suspension contains approximately 3×10⁶ cells/ml. Electroporation should be performed immediately following resuspension.

[1105] Plasmid DNA is prepared according to standard techniques. For example, to construct a plasmid for targeting to the locus corresponding to the polynucleotide of the invention, plasmid pUC18 (MBI Fermentas, Amherst, N.Y.) is digested with HindIII. The CMV promoter is amplified by PCR with an XbaI site on the 5′ end and a BamHI site on the 3′ end. Two non-coding sequences are amplified via PCR: one non-coding sequence (fragment 1) is amplified with a HindIII site at the 5′ end and an Xba site at the 3′end; the other non-coding sequence (fragment 2) is amplified with a BamHI site at the 5′end and a HindIII site at the 3′end. The CMV promoter and the fragments (1 and 2) are digested with the appropriate enzymes (CMV promoter—XbaI and BamHI; fragment 1—XbaI; fragment 2—BamHI) and ligated together. The resulting ligation product is digested with HindIII, and ligated with the HindIII-digested pUC18 plasmid.

[1106] Plasmid DNA is added to a sterile cuvette with a 0.4 cm electrode gap (Bio-Rad). The final DNA concentration is generally at least 120 μg/ml. 0.5 ml of the cell suspension (containing approximately 1.5×10⁶ cells) is then added to the cuvette, and the cell suspension and DNA solutions are gently mixed. Electroporation is performed with a Gene-Pulser apparatus (Bio-Rad). Capacitance and voltage are set at 960 μF and 250-300 V, respectively. As voltage increases, cell survival decreases, but the percentage of surviving cells that stably incorporate the introduced DNA into their genome increases dramatically. Given these parameters, a pulse time of approximately 14-20 mSec should be observed.

[1107] Electroporated cells are maintained at room temperature for approximately 5 min, and the contents of the cuvette are then gently removed with a sterile transfer pipette. The cells are added directly to 10 ml of prewarmed nutrient media (DMEM with 15% calf serum) in a 10 cm dish and incubated at 37 degree C. The following day, the media is aspirated and replaced with 10 ml of fresh media and incubated for a further 16-24 hours.

[1108] The engineered fibroblasts are then injected into the host, either alone or after having been grown to confluence on cytodex 3 microcarrier beads. The fibroblasts now produce the protein product. The fibroblasts can then be introduced into a patient as described above.

### Example 18

### Method of Treatment Using Gene Therapy—In vivo

[1109] Another aspect of the present invention is using in vivo gene therapy methods to treat disorders, diseases and conditions. The gene therapy method relates to the introduction of naked nucleic acid (DNA, RNA, and antisense DNA or RNA) sequences into an animal to increase or decrease the expression of the polypeptide. The polynucleotide of the present invention may be operatively linked to (i.e., associated with) a promoter or any other genetic elements necessary for the expression of the polypeptide by the target tissue. Such gene therapy and delivery techniques and methods are known in the art, see, for example, WO90/11092, WO98/11779; U.S. Pat. Nos. 5,693,622, 5,705,151, 5,580,859; Tabata et al., Cardiovasc. Res. 35(3):470-479 (1997); Chao et al., Pharmacol. Res. 35(6):517-522 (1997); Wolff, Neuromuscul. Disord. 7(5):314-318 (1997); Schwartz et al., Gene Ther. 3(5):405-411 (1996); Tsurumi et al., Circulation 94(12):3281-3290 (1996) (incorporated herein by reference).

[1110] The polynucleotide constructs may be delivered by any method that delivers injectable materials to the cells of an animal, such as, injection into the interstitial space of tissues (heart, muscle, skin, lung, liver, intestine and the like). The polynucleotide constructs can be delivered in a pharmaceutically acceptable liquid or aqueous carrier.

[1111] The term “naked” polynucleotide, DNA or RNA, refers to sequences that are free from any delivery vehicle that acts to assist, promote, or facilitate entry into the cell, including viral sequences, viral particles, liposome formulations, lipofectin or precipitating agents and the like. However, the polynucleotides of the present invention may also be delivered in liposome formulations (such as those taught in Felgner P. L. et al. (1995) Ann. NY Acad. Sci. 772:126-139 and Abdallah B. et al. (1995) Biol. Cell 85(1):1-7) which can be prepared by methods well known to those skilled in the art.

[1112] The polynucleotide vector constructs used in the gene therapy method are preferably constructs that will not integrate into the host genome nor will they contain sequences that allow for replication. Any strong promoter known to those skilled in the art can be used for driving the expression of DNA. Unlike other gene therapy techniques, one major advantage of introducing naked nucleic acid sequences into target cells is the transitory nature of the polynucleotide synthesis in the cells. Studies have shown that non-replicating DNA sequences can be introduced into cells to provide production of the desired polypeptide for periods of up to six months.

[1113] The polynucleotide construct can be delivered to the interstitial space of tissues within an animal, including muscle, skin, brain, lung, liver, spleen, bone marrow, thymus, heart, lymph, blood, bone, cartilage, pancreas, kidney, gall bladder, stomach, intestine, testis, ovary, uterus, rectum, nervous system, eye, gland, and connective tissue. Interstitial space of the tissues comprises the intercellular fluid, mucopolysaccharide matrix among the reticular fibers of organ tissues, elastic fibers in the walls of vessels or chambers, collagen fibers of fibrous tissues, or that same matrix within connective tissue ensheathing muscle cells or in the lacunae of bone. It is similarly the space occupied by the plasma of the circulation and the lymph fluid of the lymphatic channels. Delivery to the interstitial space of muscle tissue is preferred for the reasons discussed below. They may be conveniently delivered by injection into the tissues comprising these cells. They are preferably delivered to and expressed in persistent, non-dividing cells which are differentiated, although delivery and expression may be achieved in non-differentiated or less completely differentiated cells, such as, for example, stem cells of blood or skin fibroblasts. In vivo muscle cells are particularly competent in their ability to take up and express polynucleotides.

[1114] For the naked polynucleotide injection, an effective dosage amount of DNA or RNA will be in the range of from about 0.05 g/kg body weight to about 50 mg/kg body weight. Preferably the dosage will be from about 0.005 mg/kg to about 20 mg/kg and more preferably from about 0.05 mg/kg to about 5 mg/kg. Of course, as the artisan of ordinary skill will appreciate, this dosage will vary according to the tissue site of injection. The appropriate and effective dosage of nucleic acid sequence can readily be determined by those of ordinary skill in the art and may depend on the condition being treated and the route of administration. The preferred route of administration is by the parenteral route of injection into the interstitial space of tissues. However, other parenteral routes may also be used, such as, inhalation of an aerosol formulation particularly for delivery to lungs or bronchial tissues, throat or mucous membranes of the nose. In addition, naked polynucleotide constructs can be delivered to arteries during angioplasty by the catheter used in the procedure.

[1115] The dose response effects of injected polynucleotide in muscle in vivo is determined as follows. Suitable template DNA for production of mRNA coding for polypeptide of the present invention is prepared in accordance with a standard recombinant DNA methodology. The template DNA, which may be either circular or linear, is either used as naked DNA or complexed with liposomes. The quadriceps muscles of mice are then injected with various amounts of the template DNA.

[1116] Five to six week old female and male Balb/C mice are anesthetized by intraperitoneal injection with 0.3 ml of 2.5% Avertin. A 1.5 cm incision is made on the anterior thigh, and the quadriceps muscle is directly visualized. The template DNA is injected in 0.1 ml of carrier in a 1 cc syringe through a 27 gauge needle over one minute, approximately 0.5 cm from the distal insertion site of the muscle into the knee and about 0.2 cm deep. A suture is placed over the injection site for future localization, and the skin is closed with stainless steel clips.

[1117] After an appropriate incubation time (e.g., 7 days) muscle extracts are prepared by excising the entire quadriceps. Every fifth 15 um cross-section of the individual quadriceps muscles is histochemically stained for protein expression. A time course for protein expression may be done in a similar fashion except that quadriceps from different mice are harvested at different times. Persistence of DNA in muscle following injection may be determined by Southern blot analysis after preparing total cellular DNA and HIRT supernatants from injected and control mice. The results of the above experimentation in mice can be used to extrapolate proper dosages and other treatment parameters in humans and other animals using naked DNA.

### Example 19

### Transgenic Animals

[1118] The polypeptides of the invention can also be expressed in transgenic animals. Animals of any species, including, but not limited to, mice, rats, rabbits, hamsters, guinea pigs, pigs, micro-pigs, goats, sheep, cows and non-human primates, e.g., baboons, monkeys, and chimpanzees may be used to generate transgenic animals. In a specific embodiment, techniques described herein or otherwise known in the art, are used to express polypeptides of the invention in humans, as part of a gene therapy protocol.

[1119] Any technique known in the art may be used to introduce the transgene (i.e., polynucleotides of the invention) into animals to produce the founder lines of transgenic animals. Such techniques include, but are not limited to, pronuclear microinjection (Paterson et al., Appl. Microbiol. Biotechnol. 40:691-698 (1994); Carver et al., Biotechnology (NY) 11:1263-1270 (1993); Wright et al., Biotechnology (NY) 9:830-834 (1991); and Hoppe et al., U.S. Pat. No. 4,873,191 (1989)); retrovirus mediated gene transfer into germ lines (Van der Putten et al., Proc. Natl. Acad. Sci., USA 82:6148-6152 (1985)), blastocysts or embryos; gene targeting in embryonic stem cells (Thompson et al., Cell 56:313-321 (1989)); electroporation of cells or embryos (Lo, 1983, Mol Cell. Biol. 3:1803-1814 (1983)); introduction of the polynucleotides of the invention using a gene gun (see, e.g., Ulmer et al., Science 259:1745 (1993); introducing nucleic acid constructs into embryonic pleuripotent stem cells and transferring the stem cells back into the blastocyst; and sperm-mediated gene transfer (Lavitrano et al., Cell 57:717-723 (1989); etc. For a review of such techniques, see Gordon, “Transgenic Animals,” Intl. Rev. Cytol. 115:171-229 (1989), which is incorporated by reference herein in its entirety.

[1120] Any technique known in the art may be used to produce transgenic clones containing polynucleotides of the invention, for example, nuclear transfer into enucleated oocytes of nuclei from cultured embryonic, fetal, or adult cells induced to quiescence (Campell et al., Nature 380:64-66 (1996); Wilmut et al., Nature 385:810-813 (1997)).

[1121] The present invention provides for transgenic animals that carry the transgene in all their cells, as well as animals which carry the transgene in some, but not all their cells, i.e., mosaic animals or chimeric. The transgene may be integrated as a single transgene or as multiple copies such as in concatamers, e.g., head-to-head tandems or head-to-tail tandems. The transgene may also be selectively introduced into and activated in a particular cell type by following, for example, the teaching of Lasko et al. (Lasko et al., Proc. Natl. Acad. Sci. USA 89:6232-6236 (1992)). The regulatory sequences required for such a cell-type specific activation will depend upon the particular cell type of interest, and will be apparent to those of skill in the art. When it is desired that the polynucleotide transgene be integrated into the chromosomal site of the endogenous gene, gene targeting is preferred. Briefly, when such a technique is to be utilized, vectors containing some nucleotide sequences homologous to the endogenous gene are designed for the purpose of integrating, via homologous recombination with chromosomal sequences, into and disrupting the function of the nucleotide sequence of the endogenous gene. The transgene may also be selectively introduced into a particular cell type, thus inactivating the endogenous gene in only that cell type, by following, for example, the teaching of Gu et al. (Gu et al., Science 265:103-106 (1994)). The regulatory sequences required for such a cell-type specific inactivation will depend upon the particular cell type of interest, and will be apparent to those of skill in the art.

[1122] Once transgenic animals have been generated, the expression of the recombinant gene may be assayed utilizing standard techniques. Initial screening may be accomplished by Southern blot analysis or PCR techniques to analyze animal tissues to verify that integration of the transgene has taken place. The level of mRNA expression of the transgene in the tissues of the transgenic animals may also be assessed using techniques which include, but are not limited to, Northern blot analysis of tissue samples obtained from the animal, in situ hybridization analysis, and reverse transcriptase-PCR (rt-PCR). Samples of transgenic gene-expressing tissue may also be evaluated immunocytochemically or immunohistochemically using antibodies specific for the transgene product.

[1123] Once the founder animals are produced, they may be bred, inbred, outbred, or crossbred to produce colonies of the particular animal. Examples of such breeding strategies include, but are not limited to: outbreeding of founder animals with more than one integration site in order to establish separate lines; inbreeding of separate lines in order to produce compound transgenics that express the transgene at higher levels because of the effects of additive expression of each transgene; crossing of heterozygous transgenic animals to produce animals homozygous for a given integration site in order to both augment expression and eliminate the need for screening of animals by DNA analysis; crossing of separate homozygous lines to produce compound heterozygous or homozygous lines; and breeding to place the transgene on a distinct background that is appropriate for an experimental model of interest.

[1124] Transgenic animals of the invention have uses which include, but are not limited to, animal model systems useful in elaborating the biological function of polypeptides of the present invention, studying conditions and/or disorders associated with aberrant expression, and in screening for compounds effective in ameliorating such conditions and/or disorders.

### Example 20

### Knock-Out Animals

[1125] Endogenous gene expression can also be reduced by inactivating or “knocking out” the gene and/or its promoter using targeted homologous recombination. (e.g., see Smithies et al., Nature 317:230-234 (1985); Thomas & Capecchi, Cell 51:503-512 (1987); Thompson et al., Cell 5:313-321 (1989); each of which is incorporated by reference herein in its entirety). For example, a mutant, non-functional polynucleotide of the invention (or a completely unrelated DNA sequence) flanked by DNA homologous to the endogenous polynucleotide sequence (either the coding regions or regulatory regions of the gene) can be used, with or without a selectable marker and/or a negative selectable marker, to transfect cells that express polypeptides of the invention in vivo. In another embodiment, techniques known in the art are used to generate knockouts in cells that contain, but do not express the gene of interest. Insertion of the DNA construct, via targeted homologous recombination, results in inactivation of the targeted gene. Such approaches are particularly suited in research and agricultural fields where modifications to embryonic stem cells can be used to generate animal offspring with an inactive targeted gene (e.g., see Thomas & Capecchi 1987 and Thompson 1989, supra). However this approach can be routinely adapted for use in humans provided the recombinant DNA constructs are directly administered or targeted to the required site in vivo using appropriate viral vectors that will be apparent to those of skill in the art.

[1126] In further embodiments of the invention, cells that are genetically engineered to express the polypeptides of the invention, or alternatively, that are genetically engineered not to express the polypeptides of the invention (e.g., knockouts) are administered to a patient in vivo. Such cells may be obtained from the patient (i.e., animal, including human) or an MHC compatible donor and can include, but are not limited to fibroblasts, bone marrow cells, blood cells (e.g., lymphocytes), adipocytes, muscle cells, endothelial cells etc. The cells are genetically engineered in vitro using recombinant DNA techniques to introduce the coding sequence of polypeptides of the invention into the cells, or alternatively, to disrupt the coding sequence and/or endogenous regulatory sequence associated with the polypeptides of the invention, e.g., by transduction (using viral vectors, and preferably vectors that integrate the transgene into the cell genome) or transfection procedures, including, but not limited to, the use of plasmids, cosmids, YACs, naked DNA, electroporation, liposomes, etc. The coding sequence of the polypeptides of the invention can be placed under the control of a strong constitutive or inducible promoter or promoter/enhancer to achieve expression, and preferably secretion, of the polypeptides of the invention. The engineered cells which express and preferably secrete the polypeptides of the invention can be introduced into the patient systemically, e.g., in the circulation, or intraperitoneally.

[1127] Alternatively, the cells can be incorporated into a matrix and implanted in the body, e.g., genetically engineered fibroblasts can be implanted as part of a skin graft; genetically engineered endothelial cells can be implanted as part of a lymphatic or vascular graft. (See, for example, Anderson et al. U.S. Pat. No. 5,399,349; and Mulligan & Wilson, U.S. Pat. No. 5,460,959 each of which is incorporated by reference herein in its entirety).

[1128] When the cells to be administered are non-autologous or non-MHC compatible cells, they can be administered using well known techniques which prevent the development of a host immune response against the introduced cells. For example, the cells may be introduced in an encapsulated form which, while allowing for an exchange of components with the immediate extracellular environment, does not allow the introduced cells to be recognized by the host immune system.

[1129] Transgenic and “knock-out” animals of the invention have uses which include, but are not limited to, animal model systems useful in elaborating the biological function of polypeptides of the present invention, studying conditions and/or disorders associated with aberrant expression, and in screening for compounds effective in ameliorating such conditions and/or disorders.

### Example 21

### Assays Detecting Stimulation or Inhibition of B Cell Proliferation and Differentiation

[1130] Generation of functional humoral immune responses requires both soluble and cognate signaling between B-lineage cells and their microenvironment. Signals may impart a positive stimulus that allows a B-lineage cell to continue its programmed development, or a negative stimulus that instructs the cell to arrest its current developmental pathway. To date, numerous stimulatory and inhibitory signals have been found to influence B cell responsiveness including IL-2, IL-4, IL-5, IL-6, IL-7, IL10, IL-13, IL-14 and IL-15. Interestingly, these signals are by themselves weak effectors but can, in combination with various co-stimulatory proteins, induce activation, proliferation, differentiation, homing, tolerance and death among B cell populations.

[1131] One of the best studied classes of B-cell co-stimulatory proteins is the TNF-superfamily. Within this family CD40, CD27, and CD30 along with their respective ligands CD154, CD70, and CD153 have been found to regulate a variety of immune responses. Assays which allow for the detection and/or observation of the proliferation and differentiation of these B-cell populations and their precursors are valuable tools in determining the effects various proteins may have on these B-cell populations in terms of proliferation and differentiation. Listed below are two assays designed to allow for the detection of the differentiation, proliferation, or inhibition of B-cell populations and their precursors.

[1132] In Vitro Assay—Agonists or antagonists of the invention can be assessed for its ability to induce activation, proliferation, differentiation or inhibition and/or death in B-cell populations and their precursors. The activity of the agonists or antagonists of the invention on purified human tonsillar B cells, measured qualitatively over the dose range from 0.1 to 10,000 ng/mL, is assessed in a standard B-lymphocyte co-stimulation assay in which purified tonsillar B cells are cultured in the presence of either formalin-fixed Staphylococcus aureus Cowan I (SAC) or immobilized anti-human IgM antibody as the priming agent. Second signals such as IL-2 and IL-15 synergize with SAC and IgM crosslinking to elicit B cell proliferation as measured by tritiated-thymidine incorporation. Novel synergizing agents can be readily identified using this assay. The assay involves isolating human tonsillar B cells by magnetic bead (MACS) depletion of CD3-positive cells. The resulting cell population is greater than 95% B cells as assessed by expression of CD45R(B220).

[1133] Various dilutions of each sample are placed into individual wells of a 96-well plate to which are added 10⁵ B-cells suspended in culture medium (RPMI 1640 containing 10% FBS, 5×10⁻⁵M 2ME, 100 U/ml penicillin, 10 ug/ml streptomycin, and 10⁻⁵ dilution of SAC) in a total volume of 150 ul. Proliferation or inhibition is quantitated by a 20 h pulse (1 uCi/well) with 3H-thymidine (6.7 Ci/mM) beginning 72 h post factor addition. The positive and negative controls are IL2 and medium respectively.

[1134] In vivo Assay-BALB/c mice are injected (i.p.) twice per day with buffer only, or 2 mg/Kg of agonists or antagonists of the invention, or truncated forms thereof. Mice receive this treatment for 4 consecutive days, at which time they are sacrificed and various tissues and serum collected for analyses. Comparison of H&E sections from normal spleens and spleens treated with agonists or antagonists of the invention identify the results of the activity of the agonists or antagonists on spleen cells, such as the diffusion of peri-arterial lymphatic sheaths, and/or significant increases in the nucleated cellularity of the red pulp regions, which may indicate the activation of the differentiation and proliferation of B-cell populations. Immunohistochemical studies using a B cell marker, anti-CD45R(B220), are used to determine whether any physiological changes to splenic cells, such as splenic disorganization, are due to increased B-cell representation within loosely defined B-cell zones that infiltrate established T-cell regions.

[1135] Flow cytometric analyses of the spleens from mice treated with agonist or antagonist is used to indicate whether the agonists or antagonists specifically increases the proportion of ThB+, CD45R(B220) dull B cells over that which is observed in control mice.

[1136] Likewise, a predicted consequence of increased mature B-cell representation in vivo is a relative increase in serum Ig titers. Accordingly, serum IgM and IgA levels are compared between buffer and agonists or antagonists-treated mice.

[1137] The studies described in this example tested activity of agonists or antagonists of the invention. However, one skilled in the art could easily modify the exemplified studies to test the activity of polynucleotides or polypeptides of the invention (e.g., gene therapy).

### Example 22

### T Cell Proliferation Assay

[1138] A CD3-induced proliferation assay is performed on PBMCs and is measured by the uptake of ³H-thymidine. The assay is performed as follows. Ninety-six well plates are coated with 100 μl/well of mAb to CD3 (HIT3a, Pharmingen) or isotype-matched control mAb (B33.1) overnight at 4 degrees C. (1 μg/ml in 0.05M bicarbonate buffer, pH 9.5), then washed three times with PBS. PBMC are isolated by F/H gradient centrifugation from human peripheral blood and added to quadruplicate wells (5×10⁴/well) of mAb coated plates in RPMI containing 10% FCS and P/S in the presence of varying concentrations of agonists or antagonists of the invention (total volume 200 ul). Relevant protein buffer and medium alone are controls. After 48 hr. culture at 37 degrees C., plates are spun for 2 min. at 1000 rpm and 100 μl of supernatant is removed and stored −20 degrees C. for measurement of IL-2 (or other cytokines) if effect on proliferation is observed. Wells are supplemented with 100 ul of medium containing 0.5 uCi of ³H-thymidine and cultured at 37 degrees C. for 18-24 hr. Wells are harvested and incorporation of ³H-thymidine used as a measure of proliferation. Anti-CD3 alone is the positive control for proliferation. IL-2 (100 U/ml) is also used as a control which enhances proliferation. Control antibody which does not induce proliferation of T cells is used as the negative control for the effects of agonists or antagonists of the invention.

[1139] The studies described in this example tested activity of agonists or antagonists of the invention. However, one skilled in the art could easily modify the exemplified studies to test the activity of polynucleotides or polypeptides of the invention (e.g., gene therapy).

### Example 23

### Effect of Agonists or Antagonists of the Invention on the Expression of MHC Class II, Costimulatory and Adhesion Molecules and Cell Differentiation of Monocytes and Monocyte-Derived Human Dendritic Cells

[1140] Dendritic cells are generated by the expansion of proliferating precursors found in the peripheral blood: adherent PBMC or elutriated monocytic fractions are cultured for 7-10 days with GM-CSF (50 ng/ml) and IL-4 (20 ng/ml). These dendritic cells have the characteristic phenotype of immature cells (expression of CD1, CD80, CD86, CD40 and MHC class II antigens). Treatment with activating factors, such as TNF-α, causes a rapid change in surface phenotype (increased expression of MHC class I and II, costimulatory and adhesion molecules, downregulation of FCγ RII, upregulation of CD83). These changes correlate with increased antigen-presenting capacity and with functional maturation of the dendritic cells.

[1141] FACS analysis of surface antigens is performed as follows. Cells are treated 1-3 days with increasing concentrations of agonist or antagonist of the invention or LPS (positive control), washed with PBS containing 1% BSA and 0.02 mM sodium azide, and then incubated with 1:20 dilution of appropriate FITC- or PE-labeled monoclonal antibodies for 30 minutes at 4 degrees C. After an additional wash, the labeled cells are analyzed by flow cytometry on a FACScan (Becton Dickinson).

[1142] Effect on the production of cytokines. Cytokines generated by dendritic cells, in particular IL-12, are important in the initiation of T-cell dependent immune responses. IL-12 strongly influences the development of Th1 helper T-cell immune response, and induces cytotoxic T and NK cell function. An ELISA is used to measure the IL-12 release as follows. Dendritic cells (10⁶/ml) are treated with increasing concentrations of agonists or antagonists of the invention for 24 hours. LPS (100 ng/ml) is added to the cell culture as positive control. Supernatants from the cell cultures are then collected and analyzed for IL-12 content using commercial ELISA kit (e.g., R & D Systems (Minneapolis, Minn.)). The standard protocols provided with the kits are used.

[1143] Effect on the expression of MHC Class II, costimulatory and adhesion molecules. Three major families of cell surface antigens can be identified on monocytes: adhesion molecules, molecules involved in antigen presentation, and Fc receptor. Modulation of the expression of MHC class II antigens and other costimulatory molecules, such as B7 and ICAM-1, may result in changes in the antigen presenting capacity of monocytes and ability to induce T cell activation. Increased expression of Fc receptors may correlate with improved monocyte cytotoxic activity, cytokine release and phagocytosis.

[1144] FACS analysis is used to examine the surface antigens as follows. Monocytes are treated 1-5 days with increasing concentrations of agonists or antagonists of the invention or LPS (positive control), washed with PBS containing 1% BSA and 0.02 mM sodium azide, and then incubated with 1:20 dilution of appropriate FITC- or PE-labeled monoclonal antibodies for 30 minutes at 4 degrees C. After an additional wash, the labeled cells are analyzed by flow cytometry on a FACScan (Becton Dickinson).

[1145] Monocyte activation and/or increased survival. Assays for molecules that activate (or alternatively, inactivate) monocytes and/or increase monocyte survival (or alternatively, decrease monocyte survival) are known in the art and may routinely be applied to determine whether a molecule of the invention functions as an inhibitor or activator of monocytes. Agonists or antagonists of the invention can be screened using the three assays described below. For each of these assays, Peripheral blood mononuclear cells (PBMC) are purified from single donor leukopacks (American Red Cross, Baltimore, Md.) by centrifugation through a Histopaque gradient (Sigma). Monocytes are isolated from PBMC by counterflow centrifugal elutriation.

[1146] Monocyte Survival Assay. Human peripheral blood monocytes progressively lose viability when cultured in absence of serum or other stimuli. Their death results from internally regulated processes (apoptosis). Addition to the culture of activating factors, such as TNF-alpha dramatically improves cell survival and prevents DNA fragmentation. Propidium iodide (PI) staining is used to measure apoptosis as follows. Monocytes are cultured for 48 hours in polypropylene tubes in serum-free medium (positive control), in the presence of 100 ng/ml TNF-alpha (negative control), and in the presence of varying concentrations of the compound to be tested. Cells are suspended at a concentration of 2×10⁶/ml in PBS containing PI at a final concentration of 5 μg/ml, and then incubated at room temperature for 5 minutes before FACScan analysis. PI uptake has been demonstrated to correlate with DNA fragmentation in this experimental paradigm.

[1147] Effect on cytokine release. An important function of monocytes/macrophages is their regulatory activity on other cellular populations of the immune system through the release of cytokines after stimulation. An ELISA to measure cytokine release is performed as follows. Human monocytes are incubated at a density of 5×10⁵ cells/ml with increasing concentrations of agonists or antagonists of the invention and under the same conditions, but in the absence of agonists or antagonists. For IL-12 production, the cells are primed overnight with IFN (100 U/ml) in the presence of agonist or antagonist of the invention. LPS (10 ng/ml) is then added. Conditioned media are collected after 24 h and kept frozen until use. Measurement of TNF-alpha, IL-10, MCP-1 and IL-8 is then performed using a commercially available ELISA kit (e.g., R & D Systems (Minneapolis, Minn.) and applying the standard protocols provided with the kit.

[1148] Oxidative burst. Purified monocytes are plated in 96-w plate at 2-1×10⁵ cell/well. Increasing concentrations of agonists or antagonists of the invention are added to the wells in a total volume of 0.2 ml culture medium (RPMI 1640+10% FCS, glutamine and antibiotics). After 3 days incubation, the plates are centrifuged and the medium is removed from the wells. To the macrophage monolayers, 0.2 ml per well of phenol red solution (140 mM NaCl, 10 mM potassium phosphate buffer pH 7.0, 5.5 mM dextrose, 0.56 mM phenol red and 19 U/ml of HRPO) is added, together with the stimulant (200 nM PMA). The plates are incubated at 37° C. for 2 hours and the reaction is stopped by adding 20 μl 1N NaOH per well. The absorbance is read at 610 nm. To calculate the amount of H₂O₂ produced by the macrophages, a standard curve of a H₂O₂ solution of known molarity is performed for each experiment.

[1149] The studies described in this example tested activity of agonists or antagonists of the invention. However, one skilled in the art could easily modify the exemplified studies to test the activity of polynucleotides or polypeptides of the invention (e.g., gene therapy).

### Example 24

### Biological Effects of Agonists or Antagonists of the Invention

Astrocyte and Neuronal Assays

[1150] Agonists or antagonists of the invention, expressed in Escherichia coli and purified as described above, can be tested for activity in promoting the survival, neurite outgrowth, or phenotypic differentiation of cortical neuronal cells and for inducing the proliferation of glial fibrillary acidic protein immunopositive cells, astrocytes. The selection of cortical cells for the bioassay is based on the prevalent expression of FGF-1 and FGF-2 in cortical structures and on the previously reported enhancement of cortical neuronal survival resulting from FGF-2 treatment. A thymidine incorporation assay, for example, can be used to elucidate an agonist or antagonist of the invention's activity on these cells.

[1151] Moreover, previous reports describing the biological effects of FGF-2 (basic FGF) on cortical or hippocampal neurons in vitro have demonstrated increases in both neuron survival and neurite outgrowth (Walicke et al., “Fibroblast growth factor promotes survival of dissociated hippocampal neurons and enhances neurite extension.” Proc. Natl. Acad. Sci. USA 83:3012-3016. (1986), assay herein incorporated by reference in its entirety). However, reports from experiments done on PC-12 cells suggest that these two responses are not necessarily synonymous and may depend on not only which FGF is being tested but also on which receptor(s) are expressed on the target cells. Using the primary cortical neuronal culture paradigm, the ability of an agonist or antagonist of the invention to induce neurite outgrowth can be compared to the response achieved with FGF-2 using, for example, a thymidine incorporation assay.

Fibroblast and Endothelial Cell Assays

[1152] Human lung fibroblasts are obtained from Clonetics (San Diego, Calif.) and maintained in growth media from Clonetics. Dermal microvascular endothelial cells are obtained from Cell Applications (San Diego, Calif.). For proliferation assays, the human lung fibroblasts and dermal microvascular endothelial cells can be cultured at 5,000 cells/well in a 96-well plate for one day in growth medium. The cells are then incubated for one day in 0.1% BSA basal medium. After replacing the medium with fresh 0.1% BSA medium, the cells are incubated with the test proteins for 3 days. Alamar Blue (Alamar Biosciences, Sacramento, Calif.) is added to each well to a final concentration of 10%. The cells are incubated for 4 hr. Cell viability is measured by reading in a CytoFluor fluorescence reader. For the PGE₂ assays, the human lung fibroblasts are cultured at 5,000 cells/well in a 96-well plate for one day. After a medium change to 0.1% BSA basal medium, the cells are incubated with FGF-2 or agonists or antagonists of the invention with or without IL-1α for 24 hours. The supernatants are collected and assayed for PGE₂ by EIA kit (Cayman, Ann Arbor, Mich.). For the IL-6 assays, the human lung fibroblasts are cultured at 5,000 cells/well in a 96-well plate for one day. After a medium change to 0.1% BSA basal medium, the cells are incubated with FGF-2 or with or without agonists or antagonists of the invention IL-1α for 24 hours. The supernatants are collected and assayed for IL-6 by ELISA kit (Endogen, Cambridge, Mass.).

[1153] Human lung fibroblasts are cultured with FGF-2 or agonists or antagonists of the invention for 3 days in basal medium before the addition of Alamar Blue to assess effects on growth of the fibroblasts. FGF-2 should show a stimulation at 10-2500 ng/ml which can be used to compare stimulation with agonists or antagonists of the invention.

Parkinson Models.

[1154] The loss of motor function in Parkinson's disease is attributed to a deficiency of striatal dopamine resulting from the degeneration of the nigrostriatal dopaminergic projection neurons. An animal model for Parkinson's that has been extensively characterized involves the systemic administration of 1-methyl-4 phenyl 1,2,3,6-tetrahydropyridine (MPTP). In the CNS, MPTP is taken-up by astrocytes and catabolized by monoamine oxidase B to 1-methyl-4-phenyl pyridine (MPP⁺) and released. Subsequently, MPP⁺ is actively accumulated in dopaminergic neurons by the high-affinity reuptake transporter for dopamine. MPP⁺ is then concentrated in mitochondria by the electrochemical gradient and selectively inhibits nicotidamide adenine disphosphate: ubiquinone oxidoreductionase (complex I), thereby interfering with electron transport and eventually generating oxygen radicals.

[1155] It has been demonstrated in tissue culture paradigms that FGF-2 (basic FGF) has trophic activity towards nigral dopaminergic neurons (Ferrari et al., Dev. Biol. 1989). Recently, Dr. Unsicker's group has demonstrated that administering FGF-2 in gel foam implants in the striatum results in the near complete protection of nigral dopaminergic neurons from the toxicity associated with MPTP exposure (Otto and Unsicker, J. Neuroscience, 1990).

[1156] Based on the data with FGF-2, agonists or antagonists of the invention can be evaluated to determine whether it has an action similar to that of FGF-2 in enhancing dopaminergic neuronal survival in vitro and it can also be tested in vivo for protection of dopaminergic neurons in the striatum from the damage associated with MPTP treatment. The potential effect of an agonist or antagonist of the invention is first examined in vitro in a dopaminergic neuronal cell culture paradigm. The cultures are prepared by dissecting the midbrain floor plate from gestation day 14 Wistar rat embryos. The tissue is dissociated with trypsin and seeded at a density of 200,000 cells/cm² on polyorthinine-laminin coated glass coverslips. The cells are maintained in Dulbecco's Modified Eagle's medium and F12 medium containing hormonal supplements (N1). The cultures are fixed with paraformaldehyde after 8 days in vitro and are processed for tyrosine hydroxylase, a specific marker for dopaminergic neurons, immunohistochemical staining. Dissociated cell cultures are prepared from embryonic rats. The culture medium is changed every third day and the factors are also added at that time.

[1157] Since the dopaminergic neurons are isolated from animals at gestation day 14, a developmental time which is past the stage when the dopaminergic precursor cells are proliferating, an increase in the number of tyrosine hydroxylase immunopositive neurons would represent an increase in the number of dopaminergic neurons surviving in vitro. Therefore, if an agonist or antagonist of the invention acts to prolong the survival of dopaminergic neurons, it would suggest that the agonist or antagonist may be involved in Parkinson's Disease.

[1158] The studies described in this example tested activity of agonists or antagonists of the invention. However, one skilled in the art could easily modify the exemplified studies to test the activity of polynucleotides or polypeptides of the invention (e.g., gene therapy).

### Example 25

### The Effect of Agonists or Antagonists of the Invention on the Growth of Vascular Endothelial Cells

[1159] On day 1, human umbilical vein endothelial cells (HUVEC) are seeded at 2-5×10⁴ cells/35 mm dish density in M199 medium containing 4% fetal bovine serum (FBS), 16 units/ml heparin, and 50 units/ml endothelial cell growth supplements (ECGS, Biotechnique, Inc.). On day 2, the medium is replaced with M199 containing 10% FBS, 8 units/ml heparin. An agonist or antagonist of the invention, and positive controls, such as VEGF and basic FGF (bFGF) are added, at varying concentrations. On days 4 and 6, the medium is replaced. On day 8, cell number is determined with a Coulter Counter.

[1160] An increase in the number of HUVEC cells indicates that the compound of the invention may proliferate vascular endothelial cells, while a decrease in the number of HUVEC cells indicates that the compound of the invention inhibits vascular endothelial cells.

[1161] The studies described in this example tested activity of a polypeptide of the invention. However, one skilled in the art could easily modify the exemplified studies to test the activity of polynucleotides (e.g., gene therapy), agonists, and/or antagonists of the invention.

### Example 26

### Rat Corneal Wound Healing Model

[1162] This animal model shows the effect of an agonist or antagonist of the invention on neovascularization. The experimental protocol includes:

a) Making a 1-1.5 mm long incision from the center of cornea into the stromal layer.

b) Inserting a spatula below the lip of the incision facing the outer corner of the eye.

c) Making a pocket (its base is 1-1.5 mm form the edge of the eye).

d) Positioning a pellet, containing 50 ng-5 ug of an agonist or antagonist of the invention, within the pocket.

e) Treatment with an agonist or antagonist of the invention can also be applied topically to the corneal wounds in a dosage range of 20 mg-500 mg (daily treatment for five days).

[1163] The studies described in this example tested activity of agonists or antagonists of the invention. However, one skilled in the art could easily modify the exemplified studies to test the activity of polynucleotides or polypeptides of the invention (e.g., gene therapy).

### Example 27

### Diabetic Mouse and Glucocorticoid-Impaired Wound Healing Models

Diabetic db+/db+Mouse Model.

[1164] To demonstrate that an agonist or antagonist of the invention accelerates the healing process, the genetically diabetic mouse model of wound healing is used. The full thickness wound healing model in the db+/db+mouse is a well characterized, clinically relevant and reproducible model of impaired wound healing. Healing of the diabetic wound is dependent on formation of granulation tissue and re-epithelialization rather than contraction (Gartner, M. H. et al., J. Surg. Res. 52:389 (1992); Greenhalgh, D. G. et al., Am. J. Pathol. 136:1235 (1990)).

[1165] The diabetic animals have many of the characteristic features observed in Type II diabetes mellitus. Homozygous (db+/db+) mice are obese in comparison to their normal heterozygous (db+/+m) littermates. Mutant diabetic (db+/db+) mice have a single autosomal recessive mutation on chromosome 4 (db+) (Coleman et al. Proc. Natl. Acad. Sci. USA 77:283-293 (1982)). Animals show polyphagia, polydipsia and polyuria. Mutant diabetic mice (db+/db+) have elevated blood glucose, increased or normal insulin levels, and suppressed cell-mediated immunity (Mandel et al., J. Immunol. 120:1375 (1978); Debray-Sachs, M. et al., Clin. Exp. Immunol. 51(1):1-7 (1983); Leiter et al., Am. J. of Pathol. 114:46-55 (1985)). Peripheral neuropathy, myocardial complications, and microvascular lesions, basement membrane thickening and glomerular filtration abnormalities have been described in these animals (Norido, F. et al., Exp. Neurol. 83(2):221-232 (1984); Robertson et al., Diabetes 29(1):60-67 (1980); Giacomelli et al., Lab Invest. 40(4):460-473 (1979); Coleman, D. L., Diabetes 31 (Suppl):1-6 (1982)). These homozygous diabetic mice develop hyperglycemia that is resistant to insulin analogous to human type II diabetes (Mandel et al., J. Immunol. 120:1375-1377 (1978)).

[1166] The characteristics observed in these animals suggests that healing in this model may be similar to the healing observed in human diabetes (Greenhalgh, et al., Am. J. of Pathol. 136:1235-1246 (1990)).

[1167] Genetically diabetic female C57BL/KsJ (db+/db+) mice and their non-diabetic (db+/+m) heterozygous littermates are used in this study (Jackson Laboratories). The animals are purchased at 6 weeks of age and are 8 weeks old at the beginning of the study. Animals are individually housed and received food and water ad libitum. All manipulations are performed using aseptic techniques. The experiments are conducted according to the rules and guidelines of Human Genome Sciences, Inc. Institutional Animal Care and Use Committee and the Guidelines for the Care and Use of Laboratory Animals.

[1168] Wounding protocol is performed according to previously reported methods (Tsuboi, R. and Rifkin, D. B., J. Exp. Med. 172:245-251 (1990)). Briefly, on the day of wounding, animals are anesthetized with an intraperitoneal injection of Avertin (0.01 mg/mL), 2,2,2-tribromoethanol and 2-methyl-2-butanol dissolved in deionized water. The dorsal region of the animal is shaved and the skin washed with 70% ethanol solution and iodine. The surgical area is dried with sterile gauze prior to wounding. An 8 mm full-thickness wound is then created using a Keyes tissue punch. Immediately following wounding, the surrounding skin is gently stretched to eliminate wound expansion. The wounds are left open for the duration of the experiment. Application of the treatment is given topically for 5 consecutive days commencing on the day of wounding. Prior to treatment, wounds are gently cleansed with sterile saline and gauze sponges.

[1169] Wounds are visually examined and photographed at a fixed distance at the day of surgery and at two day intervals thereafter. Wound closure is determined by daily measurement on days 1-5 and on day 8. Wounds are measured horizontally and vertically using a calibrated Jameson caliper. Wounds are considered healed if granulation tissue is no longer visible and the wound is covered by a continuous epithelium.

[1170] An agonist or antagonist of the invention is administered using at a range different doses, from 4 mg to 500 mg per wound per day for 8 days in vehicle. Vehicle control groups received 50 mL of vehicle solution.

[1171] Animals are euthanized on day 8 with an intraperitoneal injection of sodium pentobarbital (300 mg/kg). The wounds and surrounding skin are then harvested for histology and immunohistochemistry. Tissue specimens are placed in 10% neutral buffered formalin in tissue cassettes between biopsy sponges for further processing.

[1172] Three groups of 10 animals each (5 diabetic and 5 non-diabetic controls) are evaluated: 1) Vehicle placebo control, 2) untreated group, and 3) treated group.

[1173] Wound closure is analyzed by measuring the area in the vertical and horizontal axis and obtaining the total square area of the wound. Contraction is then estimated by establishing the differences between the initial wound area (day 0) and that of post treatment (day 8). The wound area on day 1 is 64 mm², the corresponding size of the dermal punch. Calculations are made using the following formula:
[Open area on day 8]−[Open area on day 1]/[Open area on day 1]

[1174] Specimens are fixed in 10% buffered formalin and paraffin embedded blocks are sectioned perpendicular to the wound surface (5 mm) and cut using a Reichert-Jung microtome. Routine hematoxylin-eosin (H&E) staining is performed on cross-sections of bisected wounds. Histologic examination of the wounds are used to assess whether the healing process and the morphologic appearance of the repaired skin is altered by treatment with an agonist or antagonist of the invention. This assessment included verification of the presence of cell accumulation, inflammatory cells, capillaries, fibroblasts, re-epithelialization and epidermal maturity (Greenhaigh, D. G. et al., Am. J. Pathol. 136:1235 (1990)). A calibrated lens micrometer is used by a blinded observer.

[1175] Tissue sections are also stained immunohistochemically with a polyclonal rabbit anti-human keratin antibody using ABC Elite detection system. Human skin is used as a positive tissue control while non-immune IgG is used as a negative control. Keratinocyte growth is determined by evaluating the extent of reepithelialization of the wound using a calibrated lens micrometer.

[1176] Proliferating cell nuclear antigen/cyclin (PCNA) in skin specimens is demonstrated by using anti-PCNA antibody (1:50) with an ABC Elite detection system. Human colon cancer served as a positive tissue control and human brain tissue is used as a negative tissue control. Each specimen included a section with omission of the primary antibody and substitution with non-immune mouse IgG. Ranking of these sections is based on the extent of proliferation on a scale of 0-8, the lower side of the scale reflecting slight proliferation to the higher side reflecting intense proliferation.

[1177] Experimental data are analyzed using an unpaired t test. A p value of <0.05 is considered significant.

Steroid Impaired Rat Model

[1178] The inhibition of wound healing by steroids has been well documented in various in vitro and in vivo systems (Wahl, Glucocorticoids and Wound healing. In: Anti-Inflammatory Steroid Action: Basic and Clinical Aspects. 280-302 (1989); Wahl et al., J. Immunol. 115: 476-481 (1975); Werb et al., J. Exp. Med. 147:1684-1694 (1978)). Glucocorticoids retard wound healing by inhibiting angiogenesis, decreasing vascular permeability (Ebert et al., An. Intern. Med 37:701-705 (1952)), fibroblast proliferation, and collagen synthesis (Beck et al., Growth Factors. 5: 295-304 (1991); Haynes et al., J. Clin. Invest. 61: 703-797 (1978)) and producing a transient reduction of circulating monocytes (Haynes et al., J. Clin. Invest. 61: 703-797 (1978); Wahl, “Glucocorticoids and wound healing”, In: Antiinflammatory Steroid Action: Basic and Clinical Aspects, Academic Press, New York, pp. 280-302 (1989)). The systemic administration of steroids to impaired wound healing is a well establish phenomenon in rats (Beck et al., Growth Factors. 5: 295-304 (1991); Haynes et al., J. Clin. Invest. 61: 703-797 (1978); Wahl, “Glucocorticoids and wound healing”, In: Antiinflammatory Steroid Action: Basic and Clinical Aspects, Academic Press, New York, pp. 280-302 (1989); Pierce et al., Proc. Natl. Acad. Sci. USA 86: 2229-2233 (1989)).

[1179] To demonstrate that an agonist or antagonist of the invention can accelerate the healing process, the effects of multiple topical applications of the agonist or antagonist on full thickness excisional skin wounds in rats in which healing has been impaired by the systemic administration of methylprednisolone is assessed.

[1180] Young adult male Sprague Dawley rats weighing 250-300 g (Charles River Laboratories) are used in this example. The animals are purchased at 8 weeks of age and are 9 weeks old at the beginning of the study. The healing response of rats is impaired by the systemic administration of methylprednisolone (17 mg/kg/rat intramuscularly) at the time of wounding. Animals are individually housed and received food and water ad libitum. All manipulations are performed using aseptic techniques. This study is conducted according to the rules and guidelines of Human Genome Sciences, Inc. Institutional Animal Care and Use Committee and the Guidelines for the Care and Use of Laboratory Animals.

[1181] The wounding protocol is followed according to section A, above. On the day of wounding, animals are anesthetized with an intramuscular injection of ketamine (50 mg/kg) and xylazine (5 mg/kg). The dorsal region of the animal is shaved and the skin washed with 70% ethanol and iodine solutions. The surgical area is dried with sterile gauze prior to wounding. An 8 mm full-thickness wound is created using a Keyes tissue punch. The wounds are left open for the duration of the experiment. Applications of the testing materials are given topically once a day for 7 consecutive days commencing on the day of wounding and subsequent to methylprednisolone administration. Prior to treatment, wounds are gently cleansed with sterile saline and gauze sponges.

[1182] Wounds are visually examined and photographed at a fixed distance at the day of wounding and at the end of treatment. Wound closure is determined by daily measurement on days 1-5 and on day 8. Wounds are measured horizontally and vertically using a calibrated Jameson caliper. Wounds are considered healed if granulation tissue is no longer visible and the wound is covered by a continuous epithelium.

[1183] The agonist or antagonist of the invention is administered using at a range different doses, from 4 mg to 500 mg per wound per day for 8 days in vehicle. Vehicle control groups received 50 mL of vehicle solution.

[1184] Animals are euthanized on day 8 with an intraperitoneal injection of sodium pentobarbital (300 mg/kg). The wounds and surrounding skin are then harvested for histology. Tissue specimens are placed in 10% neutral buffered formalin in tissue cassettes between biopsy sponges for further processing.

[1185] Three groups of 10 animals each (5 with methylprednisolone and 5 without glucocorticoid) are evaluated: 1) Untreated group 2) Vehicle placebo control 3) treated groups.

[1186] Wound closure is analyzed by measuring the area in the vertical and horizontal axis and obtaining the total area of the wound. Closure is then estimated by establishing the differences between the initial wound area (day 0) and that of post treatment (day 8). The wound area on day 1 is 64 mm², the corresponding size of the dermal punch. Calculations are made using the following formula:
[Open area on day 8]−[Open area on day 1]/[Open area on day 1]

[1187] Specimens are fixed in 10% buffered formalin and paraffin embedded blocks are sectioned perpendicular to the wound surface (5 mm) and cut using an Olympus microtome. Routine hematoxylin-eosin (H&E) staining is performed on cross-sections of bisected wounds. Histologic examination of the wounds allows assessment of whether the healing process and the morphologic appearance of the repaired skin is improved by treatment with an agonist or antagonist of the invention. A calibrated lens micrometer is used by a blinded observer to determine the distance of the wound gap.

[1188] Experimental data are analyzed using an unpaired t test. A p value of <0.05 is considered significant.

[1189] The studies described in this example tested activity of agonists or antagonists of the invention. However, one skilled in the art could easily modify the exemplified studies to test the activity of polynucleotides or polypeptides of the invention (e.g., gene therapy).

### Example 28

### Lymphadema Animal Model

[1190] The purpose of this experimental approach is to create an appropriate and consistent lymphedema model for testing the therapeutic effects of an agonist or antagonist of the invention in lymphangiogenesis and re-establishment of the lymphatic circulatory system in the rat hind limb. Effectiveness is measured by swelling volume of the affected limb, quantification of the amount of lymphatic vasculature, total blood plasma protein, and histopathology. Acute lymphedema is observed for 7-10 days. Perhaps more importantly, the chronic progress of the edema is followed for up to 3-4 weeks.

[1191] Prior to beginning surgery, blood sample is drawn for protein concentration analysis. Male rats weighing approximately ˜350 g are dosed with Pentobarbital. Subsequently, the right legs are shaved from knee to hip. The shaved area is swabbed with gauze soaked in 70% EtOH. Blood is drawn for serum total protein testing. Circumference and volumetric measurements are made prior to injecting dye into paws after marking 2 measurement levels (0.5 cm above heel, at mid-pt of dorsal paw). The intradermal dorsum of both right and left paws are injected with 0.05 ml of 1% Evan's Blue. Circumference and volumetric measurements are then made following injection of dye into paws.

[1192] Using the knee joint as a landmark, a mid-leg inguinal incision is made circumferentially allowing the femoral vessels to be located. Forceps and hemostats are used to dissect and separate the skin flaps. After locating the femoral vessels, the lymphatic vessel that runs along side and underneath the vessel(s) is located. The main lymphatic vessels in this area are then electrically coagulated or suture ligated.

[1193] Using a microscope, muscles in back of the leg (near the semitendinosis and adductors) are bluntly dissected. The popliteal lymph node is then located. The 2 proximal and 2 distal lymphatic vessels and distal blood supply of the popliteal node are then ligated by suturing. The popliteal lymph node, and any accompanying adipose tissue, is then removed by cutting connective tissues.

[1194] Care is taken to control any mild bleeding resulting from this procedure. After lymphatics are occluded, the skin flaps are sealed by using liquid skin (Vetbond) (AJ Buck). The separated skin edges are sealed to the underlying muscle tissue while leaving a gap of ˜0.5 cm around the leg. Skin also may be anchored by suturing to underlying muscle when necessary.

[1195] To avoid infection, animals are housed individually with mesh (no bedding). Recovering animals are checked daily through the optimal edematous peak, which typically occurred by day 5-7. The plateau edematous peak are then observed. To evaluate the intensity of the lymphedema, the circumference and volumes of 2 designated places on each paw before operation and daily for 7 days are measured. The effect of plasma proteins on lymphedema is determined and whether protein analysis is a useful testing perimeter is also investigated. The weights of both control and edematous limbs are evaluated at 2 places. Analysis is performed in a blind manner.

[1196] Circumference Measurements: Under brief gas anesthetic to prevent limb movement, a cloth tape is used to measure limb circumference. Measurements are done at the ankle bone and dorsal paw by 2 different people and those 2 readings are averaged. Readings are taken from both control and edematous limbs.

[1197] Volumetric Measurements: On the day of surgery, animals are anesthetized with Pentobarbital and are tested prior to surgery. For daily volumetrics animals are under brief halothane anesthetic (rapid immobilization and quick recovery), and both legs are shaved and equally marked using waterproof marker on legs. Legs are first dipped in water, then dipped into instrument to each marked level then measured by Buxco edema software (Chen/Victor). Data is recorded by one person, while the other is dipping the limb to marked area.

[1198] Blood-plasma protein measurements: Blood is drawn, spun, and serum separated prior to surgery and then at conclusion for total protein and Ca2⁺ comparison.

[1199] Limb Weight Comparison: After drawing blood, the animal is prepared for tissue collection. The limbs are amputated using a quillitine, then both experimental and control legs are cut at the ligature and weighed. A second weighing is done as the tibio-cacaneal joint is disarticulated and the foot is weighed.

[1200] Histological Preparations: The transverse muscle located behind the knee (popliteal) area is dissected and arranged in a metal mold, filled with freezeGel, dipped into cold methylbutane, placed into labeled sample bags at −80EC until sectioning. Upon sectioning, the muscle is observed under fluorescent microscopy for lymphatics.

[1201] The studies described in this example tested activity of agonists or antagonists of the invention. However, one skilled in the art could easily modify the exemplified studies to test the activity of polynucleotides or polypeptides of the invention (e.g., gene therapy).

### Example 29

### Suppression of TNF Alpha-Induced Adhesion Molecule Expression by an Agonist or Antagonist of the Invention

[1202] The recruitment of lymphocytes to areas of inflammation and angiogenesis involves specific receptor-ligand interactions between cell surface adhesion molecules (CAMs) on lymphocytes and the vascular endothelium. The adhesion process, in both normal and pathological settings, follows a multi-step cascade that involves intercellular adhesion molecule-1 (ICAM-1), vascular cell adhesion molecule-1 (VCAM-1), and endothelial leukocyte adhesion molecule-1 (E-selectin) expression on endothelial cells (EC). The expression of these molecules and others on the vascular endothelium determines the efficiency with which leukocytes may adhere to the local vasculature and extravasate into the local tissue during the development of an inflammatory response. The local concentration of cytokines and growth factor participate in the modulation of the expression of these CAMs.

[1203] Tumor necrosis factor alpha (TNF-a), a potent proinflammatory cytokine, is a stimulator of all three CAMs on endothelial cells and may be involved in a wide variety of inflammatory responses, often resulting in a pathological outcome.

[1204] The potential of an agonist or antagonist of the invention to mediate a suppression of TNF-a induced CAM expression can be examined. A modified ELISA assay which uses ECs as a solid phase absorbent is employed to measure the amount of CAM expression on TNF-a treated ECs when co-stimulated with a member of the FGF family of proteins.

[1205] To perform the experiment, human umbilical vein endothelial cell (HUVEC) cultures are obtained from pooled cord harvests and maintained in growth medium (EGM-2; Clonetics, San Diego, Calif.) supplemented with 10% FCS and 1% penicillin/streptomycin in a 37 degree C. humidified incubator containing 5% CO₂. HUVECs are seeded in 96-well plates at concentrations of 1×10⁴ cells/well in EGM medium at 37 degree C. for 18-24 hrs or until confluent. The monolayers are subsequently washed 3 times with a serum-free solution of RPMI-1640 supplemented with 100 U/ml penicillin and 100 mg/ml streptomycin, and treated with a given cytokine and/or growth factor(s) for 24 h at 37 degree C. Following incubation, the cells are then evaluated for CAM expression.

[1206] Human Umbilical Vein Endothelial cells (HUVECs) are grown in a standard 96 well plate to confluence. Growth medium is removed from the cells and replaced with 90 ul of 199 Medium (10% FBS). Samples for testing and positive or negative controls are added to the plate in triplicate (in 10 ul volumes). Plates are incubated at 37 degree C. for either 5 h (selectin and integrin expression) or 24 h (integrin expression only). Plates are aspirated to remove medium and 100 μl of 0.1% paraformaldehyde-PBS (with Ca++ and Mg++) is added to each well. Plates are held at 4° C. for 30 min.

[1207] Fixative is then removed from the wells and wells are washed 1× with PBS (+Ca,Mg)+0.5% BSA and drained. Do not allow the wells to dry. Add 10 μl of diluted primary antibody to the test and control wells. Anti-ICAM-1-Biotin, Anti-VCAM-1-Biotin and Anti-E-selectin-Biotin are used at a concentration of 10 μg/ml (1:10 dilution of 0.1 mg/ml stock antibody). Cells are incubated at 37° C. for 30 min. in a humidified environment. Wells are washed X3 with PBS (+Ca,Mg)+0.5% BSA.

[1208] Then add 20 μl of diluted ExtrAvidin-Alkaline Phosphotase (1:5,000 dilution) to each well and incubated at 37° C. for 30 min. Wells are washed X3 with PBS (+Ca,Mg)+0.5% BSA. 1 tablet of p-Nitrophenol Phosphate pNPP is dissolved in 5 ml of glycine buffer (pH 10.4). 100 μl of pNPP substrate in glycine buffer is added to each test well. Standard wells in triplicate are prepared from the working dilution of the ExtrAvidin-Alkaline Phosphotase in glycine buffer: 1:5,000 (10⁰)>10^{-0.5}>10⁻¹>10^{1.5}0.5 μl of each dilution is added to triplicate wells and the resulting AP content in each well is 5.50 ng, 1.74 ng, 0.55 ng, 0.18 ng. 100 μl of pNNP reagent must then be added to each of the standard wells. The plate must be incubated at 37° C. for 4 h. A volume of 50 μl of 3M NaOH is added to all wells. The results are quantified on a plate reader at 405 nm. The background subtraction option is used on blank wells filled with glycine buffer only. The template is set up to indicate the concentration of AP-conjugate in each standard well [5.50 ng; 1.74 ng; 0.55 ng; 0.18 ng]. Results are indicated as amount of bound AP-conjugate in each sample.

[1209] The studies described in this example tested activity of agonists or antagonists of the invention. However, one skilled in the art could easily modify the exemplified studies to test the activity of polynucleotides or polypeptides of the invention (e.g., gene therapy).

### Example 30

### Production of Polypeptide of the Invention for High-Throughput Screening Assays

[1210] The following protocol produces a supernatant containing polypeptide of the present invention to be tested. This supernatant can then be used in the Screening Assays described in Examples 32-41.

[1211] First, dilute Poly-D-Lysine (644 587 Boehringer-Mannheim) stock solution (1 mg/ml in PBS) 1:20 in PBS (w/o calcium or magnesium 17-516F Biowhittaker) for a working solution of 50 ug/ml. Add 200 ul of this solution to each well (24 well plates) and incubate at RT for 20 minutes. Be sure to distribute the solution over each well (note: a 12-channel pipetter may be used with tips on every other channel). Aspirate off the Poly-D-Lysine solution and rinse with 1 ml PBS (Phosphate Buffered Saline). The PBS should remain in the well until just prior to plating the cells and plates may be poly-lysine coated in advance for up to two weeks.

[1212] Plate 293T cells (do not carry cells past P+20) at 2×10⁵ cells/well in 0.5 ml DMEM (Dulbecco's Modified Eagle Medium)(with 4.5 G/L glucose and L-glutamine (12-604F Biowhittaker))/10% heat inactivated FBS (14-503F Biowhittaker)/1× Penstrep (17-602E Biowhittaker). Let the cells grow overnight.

[1213] The next day, mix together in a sterile solution basin: 300 ul Lipofectamine (18324-012 Gibco/BRL) and 5 ml Optimem I (31985070 Gibco/BRL)/96-well plate. With a small volume multi-channel pipetter, aliquot approximately 2 ug of an expression vector containing a polynucleotide insert, produced by the methods described in Examples 8-10, into an appropriately labeled 96-well round bottom plate. With a multi-channel pipetter, add 50 ul of the Lipofectamine/Optimem I mixture to each well. Pipette up and down gently to mix. Incubate at RT 15-45 minutes. After about 20 minutes, use a multi-channel pipetter to add 150 ul Optimem I to each well. As a control, one plate of vector DNA lacking an insert should be transfected with each set of transfections.

[1214] Preferably, the transfection should be performed by tag-teaming the following tasks. By tag-teaming, hands on time is cut in half, and the cells do not spend too much time on PBS. First, person A aspirates off the media from four 24-well plates of cells, and then person B rinses each well with 0.5-1 ml PBS. Person A then aspirates off PBS rinse, and person B, using a 12-channel pipetter with tips on every other channel, adds the 200 ul of DNA/Lipofectamine/Optimem I complex to the odd wells first, then to the even wells, to each row on the 24-well plates. Incubate at 37 degree C. for 6 hours.

[1215] While cells are incubating, prepare appropriate media, either 1% BSA in DMEM with 1× penstrep, or HGS CHO-5 media (116.6 mg/L of CaCl2 (anhyd); 0.00130 mg/L CuSO₄-5H₂O; 0.050 mg/L of Fe(NO₃)₃-9H₂O; 0.417 mg/L of FeSO₄-7H₂O; 311.80 mg/L of Kcl; 28.64 mg/L of MgCl₂; 48.84 mg/L of MgSO₄; 6995.50 mg/L of NaCl; 2400.0 mg/L of NaHCO₃; 62.50 mg/L of NaH₂PO₄—H₂O; 71.02 mg/L of Na₂HPO4; 0.4320 mg/L of ZnSO₄-7H₂O; 0.002 mg/L of Arachidonic Acid; 1.022 mg/L of Cholesterol; 0.070 mg/L of DL-alpha-Tocopherol-Acetate; 0.0520 mg/L of Linoleic Acid; 0.010 mg/L of Linolenic Acid; 0.010 mg/L of Myristic Acid; 0.010 mg/L of Oleic Acid; 0.010 mg/L of Palmitric Acid; 0.010 mg/L of Palmitic Acid; 100 mg/L of Pluronic F-68; 0.010 mg/L of Stearic Acid; 2.20 mg/L of Tween 80; 4551 mg/L of D-Glucose; 130.85 mg/ml of L-Alanine; 147.50 mg/ml of L-Arginine-HCL; 7.50 mg/ml of L-Asparagine-H₂O; 6.65 mg/ml of L-Aspartic Acid; 29.56 mg/ml of L-Cystine-2HCL-H₂O; 31.29 mg/ml of L-Cystine-2HCL; 7.35 mg/ml of L-Glutamic Acid; 365.0 mg/ml of L-Glutamine; 18.75 mg/ml of Glycine; 52.48 mg/ml of L-Histidine-HCL-H₂0; 106.97 mg/ml of L-Isoleucine; 111.45 mg/ml of L-Leucine; 163.75 mg/ml of L-Lysine HCL; 32.34 mg/ml of L-Methionine; 68.48 mg/ml of L-Phenylalainine; 40.0 mg/ml of L-Proline; 26.25 mg/ml of L-Serine; 101.05 mg/ml of L-Threonine; 19.22 mg/ml of L-Tryptophan; 91.79 mg/ml of L-Tryrosine-2Na-2H₂0; and 99.65 mg/ml of L-Valine; 0.0035 mg/L of Biotin; 3.24 mg/L of D-Ca Pantothenate; 11.78 mg/L of Choline Chloride; 4.65 mg/L of Folic Acid; 15.60 mg/L of i-Inositol; 3.02 mg/L of Niacinamide; 3.00 mg/L of Pyridoxal HCL; 0.031 mg/L of Pyridoxine HCL; 0.319 mg/L of Riboflavin; 3.17 mg/L of Thiamine HCL; 0.365 mg/L of Thymidine; 0.680 mg/L of Vitamin B₁₂; 25 mM of HEPES Buffer; 2.39 mg/L of Na Hypoxanthine; 0.105 mg/L of Lipoic Acid; 0.081 mg/L of Sodium Putrescine-2HCL; 55.0 mg/L of Sodium Pyruvate; 0.0067 mg/L of Sodium Selenite; 20 uM of Ethanolamine; 0.122 mg/L of Ferric Citrate; 41.70 mg/L of Methyl-B-Cyclodextrin complexed with Linoleic Acid; 33.33 mg/L of Methyl-B-Cyclodextrin complexed with Oleic Acid; 10 mg/L of Methyl-B-Cyclodextrin complexed with Retinal Acetate. Adjust osmolarity to 327 mOsm) with 2 mm glutamine and 1× penstrep. (BSA (81-068-3 Bayer) 100 gm dissolved in 1 L DMEM for a 10% BSA stock solution). Filter the media and collect 50 ul for endotoxin assay in 15 ml polystyrene conical.

[1216] The transfection reaction is terminated, preferably by tag-teaming, at the end of the incubation period. Person A aspirates off the transfection media, while person B adds 1.5 ml appropriate media to each well. Incubate at 37 degree C. for 45 or 72 hours depending on the media used: 1% BSA for 45 hours or CHO-5 for 72 hours.

[1217] On day four, using a 300 ul multichannel pipetter, aliquot 600 ul in one 1 ml deep well plate and the remaining supernatant into a 2 ml deep well. The supernatants from each well can then be used in the assays described in Examples 32-39.

[1218] It is specifically understood that when activity is obtained in any of the assays described below using a supernatant, the activity originates from either the polypeptide of the present invention directly (e.g., as a secreted protein) or by polypeptide of the present invention inducing expression of other proteins, which are then secreted into the supernatant. Thus, the invention further provides a method of identifying the protein in the supernatant characterized by an activity in a particular assay.

### Example 31

### Construction of GAS Reporter Construct

[1219] One signal transduction pathway involved in the differentiation and proliferation of cells is called the Jaks-STATs pathway. Activated proteins in the Jaks-STATs pathway bind to gamma activation site “GAS” elements or interferon-sensitive responsive element (“ISRE”), located in the promoter of many genes. The binding of a protein to these elements alter the expression of the associated gene.

[1220] GAS and ISRE elements are recognized by a class of transcription factors called Signal Transducers and Activators of Transcription, or “STATs.” There are six members of the STATs family. Stat1 and Stat3 are present in many cell types, as is Stat2 (as response to IFN-alpha is widespread). Stat4 is more restricted and is not in many cell types though it has been found in T helper class I, cells after treatment with IL-12. Stat5 was originally called mammary growth factor, but has been found at higher concentrations in other cells including myeloid cells. It can be activated in tissue culture cells by many cytokines.

[1221] The STATs are activated to translocate from the cytoplasm to the nucleus upon tyrosine phosphorylation by a set of kinases known as the Janus Kinase (“Jaks”) family. Jaks represent a distinct family of soluble tyrosine kinases and include Tyk2, Jak1, Jak2, and Jak3. These kinases display significant sequence similarity and are generally catalytically inactive in resting cells.

[1222] The Jaks are activated by a wide range of receptors summarized in the Table below. (Adapted from review by Schidler and Darnell, Ann. Rev. Biochem. 64:621-51 (1995)). A cytokine receptor family, capable of activating Jaks, is divided into two groups: (a) Class 1 includes receptors for IL-2, IL-3, IL-4, IL-6, IL-7, IL-9, IL-11, IL-12, IL-15, Epo, PRL, GH, G-CSF, GM-CSF, LIF, CNTF, and thrombopoietin; and (b) Class 2 includes IFN-a, IFN-g, and IL-10. The Class 1 receptors share a conserved cysteine motif (a set of four conserved cysteines and one tryptophan) and a WSXWS motif (a membrane proximal region encoding Trp-Ser-Xaa-Trp-Ser (SEQ ID NO: 2)).

[1223] Thus, on binding of a ligand to a receptor, Jaks are activated, which in turn activate STATs, which then translocate and bind to GAS elements. This entire process is encompassed in the Jaks-STATs signal transduction pathway. Therefore, activation of the Jaks-STATs pathway, reflected by the binding of the GAS or the ISRE element, can be used to indicate proteins involved in the proliferation and differentiation of cells. For example, growth factors and cytokines are known to activate the Jaks-STATs pathway (See Table below). Thus, by using GAS elements linked to reporter molecules, activators of the Jaks-STATs pathway can be identified.

| | JAKs | | | | | |
|---|---|---|---|---|---|---|
| Ligand | tyk2 | Jak1 | Jak2 | Jak3 | STATS | GAS(elements) or ISRE |
| IFN family | | | | | | |
| IFN-a/B | + | + | − | − | 1, 2, 3 | ISRE |
| IFN-g | | + | + | − | 1 | GAS (IRF1 > Lys6 > IFP) |
| Il-10 | + | ? | ? | − | 1, 3 | |
| gp130 family | | | | | | |
| IL-6 (Pleiotropic) | + | + | + | ? | 1, 3 | GAS (IRF1 > Lys6 > IFP) |
| Il-11 (Pleiotropic) | ? | + | ? | ? | 1, 3 | |
| OnM(Pleiotropic) | ? | + | + | ? | 1, 3 | |
| LIF(Pleiotropic) | ? | + | + | ? | 1, 3 | |
| CNTF(Pleiotropic) | −/+ | + | + | ? | 1, 3 | |
| G-CSF(Pleiotropic) | ? | + | ? | ? | 1, 3 | |
| IL-12(Pleiotropic) | + | − | + | + | 1, 3 | |
| g-C family | | | | | | |
| IL-2 (lymphocytes) | − | + | − | + | 1, 3, 5 | GAS |
| IL-4 (lymph/myeloid) | − | + | − | + | 6 | GAS (IRF1 = IFP >> Ly6)(IgH) |
| IL-7 (lymphocytes) | − | + | − | + | 5 | GAS |
| IL-9 (lymphocytes) | − | + | − | + | 5 | GAS |
| IL-13 (lymphocyte) | − | + | ? | ? | 6 | GAS |
| IL-15 | ? | + | ? | + | 5 | GAS |
| gp140 family | | | | | | |
| IL-3 (myeloid) | − | − | + | − | 5 | GAS (IRF1 > IFP >> Ly6) |
| IL-5 (myeloid) | − | − | + | − | 5 | GAS |
| GM-CSF (myeloid) | − | − | + | − | 5 | GAS |
| Growth hormone family | | | | | | |
| GH | ? | − | + | − | 5 | |
| PRL | ? | +/− | + | − | 1, 3, 5 | |
| EPO | ? | − | + | − | 5 | GAS(B-CAS > IRF1 = IFP >> Ly6) |
| Receptor Tyrosine Kinases | | | | | | |
| EGF | ? | + | + | − | 1, 3 | GAS (IRF1) |
| PDGF | ? | + | + | − | 1, 3 | |
| CSF-1 | ? | + | + | − | 1, 3 | GAS (not IRF1) |

[1224] To construct a synthetic GAS containing promoter element, which is used in the Biological Assays described in Example 32-33, a PCR based strategy is employed to generate a GAS-SV40 promoter sequence. The 5′ primer contains four tandem copies of the GAS binding site found in the IRF1 promoter and previously demonstrated to bind STATs upon induction with a range of cytokines (Rothman et al., Immunity 1:457-468 (1994).), although other GAS or ISRE elements can be used instead. The 5′ primer also contains 18 bp of sequence complementary to the SV40 early promoter sequence and is flanked with an XhoI site. The sequence of the 5′ primer is:

(SEQ ID NO: 3)

5′:GCGCCTCGAGATTTCCCCGAAATCTAGATTTCCCCGAAATGATTTCC
CCGAAATGATTTCCCCGAAATATCTGCCATCTCAATTAG:3′

[1225] The downstream primer is complementary to the SV40 promoter and is flanked with a Hind III site: 5′:GCGGCAAGCTTTTTGCAAAGCCTAGGC:3′ (SEQ ID NO: 4)

[1226] PCR amplification is performed using the SV40 promoter template present in the B-gal:promoter plasmid obtained from Clontech. The resulting PCR fragment is digested with XhoI/Hind III and subcloned into BLSK2-. (Stratagene.) Sequencing with forward and reverse primers confirms that the insert contains the following sequence:

(SEQ ID NO: 5)

5′:CTCGAGATTTCCCCGAAATCTAGATTTCCCCGAAATGATTTCCCCGA
AATGATTTCCCCGAAATATCTGCCATCTCAATTAGTCAGCAACCATAGTC
CCGCCCCTAACTCCGCCCATCCCGCCCCTAACTCCGCCCAGTTCCGCCCA
TTCTCCGCCCCATGGCTGACTAATTTTTTTTATTTATGCAGAGGCCGAGG
CCGCCTCGGCCTCTGAGCTATTCCAGAAGTAGTGAGGAGGCTTTTTTGGA
GGCCTAGGCTTTTGCAAAAAGCTT:3′

[1227] With this GAS promoter element linked to the SV40 promoter, a GAS:SEAP2 reporter construct is next engineered. Here, the reporter molecule is a secreted alkaline phosphatase, or “SEAP.” Clearly, however, any reporter molecule can be instead of SEAP, in this or in any of the other Examples. Well known reporter molecules that can be used instead of SEAP include chloramphenicol acetyltransferase (CAT), luciferase, alkaline phosphatase, B-galactosidase, green fluorescent protein (GFP), or any protein detectable by an antibody.

[1228] The above sequence confirmed synthetic GAS-SV40 promoter element is subcloned into the pSEAP-Promoter vector obtained from Clontech using HindIII and XhoI, effectively replacing the SV40 promoter with the amplified GAS:SV40 promoter element, to create the GAS-SEAP vector. However, this vector does not contain a neomycin, resistance gene, and therefore, is not preferred for mammalian expression systems.

[1229] Thus, in order to generate mammalian stable cell lines expressing the GAS-SEAP reporter, the GAS-SEAP cassette is removed from the GAS-SEAP vector using SalI and NotI, and inserted into a backbone vector containing the neomycin resistance gene, such as pGFP-1 (Clontech), using these restriction sites in the multiple cloning site, to create the GAS-SEAP/Neo vector. Once this vector is transfected into mammalian cells, this vector can then be used as a reporter molecule for GAS binding as described in Examples 32-33.

[1230] Other constructs can be made using the above description and replacing GAS with a different promoter sequence. For example, construction of reporter molecules containing EGR and NF-KB promoter sequences are described in Examples 34 and 35. However, many other promoters can be substituted using the protocols described in these Examples. For instance, SRE, IL-2, NFAT, or Osteocalcin promoters can be substituted, alone or in combination (e.g., GAS/NF-KB/EGR, GAS/NF-KB, Il-2/NFAT, or NF-KB/GAS). Similarly, other cell lines can be used to test reporter construct activity, such as HELA (epithelial), HUVEC (endothelial), Reh (B-cell), Saos-2 (osteoblast), HUVAC (aortic), or Cardiomyocyte.

### Example 32

### High-Throughput Screening Assay for T-cell Activity

[1231] The following protocol is used to assess T-cell activity by identifying factors, and determining whether supernate containing a polypeptide of the invention proliferates and/or differentiates T-cells. T-cell activity is assessed using the GAS/SEAP/Neo construct produced in Example 31. Thus, factors that increase SEAP activity indicate the ability to activate the Jaks-STATS signal transduction pathway. The T-cell used in this assay is Jurkat T-cells (ATCC Accession No. TIB-152), although Molt-3 cells (ATCC Accession No. CRL-1552) and Molt-4 cells (ATCC Accession No. CRL-1582) cells can also be used.

[1232] Jurkat T-cells are lymphoblastic CD4+ Th1 helper cells. In order to generate stable cell lines, approximately 2 million Jurkat cells are transfected with the GAS-SEAP/neo vector using DMRIE-C (Life Technologies)(transfection procedure described below) The transfected cells are seeded to a density of approximately 20,000 cells per well and transfectants resistant to 1 mg/ml genticin selected. Resistant colonies are expanded and then tested for their response to increasing concentrations of interferon gamma. The dose response of a selected clone is demonstrated.

[1233] Specifically, the following protocol will yield sufficient cells for 75 wells containing 200 ul of cells. Thus, it is either scaled up, or performed in multiple to generate sufficient cells for multiple 96 well plates. Jurkat cells are maintained in RPMI+10% serum with 1% Pen-Strep. Combine 2.5 mls of OPTI-MEM (Life Technologies) with 10 ug of plasmid DNA in a T25 flask. Add 2.5 ml OPTI-MEM containing 50 ul of DMRIE-C and incubate at room temperature for 15-45 mins.

[1234] During the incubation period, count cell concentration, spin down the required number of cells (10⁷ per transfection), and resuspend in OPTI-MEM to a final concentration of 10⁷ cells/ml. Then add 1 ml of 1×10⁷ cells in OPTI-MEM to T25 flask and incubate at 37 degree C. for 6 hrs. After the incubation, add 10 ml of RPMI+15% serum.

[1235] The Jurkat:GAS-SEAP stable reporter lines are maintained in RPMI+10% serum, 1 mg/ml Genticin, and 1% Pen-Strep. These cells are treated with supernatants containing polypeptide of the present invention or polypeptide of the present invention induced polypeptides as produced by the protocol described in Example 30.

[1236] On the day of treatment with the supernatant, the cells should be washed and resuspended in fresh RPMI+10% serum to a density of 500,000 cells per ml. The exact number of cells required will depend on the number of supernatants being screened. For one 96 well plate, approximately 10 million cells (for 10 plates, 100 million cells) are required.

[1237] Transfer the cells to a triangular reservoir boat, in order to dispense the cells into a 96 well dish, using a 12 channel pipette. Using a 12 channel pipette, transfer 200 ul of cells into each well (therefore adding 100,000 cells per well).

[1238] After all the plates have been seeded, 50 ul of the supernatants are transferred directly from the 96 well plate containing the supernatants into each well using a 12 channel pipette. In addition, a dose of exogenous interferon gamma (0.1, 1.0, 10 ng) is added to wells H9, H10, and H11 to serve as additional positive controls for the assay.

[1239] The 96 well dishes containing Jurkat cells treated with supernatants are placed in an incubator for 48 hrs (note: this time is variable between 48-72 hrs). 35 μl samples from each well are then transferred to an opaque 96 well plate using a 12 channel pipette. The opaque plates should be covered (using sellophene covers) and stored at −20 degree C. until SEAP assays are performed according to Example 36. The plates containing the remaining treated cells are placed at 4 degree C. and serve as a source of material for repeating the assay on a specific well if desired.

[1240] As a positive control, 100 Unit/ml interferon gamma can be used which is known to activate Jurkat T cells. Over 30 fold induction is typically observed in the positive control wells.

[1241] The above protocol may be used in the generation of both transient, as well as, stable transfected cells, which would be apparent to those of skill in the art.

### Example 33

### High-Throughput Screening Assay Identifying Myeloid Activity

[1242] The following protocol is used to assess myeloid activity of polypeptide of the present invention by determining whether polypeptide of the present invention proliferates and/or differentiates myeloid cells. Myeloid cell activity is assessed using the GAS/SEAP/Neo construct produced in Example 31. Thus, factors that increase SEAP activity indicate the ability to activate the Jaks-STATS signal transduction pathway. The myeloid cell used in this assay is U937, a pre-monocyte cell line, although TF-1, HL60, or KG1 can be used.

[1243] To transiently transfect U937 cells with the GAS/SEAP/Neo construct produced in Example 31, a DEAE-Dextran method (Kharbanda et. al., 1994, Cell Growth & Differentiation, 5:259-265) is used. First, harvest 2×10⁷ U937 cells and wash with PBS. The U937 cells are usually grown in RPMI 1640 medium containing 10% heat-inactivated fetal bovine serum (FBS) supplemented with 100 units/ml penicillin and 100 mg/ml streptomycin.

[1244] Next, suspend the cells in 1 ml of 20 mM Tris-HCl (pH 7.4) buffer containing 05 mg/ml DEAE-Dextran, 8 μg GAS-SEAP2 plasmid DNA 140 mM NaCl, 5 mM KCl, 375 uM Na₂HPO₄.7H₂O, 1 mM MgCl₂, and 675 uM CaCl₂. Incubate at 37 degrees C. for 45 min.

[1245] Wash the cells with RPMI 1640 medium containing 10% FBS and then resuspend in 10 ml complete medium and incubate at 37 degree C. for 36 hr.

[1246] The GAS-SEAP/U937 stable cells are obtained by growing the cells in 400 ug/ml G418. The G418-free medium is used for routine growth but every one to two months, the cells should be re-grown in 400 ug/ml G418 for couple of passages.

[1247] These cells are tested by harvesting 1×10⁸ cells (this is enough for ten 96-well plates assay) and wash with PBS. Suspend the cells in 200 ml above described growth medium, with a final density of 5×10⁵ cells/ml. Plate 200 ul cells per well in the 96-well plate (or 1×10⁵ cells/well).

[1248] Add 50 ul of the supernatant prepared by the protocol described in Example 30. Incubate at 37 degee C for 48 to 72 hr. As a positive control, 100 Unit/ml interferon gamma can be used which is known to activate U937 cells. Over 30 fold induction is typically observed in the positive control wells. SEAP assay the supernatant according to the protocol described in Example 36.

### Example 34

### High-Throughput Screening Assay Identifying Neuronal Activity

[1249] When cells undergo differentiation and proliferation, a group of genes are activated through many different signal transduction pathways. One of these genes, EGR1 (early growth response gene 1), is induced in various tissues and cell types upon activation. The promoter of EGR1 is responsible for such induction. Using the EGR1 promoter linked to reporter molecules, activation of cells can be assessed by polypeptide of the present invention.

[1250] Particularly, the following protocol is used to assess neuronal activity in PC12 cell lines. PC12 cells (rat phenochromocytoma cells) are known to proliferate and/or differentiate by activation with a number of mitogens, such as TPA (tetradecanoyl phorbol acetate), NGF (nerve growth factor), and EGF (epidermal growth factor). The EGR1 gene expression is activated during this treatment. Thus, by stably transfecting PC12 cells with a construct containing an EGR promoter linked to SEAP reporter, activation of PC12 cells by polypeptide of the present invention can be assessed.

[1251] The EGR/SEAP reporter construct can be assembled by the following protocol. The EGR-1 promoter sequence (−633 to +1)(Sakamoto K et al., Oncogene 6:867-871 (1991)) can be PCR amplified from human genomic DNA using the following primers:

| | |
|---|---|
| 5′ GCGCTCGAGGGATGACAGCGATAGAACCCCG | (SEQ ID NO: 6) |
| G-3′ | |
| 5′ GCGAAGCTTCGCGACTCCCCGGATCCGCCT | (SEQ ID NO: 7) |
| C-3′ | |

[1252] Using the GAS:SEAP/Neo vector produced in Example 31, EGR1 amplified product can then be inserted into this vector. Linearize the GAS:SEAP/Neo vector using restriction enzymes XhoI/HindIII, removing the GAS/SV40 stuffer. Restrict the EGR1 amplified product with these same enzymes. Ligate the vector and the EGR1 promoter.

[1253] To prepare 96 well-plates for cell culture, two mls of a coating solution (1:30 dilution of collagen type I (Upstate Biotech Inc. Cat#08-115) in 30% ethanol (filter sterilized)) is added per one 10 cm plate or 50 ml per well of the 96-well plate, and allowed to air dry for 2 hr.

[1254] PC12 cells are routinely grown in RPMI-1640 medium (Bio Whittaker) containing 10% horse serum (JRH BIOSCIENCES, Cat. # 12449-78P), 5% heat-inactivated fetal bovine serum (FBS) supplemented with 100 units/ml penicillin and 100 ug/ml streptomycin on a precoated 10 cm tissue culture dish. One to four split is done every three to four days. Cells are removed from the plates by scraping and resuspended with pipetting up and down for more than 15 times.

[1255] Transfect the EGR/SEAP/Neo construct into PC12 using the Lipofectamine protocol described in Example 30. EGR-SEAP/PC12 stable cells are obtained by growing the cells in 300 ug/ml G418. The G418-free medium is used for routine growth but every one to two months, the cells should be re-grown in 300 ug/ml G418 for couple of passages.

[1256] To assay for neuronal activity, a 10 cm plate with cells around 70 to 80% confluent is screened by removing the old medium. Wash the cells once with PBS (Phosphate buffered saline). Then starve the cells in low serum medium (RPMI-1640 containing 1% horse serum and 0.5% FBS with antibiotics) overnight.

[1257] The next morning, remove the medium and wash the cells with PBS. Scrape off the cells from the plate, suspend the cells well in 2 ml low serum medium. Count the cell number and add more low serum medium to reach final cell density as 5×10⁵ cells/ml.

[1258] Add 200 ul of the cell suspension to each well of 96-well plate (equivalent to 1×10⁵ cells/well). Add 50 ul supernatant produced by Example 30, 37 degree C. for 48 to 72 hr. As a positive control, a growth factor known to activate PC12 cells through EGR can be used, such as 50 ng/ul of Neuronal Growth Factor (NGF). Over fifty-fold induction of SEAP is typically seen in the positive control wells. SEAP assay the supernatant according to Example 36.

### Example 35

### High-Throughput Screening Assay for T-Cell Activity

[1259] NF-KB (Nuclear Factor KB) is a transcription factor activated by a wide variety of agents including the inflammatory cytokines IL-1 and TNF, CD30 and CD40, lymphotoxin-alpha and lymphotoxin-beta, by exposure to LPS or thrombin, and by expression of certain viral gene products. As a transcription factor, NF-KB regulates the expression of genes involved in immune cell activation, control of apoptosis (NF-KB appears to shield cells from apoptosis), B and T-cell development, anti-viral and antimicrobial responses, and multiple stress responses.

[1260] In non-stimulated conditions, NF-KB is retained in the cytoplasm with I-KB (Inhibitor KB). However, upon stimulation, I-KB is phosphorylated and degraded, causing NF-KB to shuttle to the nucleus, thereby activating transcription of target genes. Target genes activated by NF-KB include IL-2, IL-6, GM-CSF, ICAM-1 and class 1 MHC.

[1261] Due to its central role and ability to respond to a range of stimuli, reporter constructs utilizing the NF-KB promoter element are used to screen the supernatants produced in Example 30. Activators or inhibitors of NF-KB would be useful in treating, preventing, and/or diagnosing diseases. For example, inhibitors of NF-KB could be used to treat those diseases related to the acute or chronic activation of NF-KB, such as rheumatoid arthritis.

[1262] To construct a vector containing the NF-KB promoter element, a PCR based strategy is employed. The upstream primer contains four tandem copies of the NF-KB binding site (GGGGACTTTCCC) (SEQ ID NO: 8), 18 bp of sequence complementary to the 5′ end of the SV40 early promoter sequence, and is flanked with an XhoI site.

(SEQ ID NO: 9)

5′:GCGGCCTCGAGGGGACTTTCCCGGGGACTTTCCGGGGACTTTCCGGG
ACTTTCCATCCTGCCATCTCAATTAG:3′

[1263] The downstream primer is complementary to the 3′ end of the SV40 promoter and is flanked with a Hind III site:

| | |
|---|---|
| 5′:GCGGCAAGCTTTTTGCAAAGCCTAGGC:3′ | (SEQ ID NO: 4) |

[1264] PCR amplification is performed using the SV40 promoter template present in the pB-gal:promoter plasmid obtained from Clontech. The resulting PCR fragment is digested with XhoI and Hind III and subcloned into BLSK2-. (Stratagene) Sequencing with the T7 and T3 primers confirms the insert contains the following sequence:

(SEQ ID NO: 10)

5′:CTCGAGGGGACTTTCCCGGGGACTTTCCGGGGACTTTCCGGGACTTT
CCATCTGCCATCTCAATTAGTCAGCAACCATAGTCCCGCCCCTAACTCCG
CCCATCCCGCCCCTAACTCCGCCCAGTTCCGCCCATTCTCCGCCCCATGG
CTGACTAATTTTTTTTATTTATGCAGAGGCCGAGGCCGCCTCGGCCTCTG
AGCTATTCCAGAAGTAGTGAGGAGGCTTTTTTGGAGGCCTAGGCTTTTGC
AAAAAGCTT:3′

[1265] Next, replace the SV40 minimal promoter element present in the pSEAP2-promoter plasmid (Clontech) with this NF-KB/SV40 fragment using XhoI and HindIII. However, this vector does not contain a neomycin resistance gene, and therefore, is not preferred for mammalian expression systems.

[1266] In order to generate stable mammalian cell lines, the NF-KB/SV40/SEAP cassette is removed from the above NF-KB/SEAP vector using restriction enzymes SalI and NotI, and inserted into a vector containing neomycin resistance. Particularly, the NF-KB/SV40/SEAP cassette was inserted into pGFP-1 (Clontech), replacing the GFP gene, after restricting pGFP-1 with SalI and NotI.

[1267] Once NF-KB/SV40/SEAP/Neo vector is created, stable Jurkat T-cells are created and maintained according to the protocol described in Example 32. Similarly, the method for assaying supernatants with these stable Jurkat T-cells is also described in Example 32. As a positive control, exogenous TNF alpha (0.1, 1, 10 ng) is added to wells H9, H10, and H11, with a 5-10 fold activation typically observed.

### Example 36

### Assay for SEAP Activity

[1268] As a reporter molecule for the assays described in Examples 32-35, SEAP activity is assayed using the Tropix Phospho-light Kit (Cat. BP-400) according to the following general procedure. The Tropix Phospho-light Kit supplies the Dilution, Assay, and Reaction Buffers used below.

[1269] Prime a dispenser with the 2.5× Dilution Buffer and dispense 15 ul of 2.5× dilution buffer into Optiplates containing 35 ul of a supernatant. Seal the plates with a plastic sealer incubate at 65 degree C. for 30 min. Separate the Optiplates to avoid uneven heating.

[1270] Cool the samples to room temperature for 15 minutes. Empty the dispenser and prime with the Assay Buffer. Add 50 ml Assay Buffer and incubate at room temperature 5 min. Empty the dispenser and prime with the Reaction Buffer (see the Table below). Add 50 ul Reaction Buffer and incubate at room temperature for 20 minutes. Since the intensity of the chemiluminescent signal is time dependent, and it takes about 10 minutes to read 5 plates on a luminometer, thus one should treat 5 plates at each time and start the second set 10 minutes later.

[1271] Read the relative light unit in the luminometer. Set H12 as blank, and print the results. An increase in chemiluminescence indicates reporter activity.

Reaction Buffer Formulation:

| # of plates | Rxn buffer diluent (ml) | CSPD (ml) |
|---|---|---|
| 10 | 60 | 3 |
| 11 | 65 | 3.25 |
| 12 | 70 | 3.5 |
| 13 | 75 | 3.75 |
| 14 | 80 | 4 |
| 15 | 85 | 4.25 |
| 16 | 90 | 4.5 |
| 17 | 95 | 4.75 |
| 18 | 100 | 5 |
| 19 | 105 | 5.25 |
| 20 | 110 | 5.5 |
| 21 | 115 | 5.75 |
| 22 | 120 | 6 |
| 23 | 125 | 6.25 |
| 24 | 130 | 6.5 |
| 25 | 135 | 6.75 |
| 26 | 140 | 7 |
| 27 | 145 | 7.25 |
| 28 | 150 | 7.5 |
| 29 | 155 | 7.75 |
| 30 | 160 | 8 |
| 31 | 165 | 8.25 |
| 32 | 170 | 8.5 |
| 33 | 175 | 8.75 |
| 34 | 180 | 9 |
| 35 | 185 | 9.25 |
| 36 | 190 | 9.5 |
| 37 | 195 | 9.75 |
| 38 | 200 | 10 |
| 39 | 205 | 10.25 |
| 40 | 210 | 10.5 |
| 41 | 215 | 10.75 |
| 42 | 220 | 11 |
| 43 | 225 | 11.25 |
| 44 | 230 | 11.5 |
| 45 | 235 | 11.75 |
| 46 | 240 | 12 |
| 47 | 245 | 12.25 |
| 48 | 250 | 12.5 |
| 49 | 255 | 12.75 |
| 50 | 260 | 13 |

### Example 37

### High-Throughput Screening Assay Identifying Changes in Small Molecule Concentration and Membrane Permeability

[1272] Binding of a ligand to a receptor is known to alter intracellular levels of small molecules, such as calcium, potassium, sodium, and pH, as well as alter membrane potential. These alterations can be measured in an assay to identify supernatants which bind to receptors of a particular cell. Although the following protocol describes an assay for calcium, this protocol can easily be modified to detect changes in potassium, sodium, pH, membrane potential, or any other small molecule which is detectable by a fluorescent probe.

[1273] The following assay uses Fluorometric Imaging Plate Reader (“FLIPR”) to measure changes in fluorescent molecules (Molecular Probes) that bind small molecules. Clearly, any fluorescent molecule detecting a small molecule can be used instead of the calcium fluorescent molecule, fluo-4 (Molecular Probes, Inc.; catalog no. F-14202), used here.

[1274] For adherent cells, seed the cells at 10,000 cells/well in a Co-star black 96-well plate with clear bottom. The plate is incubated in a CO₂ incubator for 20 hours. The adherent cells are washed two times in Biotek washer with 200 ul of HBSS (Hank's Balanced Salt Solution) leaving 100 ul of buffer after the final wash.

[1275] A stock solution of 1 mg/ml fluo-4 is made in 10% pluronic acid DMSO. To load the cells with fluo-4, 50 ul of 12 ug/ml fluo-4 is added to each well. The plate is incubated at 37 degrees C. in a CO₂ incubator for 60 min. The plate is washed four times in the Biotek washer with HBSS leaving 100 ul of buffer.

[1276] For non-adherent cells, the cells are spun down from culture media. Cells are re-suspended to 2-5×10⁶ cells/ml with HBSS in a 50-ml conical tube. 4 ul of 1 mg/ml fluo-4 solution in 10% pluronic acid DMSO is added to each ml of cell suspension. The tube is then placed in a 37 degrees C. water bath for 30-60 min. The cells are washed twice with HBSS, resuspended to 1×10⁶ cells/ml, and dispensed into a microplate, 100 ul/well. The plate is centrifuged at 1000 rpm for 5 min. The plate is then washed once in Denley Cell Wash with 200 ul, followed by an aspiration step to 100 ul final volume.

[1277] For a non-cell based assay, each well contains a fluorescent molecule, such as fluo-4. The supernatant is added to the well, and a change in fluorescence is detected.

[1278] To measure the fluorescence of intracellular calcium, the FLIPR is set for the following parameters: (1) System gain is 300-800 mW; (2) Exposure time is 0.4 second; (3) Camera F/stop is F/2; (4) Excitation is 488 nm; (5) Emission is 530 nm; and (6) Sample addition is 50 ul. Increased emission at 530 nm indicates an extracellular signaling event caused by the a molecule, either polypeptide of the present invention or a molecule induced by polypeptide of the present invention, which has resulted in an increase in the intracellular Ca⁺⁺ concentration.

### Example 38

### High-Throughput Screening Assay Identifying Tyrosine Kinase Activity

[1279] The Protein Tyrosine Kinases (PTK) represent a diverse group of transmembrane and cytoplasmic kinases. Within the Receptor Protein Tyrosine Kinase RPTK) group are receptors for a range of mitogenic and metabolic growth factors including the PDGF, FGF, EGF, NGF, HGF and Insulin receptor subfamilies. In addition there are a large family of RPTKs for which the corresponding ligand is unknown. Ligands for RPTKs include mainly secreted small proteins, but also membrane-bound and extracellular matrix proteins.

[1280] Activation of RPTK by ligands involves ligand-mediated receptor dimerization, resulting in transphosphorylation of the receptor subunits and activation of the cytoplasmic tyrosine kinases. The cytoplasmic tyrosine kinases include receptor associated tyrosine kinases of the src-family (e.g., src, yes, Ick, lyn, fyn) and non-receptor linked and cytosolic protein tyrosine kinases, such as the Jak family, members of which mediate signal transduction triggered by the cytokine superfamily of receptors (e.g., the Interleukins, Interferons, GM-CSF, and Leptin).

[1281] Because of the wide range of known factors capable of stimulating tyrosine kinase activity, identifying whether polypeptide of the present invention or a molecule induced by polypeptide of the present invention is capable of activating tyrosine kinase signal transduction pathways is of interest. Therefore, the following protocol is designed to identify such molecules capable of activating the tyrosine kinase signal transduction pathways.

[1282] Seed target cells (e.g., primary keratinocytes) at a density of approximately 25,000 cells per well in a 96 well Loprodyne Silent Screen Plates purchased from Nalge Nunc (Naperville, Ill.). The plates are sterilized with two 30 minute rinses with 100% ethanol, rinsed with water and dried overnight. Some plates are coated for 2 hr with 100 ml of cell culture grade type I collagen (50 mg/ml), gelatin (2%) or polylysine (50 mg/ml), all of which can be purchased from Sigma Chemicals (St. Louis, Mo.) or 10% Matrigel purchased from Becton Dickinson (Bedford, Mass.), or calf serum, rinsed with PBS and stored at 4 degree C. Cell growth on these plates is assayed by seeding 5,000 cells/well in growth medium and indirect quantitation of cell number through use of alamarBlue as described by the manufacturer Alamar Biosciences, Inc. (Sacramento, Calif.) after 48 hr. Falcon plate covers #3071 from Becton Dickinson (Bedford, Mass.) are used to cover the Loprodyne Silent Screen Plates. Falcon Microtest III cell culture plates can also be used in some proliferation experiments.

[1283] To prepare extracts, A431 cells are seeded onto the nylon membranes of Loprodyne plates (20,000/200 ml/well) and cultured overnight in complete medium. Cells are quiesced by incubation in serum-free basal medium for 24 hr. After 5-20 minutes treatment with EGF (60 ng/ml) or 50 ul of the supernatant produced in Example 30, the medium was removed and 100 ml of extraction buffer ((20 mM HEPES pH 7.5, 0.15 M NaCl, 1% Triton X-100, 0.1% SDS, 2 mM Na3VO4, 2 mM Na4P2O7 and a cocktail of protease inhibitors (# 1836170) obtained from Boeheringer Mannheim (Indianapolis, Ind.)) is added to each well and the plate is shaken on a rotating shaker for 5 minutes at 4° C. The plate is then placed in a vacuum transfer manifold and the extract filtered through the 0.45 mm membrane bottoms of each well using house vacuum. Extracts are collected in a 96-well catch/assay plate in the bottom of the vacuum manifold and immediately placed on ice. To obtain extracts clarified by centrifugation, the content of each well, after detergent solubilization for 5 minutes, is removed and centrifuged for 15 minutes at 4 degree C. at 16,000×g.

[1284] Test the filtered extracts for levels of tyrosine kinase activity. Although many methods of detecting tyrosine kinase activity are known, one method is described here.

[1285] Generally, the tyrosine kinase activity of a supernatant is evaluated by determining its ability to phosphorylate a tyrosine residue on a specific substrate (a biotinylated peptide). Biotinylated peptides that can be used for this purpose include PSK1 (corresponding to amino acids 6-20 of the cell division kinase cdc2-p34) and PSK2 (corresponding to amino acids 1-17 of gastrin). Both peptides are substrates for a range of tyrosine kinases and are available from Boehringer Mannheim.

[1286] The tyrosine kinase reaction is set up by adding the following components in order. First, add 10 ul of 5 uM Biotinylated Peptide, then 10 ul ATP/Mg₂₊ (5 mM ATP/50 mM MgCl₂), then 10 ul of 5× Assay Buffer (40 mM imidazole hydrochloride, pH7.3, 40 mM beta-glycerophosphate, 1 mM EGTA, 100mM MgCl₂, 5 mM MnCl₂, 0.5 g/ml BSA), then 5 ul of Sodium Vanadate (1 mM), and then 5 ul of water. Mix the components gently and preincubate the reaction mix at 30 degree C. for 2 min. Initial the reaction by adding 10 ul of the control enzyme or the filtered supernatant.

[1287] The tyrosine kinase assay reaction is then terminated by adding 10 ul of 120 mm EDTA and place the reactions on ice.

[1288] Tyrosine kinase activity is determined by transferring 50 ul aliquot of reaction mixture to a microtiter plate (MTP) module and incubating at 37 degree C. for 20 min. This allows the streptavidin coated 96 well plate to associate with the biotinylated peptide. Wash the MTP module with 300 ul/well of PBS four times. Next add 75 ul of anti-phospotyrosine antibody conjugated to horse radish peroxidase (anti-P-Tyr-POD (0.5u/ml)) to each well and incubate at 37 degree C. for one hour. Wash the well as above.

[1289] Next add 100 ul of peroxidase substrate solution (Boehringer Mannheim) and incubate at room temperature for at least 5 mins (up to 30 min). Measure the absorbance of the sample at 405 nm by using ELISA reader. The level of bound peroxidase activity is quantitated using an ELISA reader and reflects the level of tyrosine kinase activity.

### Example 39

### High-Throughput Screening Assay Identifying Phosphorylation Activity

[1290] As a potential alternative and/or complement to the assay of protein tyrosine kinase activity described in Example 38, an assay which detects activation (phosphorylation) of major intracellular signal transduction intermediates can also be used. For example, as described below one particular assay can detect tyrosine phosphorylation of the Erk-1 and Erk-2 kinases. However, phosphorylation of other molecules, such as Raf, JNK, p38 MAP, Map kinase kinase (MEK), MEK kinase, Src, Muscle specific kinase (MuSK), IRAK, Tec, and Janus, as well as any other phosphoserine, phosphotyrosine, or phosphothreonine molecule, can be detected by substituting these molecules for Erk-1 or Erk-2 in the following assay.

[1291] Specifically, assay plates are made by coating the wells of a 96-well ELISA plate with 0.1 ml of protein G (1 ug/ml) for 2 hr at room temp, (RT). The plates are then rinsed with PBS and blocked with 3% BSA/PBS for 1 hr at RT. The protein G plates are then treated with 2 commercial monoclonal antibodies (10 ng/well) against Erk-1 and Erk-2 (1 hr at RT) (Santa Cruz Biotechnology). (To detect other molecules, this step can easily be modified by substituting a monoclonal antibody detecting any of the above described molecules.) After 3-5 rinses with PBS, the plates are stored at 4 degree C. until use.

[1292] A431 cells are seeded at 20,000/well in a 96-well Loprodyne filterplate and cultured overnight in growth medium. The cells are then starved for 48 hr in basal medium (DMEM) and then treated with EGF (6 ng/well) or 50 ul of the supernatants obtained in Example 30 for 5-20 minutes. The cells are then solubilized and extracts filtered directly into the assay plate.

[1293] After incubation with the extract for 1 hr at RT, the wells are again rinsed. As a positive control, a commercial preparation of MAP kinase (10 ng/well) is used in place of A431 extract. Plates are then treated with a commercial polyclonal (rabbit) antibody (1 ug/ml) which specifically recognizes the phosphorylated epitope of the Erk-1 and Erk-2 kinases (1 hr at RT). This antibody is biotinylated by standard procedures. The bound polyclonal antibody is then quantitated by successive incubations with Europium-streptavidin and Europium fluorescence enhancing reagent in the Wallac DELFIA instrument (time-resolved fluorescence). An increased fluorescent signal over background indicates a phosphorylation by polypeptide of the present invention or a molecule induced by polypeptide of the present invention.

### Example 40

### Assay for the Stimulation of Bone Marrow CD34+Cell Proliferation

[1294] This assay is based on the ability of human CD34+ to proliferate in the presence of hematopoietic growth factors and evaluates the ability of isolated polypeptides expressed in mammalian cells to stimulate proliferation of CD34+cells.

[1295] It has been previously shown that most mature precursors will respond to only a single signal. More immature precursors require at least two signals to respond. Therefore, to test the effect of polypeptides on hematopoietic activity of a wide range of progenitor cells, the assay contains a given polypeptide in the presence or absence of other hematopoietic growth factors. Isolated cells are cultured for 5 days in the presence of Stem Cell Factor (SCF) in combination with tested sample. SCF alone has a very limited effect on the proliferation of bone marrow (BM) cells, acting in such conditions only as a “survival” factor. However, combined with any factor exhibiting stimulatory effect on these cells (e.g., IL-3), SCF will cause a synergistic effect. Therefore, if the tested polypeptide has a stimulatory effect on hematopoietic progenitors, such activity can be easily detected. Since normal BM cells have a low level of cycling cells, it is likely that any inhibitory effect of a given polypeptide, or agonists or antagonists thereof, might not be detected. Accordingly, assays for an inhibitory effect on progenitors is preferably tested in cells that are first subjected to in vitro stimulation with SCF+IL+3, and then contacted with the compound that is being evaluated for inhibition of such induced proliferation.

[1296] Briefly, CD34+cells are isolated using methods known in the art. The cells are thawed and resuspended in medium (QBSF 60 serum-free medium with 1% L-glutamine (500 ml) Quality Biological, Inc., Gaithersburg, Md. Cat# 160-204-101). After several gentle centrifugation steps at 200×g, cells are allowed to rest for one hour. The cell count is adjusted to 2.5×10⁵ cells/ml. During this time, 100 μl of sterile water is added to the peripheral wells of a 96-well plate. The cytokines that can be tested with a given polypeptide in this assay is rhSCF (R&D Systems, Minneapolis, Minn., Cat# 255-SC) at 50 ng/ml alone and in combination with rhSCF and rhIL-3 (R&D Systems, Minneapolis, Minn., Cat# 203-ML) at 30 ng/ml. After one hour, 10 μl of prepared cytokines, 50 μl of the supernatants prepared in Example 30 (supernatants at 1:2 dilution=50 μl) and 20 μl of diluted cells are added to the media which is already present in the wells to allow for a final total volume of 100 μl. The plates are then placed in a 37° C./5% CO₂ incubator for five days.

[1297] Eighteen hours before the assay is harvested, 0.5 μCi/well of [3H] Thymidine is added in a 10 μl volume to each well to determine the proliferation rate. The experiment is terminated by harvesting the cells from each 96-well plate to a filtermat using the Tomtec Harvester 96. After harvesting, the filtermats are dried, trimmed and placed into OmniFilter assemblies consisting of one OmniFilter plate and one OmniFilter Tray. 60 μl Microscint is added to each well and the plate sealed with TopSeal-A press-on sealing film A bar code 15 sticker is affixed to the first plate for counting. The sealed plates are then loaded and the level of radioactivity determined via the Packard Top Count and the printed data collected for analysis. The level of radioactivity reflects the amount of cell proliferation.

[1298] The studies described in this example test the activity of a given polypeptide to stimulate bone marrow CD34+ cell proliferation. One skilled in the art could easily modify the exemplified studies to test the activity of polynucleotides (e.g., gene therapy), antibodies, agonists, and/or antagonists and fragments and variants thereof. As a nonlimiting example, potential antagonists tested in this assay would be expected to inhibit cell proliferation in the presence of cytokines and/or to increase the inhibition of cell proliferation in the presence of cytokines and a given polypeptide. In contrast, potential agonists tested in this assay would be expected to enhance cell proliferation and/or to decrease the inhibition of cell proliferation in the presence of cytokines and a given polypeptide.

[1299] The ability of a gene to stimulate the proliferation of bone marrow CD34+ cells indicates that polynucleotides and polypeptides corresponding to the gene are useful for the diagnosis and treatment of disorders affecting the immune system and hematopoiesis. Representative uses are described in the “Immune Activity” and “Infectious Disease” sections above, and elsewhere herein.

### Example 41

### Assay for Extracellular Matrix Enhanced Cell Response (EMECR)

[1300] The objective of the Extracellular Matrix Enhanced Cell Response (EMECR) assay is to identify gene products (e.g., isolated polypeptides) that act on the hematopoietic stem cells in the context of the extracellular matrix (ECM) induced signal.

[1301] Cells respond to the regulatory factors in the context of signal(s) received from the surrounding microenvironment. For example, fibroblasts, and endothelial and epithelial stem cells fail to replicate in the absence of signals from the ECM. Hematopoietic stem cells can undergo self-renewal in the bone marrow, but not in in vitro suspension culture. The ability of stem cells to undergo self-renewal in vitro is dependent upon their interaction with the stromal cells and the ECM protein fibronectin (fn). Adhesion of cells to fn is mediated by the α₅.β₁ and α₄.β₁ integrin receptors, which are expressed by human and mouse hematopoietic stem cells. The factor(s) which integrate with the ECM environment and are responsible for stimulating stem cell self-renewal havea not vet been identified. Discovery of such factors should be of great interest in gene therapy and bone marrow transplant applications

[1302] Briefly, polystyrene, non tissue culture treated, 96-well plates are coated with fn fragment at a coating concentration of 0.2 μg/cm². Mouse bone marrow cells are plated (1,000 cells/well) in 0.2 ml of serum-free medium. Cells cultured in the presence of IL-3 (5 ng/ml)+SCF (50 ng/ml) would serve as the positive control, conditions under which little self-renewal but pronounced differentiation of the stem cells is to be expected. Gene products of the invention (e.g., including, but not limited to, polynucleotides and polypeptides of the present invention, and supernatants produced in Example 30), are tested with appropriate negative controls in the presence and absence of SCF (5.0 ng/ml), where test factor supernatants represent 10% of the total assay volume. The plated cells are then allowed to grow by incubating in a low oxygen environment (5% CO₂, 7% O₂, and 88% N₂) tissue culture incubator for 7 days. The number of proliferating cells within the wells is then quantitated by measuring thymidine incorporation into cellular DNA. Verification of the positive hits in the assay will require phenotypic characterization of the cells, which can be accomplished by scaling up of the culture system and using appropriate antibody reagents against cell surface antigens and FACScan.

[1303] One skilled in the art could easily modify the exemplified studies to test the activity of polynucleotides (e.g., gene therapy), antibodies, agonists, and/or antagonists and fragments and variants thereof.

[1304] If a particular polypeptide of the present invention is found to be a stimulator of hematopoietic progenitors, polynucleotides and polypeptides corresponding to the gene encoding said polypeptide may be useful for the diagnosis and treatment of disorders affecting the immune system and hematopoiesis. Representative uses are described in the “Immune Activity” and “Infectious Disease” sections above, and elsewhere herein. The gene product may also be useful in the expansion of stem cells and committed progenitors of various blood lineages, and in the differentiation and/or proliferation of various cell types.

[1305] Additionally, the polynucleotides and/or polypeptides of the gene of interest and/or agonists and/or antagonists thereof, may also be employed to inhibit the proliferation and differentiation of hematopoietic cells and therefore may be employed to protect bone marrow stem cells from chemotherapeutic agents during chemotherapy. This antiproliferative effect may allow administration of higher doses of chemotherapeutic agents and, therefore, more effective chemotherapeutic treatment.

[1306] Moreover, polynucleotides and polypeptides corresponding to the gene of interest may also be useful for the treatment and diagnosis of hematopoietic related disorders such as, for example, anemia, pancytopenia, leukopenia, thrombocytopenia or leukemia since stromal cells are important in the production of cells of hematopoietic lineages. The uses include bone marrow cell ex-vivo culture, bone marrow transplantation, bone marrow reconstitution, radiotherapy or chemotherapy of neoplasia.

### Example 42

### Human Dermal Fibroblast and Aortic Smooth Muscle Cell Proliferation

[1307] The polypeptide of interest is added to cultures of normal human dermal fibroblasts (NHDF) and human aortic smooth muscle cells (AoSMC) and two co-assays are performed with each sample. The first assay examines the effect of the polypeptide of interest on the proliferation of normal human dermal fibroblasts (NHDF) or aortic smooth muscle cells (AoSMC). Aberrant growth of fibroblasts or smooth muscle cells is a part of several pathological processes, including fibrosis, and restenosis. The second assay examines IL6 production by both NHDF and SMC. IL6 production is an indication of functional activation. Activated cells will have increased production of a number of cytokines and other factors, which can result in a proinflammatory or immunomodulatory outcome. Assays are run with and without co-TNFa stimulation, in order to check for costimulatory or inhibitory activity.

[1308] Briefly, on day 1, 96-well black plates are set up with 1000 cells/well (NHDF) or 2000 cells/well (AoSMC) in 100 μl culture media. NHDF culture media contains: Clonetics FB basal media, 1 mg/ml hFGF, 5 mg/ml insulin, 50 mg/ml gentamycin, 2% FBS, while AoSMC culture media contains Clonetics SM basal media, 0.5 μg/ml hEGF, 5 mg/ml insulin, 1 μg/ml hFGF, 50 mg/ml gentamycin, 50 μg/ml Amphotericin B, 5% FBS. After incubation at 37° C. for at least 4-5 hours culture media is aspirated and replaced with growth arrest media. Growth arrest media for NHDF contains fibroblast basal media, 50 mg/ml gentamycin, 2% FBS, while growth arrest media for AoSMC contains SM basal media, 50 mg/ml gentamycin, 50 μg/ml Amphotericin B, 0.4% FBS. Incubate at 37° C. until day 2.

[1309] On day 2, serial dilutions and templates of the polypeptide of interest are designed such that they always include media controls and known-protein controls. For both stimulation and inhibition experiments, proteins are diluted in growth arrest media. For inhibition experiments, TNFa is added to a final concentration of 2 ng/ml (NHDF) or 5 ng/ml (AoSMC). Add ⅓ vol media containing controls or polypeptides of the present invention and incubate at 37 degrees C./5% CO₂ until day 5.

[1310] Transfer 60 μl from each well to another labeled 96-well plate, cover with a plate-sealer, and store at 4 degrees C. until Day 6 (for IL6 ELISA). To the remaining 100 μl in the cell culture plate, aseptically add Alamar Blue in an amount equal to 10% of the culture volume (10 μl). Return plates to incubator for 3 to 4 hours. Then measure fluorescence with excitation at 530 nm and emission at 590 nm using the CytoFluor. This yields the growth stimulation/inhibition data.

[1311] On day 5, the IL6 ELISA is performed by coating a 96 well plate with 50-100 ul/well of Anti-Human IL6 Monoclonal antibody diluted in PBS, pH 7.4, incubate ON at room temperature.

[1312] On day 6, empty the plates into the sink and blot on paper towels. Prepare Assay Buffer containing PBS with 4% BSA. Block the plates with 200 μl/well of Pierce Super Block blocking buffer in PBS for 1-2 hr and then wash plates with wash buffer (PBS, 0.05% Tween-20). Blot plates on paper towels. Then add 50 μl/well of diluted Anti-Human IL-6 Monoclonal, Biotin-labeled antibody at 0.50 mg/ml. Make dilutions of IL-6 stock in media (30, 10, 3, 1, 0.3, 0 ng/ml). Add duplicate samples to top row of plate. Cover the plates and incubate for 2 hours at RT on shaker.

[1313] Plates are washed with wash buffer and blotted on paper towels. Dilute EU-labeled Streptavidin 1:1000 in Assay buffer, and add 100 μl/well. Cover the plate and incubate 1 h at RT. Plates are again washed with wash buffer and blotted on paper towels.

[1314] Add 100 μl/well of Enhancement Solution. Shake for 5 minutes. Read the plate on the Wallac DELFIA Fluorometer. Readings from triplicate samples in each assay were tabulated and averaged.

[1315] A positive result in this assay suggests AoSMC cell proliferation and that the polypeptide of the present invention may be involved in dermal fibroblast proliferation and/or smooth muscle cell proliferation. A positive result also suggests many potential uses of polypeptides, polynucleotides, agonists and/or antagonists of the polynucleotide/polypeptide of the present invention which gives a positive result. For example, inflammation and immune responses, wound healing, and angiogenesis, as detailed throughout this specification. Particularly, polypeptides of the present invention and polynucleotides of the present invention may be used in wound healing and dermal regeneration, as well as the promotion of vasculogenesis, both of the blood vessels and lymphatics. The growth of vessels can be used in the treatment of, for example, cardiovascular diseases. Additionally, antagonists of polypeptides and polynucleotides of the invention may be useful in treating diseases, disorders, and/or conditions which involve angiogenesis by acting as an anti-vascular agent (e.g., anti-angiogenesis). These diseases, disorders, and/or conditions are known in the art and/or are described herein, such as, for example, malignancies, solid tumors, benign tumors, for example hemangiomas, acoustic neuromas, neurofibromas, trachomas, and pyogenic granulomas; artheroscleric plaques; ocular angiogenic diseases, for example, diabetic retinopathy, retinopathy of prematurity, macular degeneration, corneal graft rejection, neovascular glaucoma, retrolental fibroplasia, rubeosis, retinoblastoma, uvietis and Pterygia (abnormal blood vessel growth) of the eye; rheumatoid arthritis; psoriasis; delayed wound healing; endometriosis; vasculogenesis; granulations; hypertrophic scars (keloids); nonunion fractures; scleroderma; trachoma; vascular adhesions; myocardial angiogenesis; coronary collaterals; cerebral collaterals; arteriovenous malformations; ischemic limb angiogenesis; Osler-Webber Syndrome; plaque neovascularization; telangiectasia; hemophiliac joints; angiofibroma; fibromuscular dysplasia; wound granulation; Crohn's disease; and atherosclerosis. Moreover, antagonists of polypeptides and polynucleotides of the invention may be useful in treating anti-hyperproliferative diseases and/or anti-inflammatory known in the art and/or described herein.

[1316] One skilled in the art could easily modify the exemplified studies to test the activity of polynucleotides (e.g., gene therapy), antibodies, agonists, and/or antagonists and fragments and variants thereof.

### Example 43

### Cellular Adhesion Molecule (CAM) Expression on Endothelial Cells

[1317] The recruitment of lymphocytes to areas of inflammation and angiogenesis involves specific receptor-ligand interactions between cell surface adhesion molecules (CAMs) on lymphocytes and the vascular endothelium. The adhesion process, in both normal and pathological settings, follows a multi-step cascade that involves intercellular adhesion molecule-1 (ICAM-1), vascular cell adhesion molecule-1 (VCAM-1), and endothelial leukocyte adhesion molecule-1 (E-selectin) expression on endothelial cells (EC). The expression of these molecules and others on the vascular endothelium determines the efficiency with which leukocytes may adhere to the local vasculature and extravasate into the local tissue during the development of an inflammatory response. The local concentration of cytokines and growth factor participate in the modulation of the expression of these CAMs.

[1318] Briefly, endothelial cells (e.g., Human Umbilical Vein Endothelial cells (HUVECs)) are grown in a standard 96 well plate to confluence, growth medium is removed from the cells and replaced with 100 μl of 199 Medium (10% fetal bovine serum (FBS)). Samples for testing and positive or negative controls are added to the plate in triplicate (in 10 μl volumes). Plates are then incubated at 37° C. for either 5 h (selectin and integrin expression) or 24 h (integrin expression only). Plates are aspirated to remove medium and 100 μl of 0.1% paraformaldehyde-PBS (with Ca++ and Mg++) is added to each well. Plates are held at 4° C. for 30 min. Fixative is removed from the wells and wells are washed 1× with PBS (+Ca,Mg)+0.5% BSA and drained. 10 μl of diluted primary antibody is added to the test and control wells. Anti-ICAM-1-Biotin, Anti-VCAM-1-Biotin and Anti-E-selectin-Biotin are used at a concentration of 10 μg/ml (1:10 dilution of 0.1 mg/ml stock antibody). Cells are incubated at 37° C. for 30 min. in a humidified environment. Wells are washed three times with PBS (+Ca,Mg)+0.5% BSA. 20 μl of diluted ExtrAvidin-Alkaline Phosphatase (1:5,000 dilution, referred to herein as the working dilution) are added to each well and incubated at 37° C. for 30 min. Wells are washed three times with PBS (+Ca,Mg)+0.5% BSA. Dissolve 1 tablet of p-Nitrophenol Phosphate pNPP per 5 ml of glycine buffer (pH 10.4). 100 μl of pNPP substrate in glycine buffer is added to each test well. Standard wells in triplicate are prepared from the working dilution of the ExtrAvidin-Alkaline Phosphotase in glycine buffer: 1:5,000 (10⁰)>10^{-0.5}>10⁻¹>10^{-1.5}0.5 ul of each dilution is added to triplicate wells and the resulting AP content in each well is 5.50 ng, 1.74 ng, 0.55 ng, 0.18 ng. 100 μl of pNNP reagent is then added to each of the standard wells. The plate is incubated at 37° C. for 4 h. A volume of 50 μl of 3M NaOH is added to all wells. The plate is read on a plate reader at 405 nm using the background subtraction option on blank wells filled with glycine buffer only. Additionally, the template is set up to indicate the concentration of AP-conjugate in each standard well [5.50 ng; 1.74 ng; 0.55 ng; 0.18 ng]. Results are indicated as amount of bound AP-conjugate in each sample.

### Example 44

### Alamar Blue Endothelial Cells Proliferation Assay

[1319] This assay may be used to quantitatively determine protein mediated inhibition of bFGF-induced proliferation of Bovine Lymphatic Endothelial Cells (LECs), Bovine Aortic Endothelial Cells (BAECs) or Human Microvascular Uterine Myometrial Cells (UTMECs). This assay incorporates a fluorometric growth indicator based on detection of metabolic activity. A standard Alamar Blue Proliferation Assay is prepared in EGM-2MV with 10 ng/ml of bFGF added as a source of endothelial cell stimulation. This assay may be used with a variety of endothelial cells with slight changes in growth medium and cell concentration. Dilutions of the protein batches to be tested are diluted as appropriate. Serum-free medium (GIBCO SFM) without bFGF is used as a non-stimulated control and Angiostatin or TSP-1 are included as a known inhibitory controls.

[1320] Briefly, LEC, BAECs or UTMECs are seeded in growth media at a density of 5000 to 2000 cells/well in a 96 well plate and placed at 37 degreesC overnight. After the overnight incubation of the cells, the growth media is removed and replaced with GIBCO EC-SFM. The cells are treated with the appropriate dilutions of the protein of interest or control protein sample(s) (prepared in SFM) in triplicate wells with additional bFGF to a concentration of 10 ng/ml. Once the cells have been treated with the samples, the plate(s) is/are placed back in the 37° C. incubator for three days. After three days 10 ml of stock alamar blue (Biosource Cat# DAL1100) is added to each well and the plate(s) is/are placed back in the 37° C. incubator for four hours. The plate(s) are then read at 530 nm excitation and 590 nm emission using the CytoFluor fluorescence reader. Direct output is recorded in relative fluorescence units.

[1321] Alamar blue is an oxidation-reduction indicator that both fluoresces and changes color in response to chemical reduction of growth medium resulting from cell growth. As cells grow in culture, innate metabolic activity results in a chemical reduction of the immediate surrounding environment. Reduction related to growth causes the indicator to change from oxidized (non-fluorescent blue) form to reduced (fluorescent red) form (i.e., stimulated proliferation will produce a stronger signal and inhibited proliferation will produce a weaker signal and the total signal is proportional to the total number of cells as well as their metabolic activity). The background level of activity is observed with the starvation medium alone. This is compared to the output observed from the positive control samples (bFGF in growth medium) and protein dilutions.

### Example 45

### Detection of Inhibition of a Mixed Lymphocyte Reaction

[1322] This assay can be used to detect and evaluate inhibition of a Mixed Lymphocyte Reaction (MLR) by gene products (e.g., isolated polypeptides). Inhibition of a MLR may be due to a direct effect on cell proliferation and viability, modulation of costimulatory molecules on interacting cells, modulation of adhesiveness between lymphocytes and accessory cells, or modulation of cytokine production by accessory cells. Multiple cells may be targeted by these polypeptides since the peripheral blood mononuclear fraction used in this assay includes T, B and natural killer lymphocytes, as well as monocytes and dendritic cells.

[1323] Polypeptides of interest found to inhibit the MLR may find application in diseases associated with lymphocyte and monocyte activation or proliferation. These include, but are not limited to, diseases such as asthma, arthritis, diabetes, inflammatory skin conditions, psoriasis, eczema, systemic lupus erythematosus, multiple sclerosis, glomerulonephritis, inflammatory bowel disease, crohn's disease, ulcerative colitis, arteriosclerosis, cirrhosis, graft vs. host disease, host vs. graft disease, hepatitis, leukemia and lymphoma.

[1324] Briefly, PBMCs from human donors are purified by density gradient centrifugation using Lymphocyte Separation Medium (LSM®, density 1.0770 g/ml, Organon Teknika Corporation, West Chester, Pa.). PBMCs from two donors are adjusted to 2×10⁶ cells/ml in RPMI-1640 (Life Technologies, Grand Island, N.Y.) supplemented with 10% FCS and 2 mM glutamine. PBMCs from a third donor is adjusted to 2×10⁵ cells/ml. Fifty microliters of PBMCs from each donor is added to wells of a 96-well round bottom microtiter plate. Dilutions of test materials (50 μl) is added in triplicate to microtiter wells. Test samples (of the protein of interest) are added for final dilution of 1:4; rhuIL-2 (R&D Systems, Minneapolis, Minn., catalog number 202-IL) is added to a final concentration of 1 μg/ml; anti-CD4 mAb (R&D Systems, clone 34930.11, catalog number MAB379) is added to a final concentration of 10 μg/ml. Cells are cultured for 7-8 days at 37° C. in 5% CO₂, and 1 μC of [³H] thymidine is added to wells for the last 16 hrs of culture. Cells are harvested and thymidine incorporation determined using a Packard TopCount. Data is expressed as the mean and standard deviation of triplicate determinations.

[1325] Samples of the protein of interest are screened in separate experiments and compared to the negative control treatment, anti-CD4 mAb, which inhibits proliferation of lymphocytes and the positive control treatment, IL-2 (either as recombinant material or supernatant), which enhances proliferation of lymphocytes.

[1326] One skilled in the art could easily modify the exemplified studies to test the activity of polynucleotides (e.g., gene therapy), antibodies, agonists, and/or antagonists and fragments and variants thereof.

### Example 46

### Assays for Protease Activity

[1327] The following assay may be used to assess protease activity of the polypeptides of the invention.

[1328] Gelatin and casein zymography are performed essentially as described (Heusen et al., Anal. Biochem., 102:196-202 (1980); Wilson et al., Journal of Urology, 149:653-658 (1993)). Samples are run on 10% polyacryamide/0.1% SDS gels containing 1% gelain orcasein, soaked in 2.5% triton at room temperature for 1 hour, and in 0.1M glycine, pH 8.3 at 37° C. 5 to 16 hours. After staining in amido black areas of proteolysis apear as clear areas agains the blue-black background. Trypsin (Sigma T8642) is used as a positive control.

[1329] Protease activity is al so determined by monitoring the cleavage of n-a-benzoyl-L-arginine ethyl ester (BAEE) (Sigma B-4500. Reactions are set up in (25 mMNaPO₄, 1 mM EDTA, and 1 mM BAEE), pH 7.5. Samples are added and the change in adsorbance at 260 nm is monitored on the Beckman DU-6 spectrophotometer in the time-drive mode. Trypsin is used as a positive control.

[1330] Additional assays based upon the release of acid-soluble peptides from casein or hemoglobin measured as adsorbance at 280 nm or calorimetrically using the Folin method are performed as described in Bergmeyer, et al., Methods of Enzymatic Analysis, 5 (1984). Other assays involve the solubilization of chromogenic substrates (Ward, Applied Science, 251-317 (1983)).

### Example 47

### Identifying Serine Protease Substrate Specificity

[1331] Methods known in the art or described herein may be used to determine the substrate specificity of the polypeptides of the present invention having serine protease activity. A preferred method of determining substrate specificity is by the use of positional scanning synthetic combinatorial libraries as described in GB 2 324 529 (incorporated herein in its entirety).

### Example 48

### Ligand Binding Assays

[1332] The following assay may be used to assess ligand binding activity of the polypeptides of the invention.

[1333] Ligand binding assays provide a direct method for ascertaining receptor pharmacology and are adaptable to a high throughput format. The purified ligand for a polypeptide is radiolabeled to high specific activity (50-2000 Ci/mmol) for binding studies. A determination is then made that the process of radiolabeling does not diminish the activity of the ligand towards its polypeptide. Assay conditions for buffers, ions, pH and other modulators such as nucleotides are optimized to establish a workable signal to noise ratio for both membrane and whole cell polypeptide sources. For these assays, specific polypeptide binding is defined as total associated radioactivity minus the radioactivity measured in the presence of an excess of unlabeled competing ligand. Where possible, more than one competing ligand is used to define residual nonspecific binding.

### Example 49

### Functional Assay in Xenopus Oocytes

[1334] Capped RNA transcripts from linearized plasmid templates encoding the polypeptides of the invention are synthesized in vitro with RNA polymerases in accordance with standard procedures. In vitro transcripts are suspended in water at a final concentration of 0.2 mg/ml. Ovarian lobes are removed from adult female toads, Stage V defolliculated oocytes are obtained, and RNA transcripts (10 ng/oocytc) are injected in a 50 nl bolus using a microinjection apparatus. Two electrode voltage clamps are used to measure the currents from individual Xenopus oocytes in response polypeptides and polypeptide agonist exposure. Recordings are made in Ca2+ free Barth's medium at room temperature. The Xenopus system can be used to screen known ligands and tissue/cell extracts for activating ligands.

### Example 50

### Microphysiometric Assays

[1335] Activation of a wide variety of secondary messenger systems results in extrusion of small amounts of acid from a cell. The acid formed is largely as a result of the increased metabolic activity required to fuel the intracellular signaling process. The pH changes in the media surrounding the cell are very small but are detectable by the CYTOSENSOR microphysiometer (Molecular Devices Ltd., Menlo Park, Calif.). The CYTOSENSOR is thus capable of detecting the activation of polypeptide which is coupled to an energy utilizing intracellular signaling pathway.

### Example 51

### Extract/Cell Supernatant Screening

[1336] A large number of mammalian receptors exist for which there remains, as yet, no cognate activating ligand (agonist). Thus, active ligands for these receptors may not be included within the ligands banks as identified to date. Accordingly, the polypeptides of the invention can also be functionally screened (using calcium, cAMP, microphysiometer, oocyte electrophysiology, etc., functional screens) against tissue extracts to identify its natural ligands. Extracts that produce positive functional responses can be sequentially subfractionated until an activating ligand is isolated and identified.

### Example 52

### Calcium and cAMP Functional Assays

[1337] Seven transmembrane receptors which are expressed in HEK 293 cells have been shown to be coupled functionally to activation of PLC and calcium mobilization and/or cAMP stimulation or inhibition. Basal calcium levels in the HEK 293 cells in receptor-transfected or vector control cells were observed to be in the normal, 100 nM to 200 nM, range. HEK 293 cells expressing recombinant receptors are loaded with fura 2 and in a single day >150 selected ligands or tissue/cell extracts are evaluated for agonist induced calcium mobilization. Similarly, HEK 293 cells expressing recombinant receptors are evaluated for the stimulation or inhibition of cAMP production using standard cAMP quantitation assays. Agonists presenting a calcium transient or cAMP fluctuation are tested in vector control cells to determine if the response is unique to the transfected cells expressing receptor.

### Example 53

### ATP-Binding Assay

[1338] The following assay may be used to assess ATP-binding activity of polypeptides of the invention.

[1339] ATP-binding activity of the polypeptides of the invention may be detected using the ATP-binding assay described in U.S. Pat. No. 5,858,719, which is herein incorporated by reference in its entirety. Briefly, ATP-binding to polypeptides of the invention is measured via photoaffinity labeling with 8-azido-ATP in a competition assay. Reaction mixtures containing 1 mg/ml of the ABC transport protein of the present invention are incubated with varying concentrations of ATP, or the non-hydrolyzable ATP analog adenyl-5′-imidodiphosphate for 10 minutes at 4° C. A mixture of 8-azido-ATP (Sigma Chem. Corp., St. Louis, Mo.) plus 8-azido-ATP (³²P-ATP) (5 mCi/μmol, ICN, Irvine Calif.) is added to a final concentration of 100 μM and 0.5 ml aliquots are placed in the wells of a porcelain spot plate on ice. The plate is irradiated using a short wave 254 nm UV lamp at a distance of 2.5 cm from the plate for two one-minute intervals with a one-minute cooling interval in between. The reaction is stopped by addition of dithiothreitol to a final concentration of 2 mM. The incubations are subjected to SDS-PAGE electrophoresis, dried, and autoradiographed. Protein bands corresponding to the particular polypeptides of the invention are excised, and the radioactivity quantified. A decrease in radioactivity with increasing ATP or adenly-5′-imidodiphosphate provides a measure of ATP affinity to the polypeptides.

### Example 54

### Small Molecule Screening

[1340] This invention is particularly useful for screening therapeutic compounds by using the polypeptides of the invention, or binding fragments thereof, in any of a variety of drug screening techniques. The polypeptide or fragment employed in such a test may be affixed to a solid support, expressed on a cell surface, free in solution, or located intracellularly. One method of drug screening utilizes eukaryotic or prokaryotic host cells which are stably transformed with recombinant nucleic acids expressing the polypeptide or fragment. Drugs are screened against such transformed cells in competitive binding assays. One may measure, for example, the formulation of complexes between the agent being tested and polypeptide of the invention.

[1341] Thus, the present invention provides methods of screening for drugs or any other agents which affect activities mediated by the polypeptides of the invention. These methods comprise contacting such an agent with a polypeptide of the invention or fragment thereof and assaying for the presence of a complex between the agent and the polypeptide or fragment thereof, by methods well known in the art. In such a competitive binding assay, the agents to screen are typically labeled. Following incubation, free agent is separated from that present in bound form, and the amount of free or uncomplexed label is a measure of the ability of a particular agent to bind to the polypeptides of the invention.

[1342] Another technique for drug screening provides high throughput screening for compounds having suitable binding affinity to the polypeptides of the invention, and is described in great detail in European Patent Application 84/03564, published on Sep. 13, 1984, which is herein incorporated by reference in its entirety. Briefly stated, large numbers of different small molecule test compounds are synthesized on a solid substrate, such as plastic pins or some other surface. The test compounds are reacted with polypeptides of the invention and washed. Bound polypeptides are then detected by methods well known in the art. Purified polypeptides are coated directly onto plates for use in the aforementioned drug screening techniques. In addition, non-neutralizing antibodies may be used to capture the peptide and immobilize it on the solid support.

[1343] This invention also contemplates the use of competitive drug screening assays in which neutralizing antibodies capable of binding polypeptides of the invention specifically compete with a test compound for binding to the polypeptides or fragments thereof. In this manner, the antibodies are used to detect the presence of any peptide which shares one or more antigenic epitopes with a polypeptide of the invention.

### Example 55

### Phosphorylation Assay

[1344] In order to assay for phosphorylation activity of the polypeptides of the invention, a phosphorylation assay as described in U.S. Pat. No. 5,958,405 (which is herein incorporated by reference) is utilized. Briefly, phosphorylation activity may be measured by phosphorylation of a protein substrate using gamma-labeled ³²P-ATP and quantitation of the incorporated radioactivity using a gamma radioisotope counter. The polypeptides of the invention are incubated with the protein substrate, ³²P-ATP, and a kinase buffer. The ³²P incorporated into the substrate is then separated from free ³²P-ATP by electrophoresis, and the incorporated ³²P is counted and compared to a negative control. Radioactivity counts above the negative control are indicative of phosphorylation activity of the polypeptides of the invention.

### Example 56

### Detection of Phosphorylation Activity (Activation) of the Polypeptides of the Invention in the Presence of Polypeptide Ligands

[1345] Methods known in the art or described herein may be used to determine the phosphorylation activity of the polypeptides of the invention. A preferred method of determining phosphorylation activity is by the use of the tyrosine phosphorylation assay as described in U.S. Pat. No. 5,817,471 (incorporated herein by reference).

### Example 57

### Identification of Signal Transduction Proteins that Interact With Polypeptides of the Present Invention

[1346] The purified polypeptides of the invention are research tools for the identification, characterization and purification of additional signal transduction pathway proteins or receptor proteins. Briefly, labeled polypeptides of the invention are useful as reagents for the purification of molecules with which it interacts. In one embodiment of affinity purification, polypeptides of the invention are covalently coupled to a chromatography column. Cell-free extract derived from putative target cells, such as carcinoma tissues, is passed over the column, and molecules with appropriate affinity bind to the polypeptides of the invention. The protein complex is recovered from the column, dissociated, and the recovered molecule subjected to N-terminal protein sequencing. This amino acid sequence is then used to identify the captured molecule or to design degenerate oligonucleotide probes for cloning the relevant gene from an appropriate cDNA library.

### Example 58

### IL-6 Bioassay

[1347] To test the proliferative effects of the polypeptides of the invention, the IL-6 Bioassay as described by Marz et al. is utilized (Proc. Natl. Acad. Sci., U.S.A., 95:3251-56 (1998), which is herein incorporated by reference). Briefly, IL-6 dependent B9 murine cells are washed three times in IL-6 free medium and plated at a concentration of 5,000 cells per well in 50 μl, and 50 μl of the IL-6-like polypeptide is added. After 68 hrs. at 37° C., the number of viable cells is measured by adding the tetrazolium salt thiazolyl blue (MTT) and incubating for a further 4 hrs. at 37° C. B9 cells are lysed by SDS and optical density is measured at 570 nm. Controls containing IL-6 (positive) and no cytokine (negative) are utilized. Enhanced proliferation in the test sample(s) relative to the negative control is indicative of proliferative effects mediated by polypeptides of the invention.

### Example 59

### Support of Chicken Embryo Neuron Survival

[1348] To test whether sympathetic neuronal cell viability is supported by polypeptides of the invention, the chicken embryo neuronal survival assay of Senaldi et al is utilized (Proc. Natl. Acad. Sci., U.S.A., 96:11458-63 (1998), which is herein incorporated by reference). Briefly, motor and sympathetic neurons are isolated from chicken embryos, resuspended in L15 medium (with 10% FCS, glucose, sodium selenite, progesterone, conalbumin, putrescine, and insulin; Life Technologies, Rockville, Md.) and Dulbecco's modified Eagles medium [with 10% FCS, glutamine, penicillin, and 25 mM Hepes buffer (pH 7.2); Life Technologies, Rockville, Md.], respectively, and incubated at 37° C. in 5% CO₂ in the presence of different concentrations of the purified IL-6-like polypeptide, as well as a negative control lacking any cytokine. After 3 days, neuron survival is determined by evaluation of cellular morphology, and through the use of the colorimetric assay of Mosmann (Mosmann, T., J. Immunol. Methods, 65:55-63 (1983)). Enhanced neuronal cell viability as compared to the controls lacking cytokine is indicative of the ability of the inventive purified IL-6-like polypeptide(s) to enhance the survival of neuronal cells.

### Example 60

### Assay for Phosphatase Activity

[1349] The following assay may be used to assess serine/threonine phosphatase (PTPase) activity of the polypeptides of the invention.

[1350] In order to assay for serine/threonine phosphatase (PTPase) activity, assays can be utilized which are widely known to those skilled in the art. For example, the serine/threonine phosphatase (PSPase) activity is measured using a PSPase assay kit from New England Biolabs, Inc. Myelin basic protein (MyBP), a substrate for PSPase, is phosphorylated on serine and threonine residues with cAMP-dependent Protein Kinase in the presence of [³²P]ATP. Protein serine/threonine phosphatase activity is then determined by measuring the release of inorganic phosphate from 32P-labeled MyBP.

### Example 61

### Interaction of Serine/Threonine Phosphatases with Other Proteins

[1351] The polypeptides of the invention with serine/threonine phosphatase activity as determined in Example 60 are research tools for the identification, characterization and purification of additional interacting proteins or receptor proteins, or other signal transduction pathway proteins. Briefly, labeled polypeptide(s) of the invention is useful as a reagent for the purification of molecules with which it interacts. In one embodiment of affinity purification, polypeptide of the invention is covalently coupled to a chromatography column. Cell-free extract derived from putative target cells, such as neural or liver cells, is passed over the column, and molecules with appropriate affinity bind to the polypeptides of the invention. The polypeptides of the invention-complex is recovered from the column, dissociated, and the recovered molecule subjected to N-terminal protein sequencing. This amino acid sequence is then used to identify the captured molecule or to design degenerate oligonucleotide probes for cloning the relevant gene from an appropriate cDNA library.

### Example 62

### Assaying for Heparanase Activity

[1352] In order to assay for heparanase activity of the polypeptides of the invention, the heparanase assay described by Vlodavsky et al is utilized (Vlodavsky, I., et al., Nat. Med., 5:793-802 (1999)). Briefly, cell lysates, conditioned media or intact cells (1×10⁶ cells per 35-mm dish) are incubated for 18 hrs at 37° C., pH 6.2-6.6, with ³⁵S-labeled ECM or soluble ECM derived peak I proteoglycans. The incubation medium is centrifuged and the supernatant is analyzed by gel filtration on a Sepharose CL-6B column (0.9×30 cm). Fractions are eluted with PBS and their radioactivity is measured. Degradation fragments of heparan sulfate side chains are eluted from Sepharose 6B at 0.5<Kₐᵥ<0.8 (peak II). Each experiment is done at least three times. Degradation fragments corresponding to “peak II,” as described by Vlodavsky et al., is indicative of the activity of the polypeptides of the invention in cleaving heparan sulfate.

### Example 63

### Immobilization of Biomolecules

[1353] This example provides a method for the stabilization of polypeptides of the invention in non-host cell lipid bilayer constucts (see, e.g., Bieri et al., Nature Biotech 17:1105-1108 (1999), hereby incorporated by reference in its entirety herein) which can be adapted for the study of polypeptides of the invention in the various functional assays described above. Briefly, carbohydrate-specific chemistry for biotinylation is used to confine a biotin tag to the extracellular domain of the polypeptides of the invention, thus allowing uniform orientation upon immobilization. A 50 uM solution of polypeptides of the invention in washed membranes is incubated with 20 mM NaIO4 and 1.5 mg/ml (4 mM) BACH or 2 mg/ml (7.5 mM) biotin-hydrazide for 1 hr at room temperature (reaction volume, 150 ul). Then the sample is dialyzed (Pierce Slidealizer Cassett, 10 kDa cutoff; Pierce Chemical Co., Rockford Ill.) at 4C first for 5 h, exchanging the buffer after each hour, and finally for 12 h against 500 ml buffer R (0.15 M NaCl, 1 mM MgCl2, 10 mM sodium phosphate, pH7). Just before addition into a cuvette, the sample is diluted 1:5 in buffer ROG50 (Buffer R supplemented with 50 mM octylglucoside).

### Example 64

### TAQMAN

[1354] Quantitative PCR (QPCR). Total RNA from cells in culture are extracted by Trizol separation as recommended by the supplier (LifeTechnologies). (Total RNA is treated with DNase I (Life Technologies) to remove any contaminating genomic DNA before reverse transcription.) Total RNA (50 ng) is used in a one-step, 50 ul, RT-QPCR, consisting of Taqman Buffer A (Perkin-Elmer; 50 mM KC1/10 mM Tris, pH 8.3), 5.5 mM MgCl₂, 240 μM each dNTP, 0.4 units RNase inhibitor (Promega), 8% glycerol, 0.012% Tween-20, 0.05% gelatin, 0.3 uM primers, 0.1 uM probe, 0.025 units Amplitaq Gold (Perkin-Elmer) and 2.5 units Superscript II reverse transcriptase (Life Technologies). As a control for genomic contamination, parallel reactions are setup without reverse transcriptase. The relative abundance of (unknown) and 18S RNAs are assessed by using the Applied Biosystems Prism 7700 Sequence Detection System (Livak, K. J., Flood, S. J., Marmaro, J., Giusti, W. & Deetz, K. (1995) PCR Methods Appl. 4, 357-362). Reactions are carried out at 48° C. for 30 min, 95° C. for 10 min, followed by 40 cycles of 95° C. for 15 s, 60° C. for 1 min. Reactions are performed in triplicate.

[1355] Primers (f & r) and FRET probes sets are designed using Primer Express Software (Perkin-Elmer). Probes are labeled at the 5′-end with the reporter dye 6-FAM and on the 3′-end with the quencher dye TAMRA (Biosource International, Camarillo, Calif. or Perkin-Elmer).

### Example 65

### Assays for Metalloproteinase Activity

[1356] Metalloproteinases (EC 3.4.24.-) are peptide hydrolases which use metal ions, such as Zn²⁺, as the catalytic mechanism. Metalloproteinase activity of polypeptides of the present invention can be assayed according to the following methods.

Proteolysis of Alpha-2-Macroglobulin

[1357] To confirm protease activity, purified polypeptides of the invention are mixed with the substrate alpha-2-macroglobulin (0.2 unit/ml; Boehringer Mannheim, Germany) in 1× assay buffer (50 mM HEPES, pH 7.5, 0.2 M NaCl, 10 mM CaCl₂, 25 μM ZnCl₂ and 0.05% Brij-35) and incubated at 37° C. for 1-5 days. Trypsin is used as positive control. Negative controls contain only alpha-2-macroglobulin in assay buffer. The samples are collected and boiled in SDS-PAGE sample buffer containing 5% 2-mercaptoethanol for 5-min, then loaded onto 8% SDS-polyacrylamide gel. After electrophoresis the proteins are visualized by silver staining. Proteolysis is evident by the appearance of lower molecular weight bands as compared to the negative control.

Inhibition of Alpha-2-Macroglobulin Proteolysis by Inhibitors of Metalloproteinases

[1358] Known metalloproteinase inhibitors (metal chelators (EDTA, EGTA, AND HgCl₂), peptide metalloproteinase inhibitors (TIMP-1 and TIMP-2), and commercial small molecule MMP inhibitors) are used to characterize the proteolytic activity of polypeptides of the invention. The three synthetic MMP inhibitors used are: MMP inhibitor I, [IC₅₀=1.0 μM against MMP-1 and MMP-8; IC₅₀=30 μM against MMP-9; IC₅₀=150 μM against MMP-3]; MMP-3 (stromelysin-1) inhibitor I [IC₅₀=5 μM against MMP-3], and MMP-3 inhibitor II [Kᵢ=130 nM against MMP-3]; inhibitors available through Calbiochem, catalog # 444250, 444218, and 444225, respectively). Briefly, different concentrations of the small molecule MMP inhibitors are mixed with purified polypeptides of the invention (50 μg/ml) in 22.9 μl of 1×HEPES buffer (50 mM HEPES, pH 7.5, 0.2 M NaCl, 10 mM CaCl₂, 25 μM ZnCl₂ and 0.05% Brij-35) and incubated at room temperature (24° C.) for 2-hr, then 7.1 μl of substrate alpha-2-macroglobulin (0.2 unit/ml) is added and incubated at 37° C. for 20-hr. The reactions are stopped by adding 4× sample buffer and boiled immediately for 5 minutes. After SDS-PAGE, the protein bands are visualized by silver stain.

Synthetic Fluorogenic Peptide Substrates Cleavage Assay

[1359] The substrate specificity for polypeptides of the invention with demonstrated metalloproteinase activity can be determined using synthetic fluorogenic peptide substrates (purchased from BACHEM Bioscience Inc). Test substrates include, M-1985, M-2225, M-2105, M-2110, and M-2255. The first four are MMP substrates and the last one is a substrate of tumor necrosis factor-α (TNF-α) converting enzyme (TACE). All the substrates are prepared in 1:1 dimethyl sulfoxide (DMSO) and water. The stock solutions are 50-500 μM. Fluorescent assays are performed by using a Perkin Elmer LS 50B luminescence spectrometer equipped with a constant temperature water bath. The excitation λ is 328 nm and the emission λ is 393 nm. Briefly, the assay is carried out by incubating 176 μl 1×HEPES buffer (0.2 M NaCl, 10 mM CaCl₂, 0.05% Brij-35 and 50 mM HEPES, pH 7.5) with 4 μl of substrate solution (50 μM) at 25° C. for 15 minutes, and then adding 20 μl of a purified polypeptide of the invention into the assay cuvett. The final concentration of substrate is 1 μM. Initial hydrolysis rates are monitored for 30-min.

### Example 66

### Characterization of the cDNA Contained in a Deposited Plasmid

[1360] The size of the cDNA insert contained in a deposited plasmid may be routinely determined using techniques known in the art, such as PCR amplification using synthetic primers hybridizable to the 3′ and 5′ ends of the cDNA sequence. For example, two primers of 17-30 nucleotides derived from each end of the cDNA (i.e., hybridizable to the absolute 5′ nucleotide or the 3′ nucleotide end of the sequence of SEQ ID NO:X respectively) are synthesized and used to amplify the cDNA using the deposited cDNA plasmid as a template. The polymerase chain reaction is carried out under routine conditions, for instance, in 25 ul of reaction mixture with 0.5 ug of the above cDNA template. A convenient reaction mixture is 1.5-5 mM MgCl₂, 0.01% (w/v) gelatin, 20 uM each of DATP, dCTP, dGTP, dTTP, 25 pmol of each primer and 0.25 Unit of Taq polymerase. Thirty five cycles of PCR (denaturation at 94 degree C. for 1 min; annealing at 55 degree C. for 1 min; elongation at 72 degree C. for 1 min) are performed with a Perkin-Elmer Cetus automated thermal cycler. The amplified product is analyzed by agarose gel electrophoresis. The PCR product is verified to be the selected sequence by subcloning and sequencing the DNA product. It will be clear that the invention may be practiced otherwise than as particularly described in the foregoing description and examples. Numerous modifications and variations of the present invention are possible in light of the above teachings and, therefore, are within the scope of the appended claims.

### INCORPORATION BY REFERENCE

[1361] The entire disclosure of each document cited (including patents, patent applications, journal articles, abstracts, laboratory manuals, books, or other disclosures) in the Background of the Invention, Detailed Description, and Examples is hereby incorporated herein by reference. In addition, the sequence listing submitted herewith is incorporated herein by reference in its entirety. The specification and sequence listing of each of the following U.S. applications are herein incorporated by reference in their entirety: U.S. Utility application Ser. No. 09/950,083, filed on Dec. 12, 2001; U.S. Provisional Application No. 60/278,650 filed on Mar. 27, 2001; U.S. Utility application Ser. No. 09/833,245, filed on Apr. 12, 2001; Application No. 60/179,065, filed on 31 Jan. 2000; Application No. 60/180,628, filed on 4 Feb. 2000; Application No. 60/214,886, filed on 28 Jun. 2000; Application No. 60/217,487, filed on 11 Jul. 2000; Application No. 60/225,758, filed on 14 Aug. 2000; Application No. 60/220,963, filed on 26 Jul. 2000; Application No. 60/217,496, filed on 11 Jul. 2000; Application No. 60/225,447, filed on 14 Aug. 2000; Application No. 60/218,290, filed on 14 Jul. 2000; Application No. 60/225,757, filed on 14 Aug. 2000; Application No. 60/226,868, filed on 22 Aug. 2000; Application No. 60/216,647, filed on 7 Jul. 2000; Application No. 60/225,267, filed on 14 Aug. 2000; Application No. 60/216,880, filed on 7 Jul. 2000; Application No. 60/225,270, filed on 14 Aug. 2000; Application No. 60/251,869, filed on 8 Dec. 2000; Application No. 60/235,834, filed on 21 Sep. 2000; Application No. 60/234,274, filed on 21 Sep. 2000; Application No. 60/234,223, filed on 21 Sep. 2000; Application No. 60/228,924, filed on 30 Aug. 2000; Application No. 60/224,518, filed on 14 Aug. 2000; Application No. 60/236,369, filed on 29 Sep. 2000; Application No. 60/224,519, filed on 14 Aug. 2000; Application No. 60/220,964, filed on 26 Jul. 2000; Application No. 60/241,809, filed on 20 Oct. 2000; Application No. 60/249,299, filed on 17 Nov. 2000; Application No. 60/236,327, filed on 29 Sep. 2000; Application No. 60/241,785, filed on 20 Oct. 2000; Application No. 60/244,617, filed on 01 Nov. 2000; Application No. 60/225,268, filed on 14 Aug. 2000; Application No. 60/236,368, filed on 29 Sep. 2000; Application No. 60/251,856, filed on 08 Dec. 2000; Application No. 60/251,868, filed on 08 Dec. 2000; Application No. 60/229,344, filed on 01 Sep. 2000; Application No. 60/234,997, filed on 25 Sep. 2000; Application No. 60/229,343, filed on 01 Sep. 2000; Application No. 60/229,345, filed on 01 Sep. 2000; Application No. 60/229,287, filed on 01 Sep. 2000; Application No. 60/229,513, filed on 05 Sep. 2000; Application No. 60/231,413, filed on 08 Sep. 2000; Application No. 60/229,509, filed on 05 Sep. 2000; Application No. 60/236,367, filed on 29 Sep. 2000; Application No. 60/237,039, filed on 02 Oct. 2000; Application No. 60/237,038, filed on 02 Oct. 2000; Application No. 60/236,370, filed on 29 Sep. 2000; Application No. 60/236,802, filed on 02 Oct. 2000; Application No. 60/237,037, filed on 02 Oct. 2000; Application No. 60/237,040, filed on 02 Oct. 2000; Application No. 60/240,960, filed on 20 Oct. 2000; Application No. 60/239,935, filed on 13 Oct. 2000; Application No. 60/239,937, filed on 13 Oct. 2000; Application No. 60/241,787, filed on 20 Oct. 2000; Application No. 60/246,474, filed on 08 Nov. 2000; Application No. 60/246,532, filed on 08 Nov. 2000; Application No. 60/249,216, filed on 17 Nov. 2000; Application No. 60/249,210, filed on 17 Nov. 2000; Application No. 60/226,681, filed on 22 Aug. 2000; Application No. 60/225,759, filed on 14 Aug. 2000; Application No. 60/225,213, filed on 14 Aug. 2000; Application No. 60/227,182, filed on 22 Aug. 2000; Application No. 60/225,214, filed on 14 Aug. 2000; Application No. 60/235,836, filed on 27 Sep. 2000; Application No. 60/230,438, filed on 06 Sep. 2000; Application No. 60/215,135, filed on 30 Jun. 2000; Application No. 60/225,266, filed on 14 Aug. 2000; Application No. 60/249,218, filed on 17 Nov. 2000; Application No. 60/249,208, filed on 17 Nov. 2000; Application No. 60/249,213, filed on 17 Nov. 2000; Application No. 60/249,212, filed on 17 Nov. 2000; Application No. 60/249,207, filed on 17 Nov. 2000; Application No. 60/249,245, filed on 17 Nov. 2000; Application No. 60/249,244, filed on 17 Nov. 2000; Application No. 60/249,217, filed on 17 Nov. 2000; Application No. 60/249,211, filed on 17 Nov. 2000; Application No. 60/249,215, filed on 17 Nov. 2000; Application No. 60/249,264, filed on 17 Nov. 2000; Application No. 60/249,214, filed on 17 Nov. 2000; Application No. 60/249,297, filed on 17 Nov. 2000; Application No. 60/232,400, filed on 14 Sep. 2000; Application No. 60/231,242, filed on 08 Sep. 2000; Application No. 60/232,081, filed on 08 Sep. 2000; Application No. 60/232,080, filed on 08 Sep. 2000; Application No. 60/231,414, filed on 08 Sep. 2000; Application No. 60/231,244, filed on 08 Sep. 2000; Application No. 60/233,064, filed on 14 Sep. 2000; Application No. 60/233,063, filed on 14 Sep. 2000; Application No. 60/232,397, filed on 14 Sep. 2000; Application No. 60/232,399, filed on 14 Sep. 2000; Application No. 60/232,401, filed on 14 Sep. 2000; Application No. 60/241,808, filed on 20 Oct. 2000; Application No. 60/241,826, filed on 20 Oct. 2000; Application No. 60/241,786, filed on 20 Oct. 2000; Application No. 60/241,221, filed on 20 Oct. 2000; Application No. 60/246,475, filed on 08 Nov. 2000; Application No. 60/231,243, filed on 08 Sep. 2000; Application No. 60/233,065, filed on 14 Sep. 2000; Application No. 60/232,398, filed on 14 Sep. 2000; Application No. 60/234,998, filed on 25 Sep. 2000; Application No. 60/246,477, filed on 08 Nov. 2000; Application No. 60/246,528, filed on 08 Nov. 2000; Application No. 60/246,525, filed on 08 Nov. 2000; Application No. 60/246,476, filed on 08 Nov. 2000; Application No. 60/246,526, filed on 08 Nov. 2000; Application No. PT172, filed on 17 Nov. 2000; Application No. 60/246,527, filed on 08 Nov. 2000; Application No. 60/246,523, filed on 08 Nov. 2000; Application No. 60/246,524, filed on 08 Nov. 2000; Application No. 60/246,478, filed on 08 Nov. 2000; Application No. 60/246,609, filed on 08 Nov. 2000; Application No. 60/246,613, filed on 08 Nov. 2000; Application No. 60/249,300, filed on 17 Nov. 2000; Application No. 60/249,265, filed on 17 Nov. 2000; Application No. 60/246,610, filed on 08 Nov. 2000; Application No. 60/246,611, filed on 08 Nov. 2000; Application No. 60/230,437, filed on 06 Sep. 2000; Application No. 60/251,990, filed on 08 Dec. 2000; Application No. 60/251,988, filed on 05 Dec. 2000; Application No. 60/251,030, filed on 05 Dec. 2000; Application No. 60/251,479, filed on 06 Dec. 2000; Application No. PJ005, filed on 05 Dec. 2000; Application No. PJOO6, filed on 01 Der. 2000; Application No. 60/251,989, filed on 08 Dec. 2000; Application No. 60/250,391, filed on 01 Dec. 2000; and Application No. 60/254,097, filed on 11 Dec. 2000.

[1362] Moreover, the microfiche copy and the corresponding computer readable form of the Sequence Listing of U.S. Application Ser. No. 60/179,065, and the hard copy of and the corresponding computer readable form of the Sequence Listing of U.S. Application Ser. No. 60/180,628 are also incorporated herein by reference in their entireties.

LENGTHY TABLE
The patent application contains a lengthy table section. A copy of the table is available in electronic form from the USPTO web site (http://seqdata.uspto.gov/?pageRequest=docDetail&DocID=US20070048818A1). An electronic copy of the table will also be available from the USPTO upon request and payment of the fee set forth in 37 CFR 1.19(b)(3).

The application's sequence listing, which the Patent Office published only in electronic form, follows.

SEQUENCE LISTING (13046 sequences)

SEQ ID NO: 1 - DNA, 733 bp, Homo sapiens
gggatccggagcccaaatcttctgacaaaactcacacatgcccaccgtgcccagcacctgaattcgagggtgcaccgtcagtcttcctcttccccccaaaacccaaggacaccctcatgatctcccggactcctgaggtcacatgcgtggtggtggacgtaagccacgaagaccctgaggtcaagttcaactggtacgtggacggcgtggaggtgcataatgccaagacaaagccgcgggaggagcagtacaacagcacgtaccgtgtggtcagcgtcctcaccgtcctgcaccaggactggctgaatggcaaggagtacaagtgcaaggtctccaacaaagccctcccaacccccatcgagaaaaccatctccaaagccaaagggcagccccgagaaccacaggtgtacaccctgcccccatcccgggatgagctgaccaagaaccaggtcagcctgacctgcctggtcaaaggcttctatccaagcgacatcgccgtggagtgggagagcaatgggcagccggagaacaactacaagaccacgcctcccgtgctggactccgacggctccttcttcctctacagcaagctcaccgtggacaagagcaggtggcagcaggggaacgtcttctcatgctccgtgatgcatgaggctctgcacaaccactacacgcagaagagcctctccctgtctccgggtaaatgagtgcgacggccgcgactctagaggat

SEQ ID NO: 2 - protein, 5 aa, Homo sapiens
  Site (3): Xaa equals any of the twenty naturally ocurring L-amino acids
WSXWS

SEQ ID NO: 3 - DNA, 86 bp, Artificial Sequence
  Primer_Bind: Synthetic sequence with 4 tandem copies of the GAS binding site found in the IRF1 promoter (Rothman et al., Immunity 1:457-468 (1994)), 18 nucleotides complementary to the SV40 early promoter, and a Xho I restriction site.
gcgcctcgagatttccccgaaatctagatttccccgaaatgatttccccgaaatgatttccccgaaatatctgccatctcaattag

SEQ ID NO: 4 - DNA, 27 bp, Artificial Sequence
  Primer_Bind: Synthetic sequence complementary to the SV40 promter; includes a Hind III restriction site.
gcggcaagctttttgcaaagcctaggc

SEQ ID NO: 5 - DNA, 271 bp, Artificial Sequence
  Protein_Bind: Synthetic promoter for use in biological assays; includes GAS binding sites found in the IRF1 promoter (Rothman et al., Immunity 1:457-468 (1994)).
ctcgagatttccccgaaatctagatttccccgaaatgatttccccgaaatgatttccccgaaatatctgccatctcaattagtcagcaaccatagtcccgcccctaactccgcccatcccgcccctaactccgcccagttccgcccattctccgccccatggctgactaattttttttatttatgcagaggccgaggccgcctcggcctctgagctattccagaagtagtgaggaggcttttttggaggcctaggcttttgcaaaaagctt

SEQ ID NO: 6 - DNA, 32 bp, Artificial Sequence
  Primer_Bind: Synthetic primer complementary to human genomic EGR-1 promoter sequence (Sakamoto et al., Oncogene 6:867-871 (1991)); includes a Xho I restriction site.
gcgctcgagggatgacagcgatagaaccccgg

SEQ ID NO: 7 - DNA, 31 bp, Artificial Sequence
  Primer_Bind: Synthetic primer complementary to human genomic EGR-1 promoter sequence (Sakamoto et al., Oncogene 6:867-871 (1991)); includes a Hind III restriction site.
gcgaagcttcgcgactccccggatccgcctc

SEQ ID NO: 8 - DNA, 12 bp, Homo sapiens
ggggactttccc

SEQ ID NO: 9 - DNA, 73 bp, Artificial Sequence
  Primer_Bind: Synthetic primer with 4 tandem copies of the NF-KB binding site (GGGGACTTTCCC), 18 nucleotides complementary to the 5' end of the SV40 early promoter sequence, and a XhoI restriction site.
gcggcctcgaggggactttcccggggactttccggggactttccgggactttccatcctgccatctcaattag

SEQ ID NO: 10 - DNA, 256 bp, Artificial Sequence
  Protein_Bind: Synthetic promoter for use in biological assays; includes NF-KB binding sites.
ctcgaggggactttcccggggactttccggggactttccgggactttccatctgccatctcaattagtcagcaaccatagtcccgcccctaactccgcccatcccgcccctaactccgcccagttccgcccattctccgccccatggctgactaattttttttatttatgcagaggccgaggccgcctcggcctctgagctattccagaagtagtgaggaggcttttttggaggcctaggcttttgcaaaaagctt

SEQ ID NO: 11 - DNA, 1256 bp, Homo sapiens
ggcacgagcattaaccaaaaaatgtgcaaacacactactatgatttaccaaaagactctctgcaagtggtaaatcattagctctagtgttgctctttgtaacctcaggtctttggggaatggtgcagaattagtattgcttccttctttctgtgtgtgataatggtgggggaaggctagtaccatctctgtcatacatcaaattcccatatgtgaataaatttatgtatttttactgcactctttttataggtttatcattcctgcaccaacaacgaatgccattattaaaactttatagaaagtctcaatatatggcacagtgcttcatttctttttttcatctagagtgccttagccattcttggctttctgccgttccacaaatagcaatgtaaatttgtcagtataatagagaatccacttatatttcttcaacagctattgggaatatggttgggattacttcaactctatgtatcaatttgaggagaattgatatctttataagattaatccaaatcacagcatgtcaaaatttccttattagggtagttttaatgtccttcaaaaacactgtattttcttcatatagatctaagaaaactttggtgtttattcctaagaaatttatagttcttgttttgtaaatgatatctattcttaagttacacttaaacttatttgttgctgtatatagaaatggaattgacttctatgtacagcagttgcaaactgatattcatatgcagaaagtgaaactagacccctaatggataaaagacttaaatgtaagacctgaaagtatgaaactactagaagaaaacatatgggaaacacttcagtatcctggcctgggtgaagattttatggagaaaacctcaaaagcataggcaacaaaagcaaaaatggacaaataggattatatcaaactaaaaagattcagcacagtaaaataaataatcwatagagtgaagagacaaccttcagaagatatttgcaaactattcatctgacaagggattaatatttagaacatacaaggacctcaaacaactgagcaacaacaacaaaaatatccaattttaaaaatgggcgaaagagccaaataaacatctctgaaaaccagacgcaagtggccaacaggtatatgaaaaaaaaaaatgctgaacaccgctaatcatcagggaaatgcaaaccaataccacaatgagatattatctcattwtggctattatcaaaaaaaaaaaaaaaaaa

SEQ ID NO: 12 - DNA, 1760 bp, Homo sapiens
  SITE (129): n equals a,t,g, or c
  SITE (132): n equals a,t,g, or c
  SITE (179): n equals a,t,g, or c
tggtgaacagcctgtttgctggaatggacctgacgagccttcagaatctccagaatctccagtcgctccagctggcaggcctcatgggcttccctccaggactggcaacagctgccaccgccggagtgncgnaagaaccctgctgctgtgctgcccctgatgctgccaggaatggcggngcctgcccaacgtgttgggcttgggcgggctgttgaataaccctctgtcagctgctactggaaacaccactactgcttctagtcaaggagaaccggaagacagcacttcaaaaggagaggagaaaggaaatgagaatgaagacgagaacaaagactctgagaaaagcacagatgctgtttcggctgctgactctgcgaatggatctgttggtgctgctactgccccggctggattgccctcaaacccgctagccttcaaccctttcctcctgtccacaatggccccgggcctcttctacccatccatgtttctacctccaggactggggggattgacgctgcctgggttcccagcattggcaggacttcagaatgccgtgggctccagcgaagaaaaggctgctgacaaggctgagggaggaccctttaaagatggagagacccttgaaggcagcgatgccgagggagagcctggataagactgcagagtcctccctcttagaagacgaaatagcacagggtgaagagctagactcacttgatgggggggatgaaatagaaaacaatgaaaatgatgaataaccagtaccagttccagttcaagtgtttaaaacttttgacaagtggtagtcctactgtttacactcacagttaatgttcatacctagttttataagctgttctgtaacatagtgtagcaaaaaaaaaagttcaagtcatgttatacaggtgtgtcaaaaggtatcttggtcattaagtattgtgcagtgcattatttattatccctaggagagatgraatttgagaggtgatcatgtytttttaaggraacttamataatgctctgcttttttttttytcttggtaccattggtattataataaagagcaatttgtaactgagtggcactaatggaagaaagtgctgctcaaaggaagtatgaagttatatatttaattttttaattttaatttttaatttttttgctgtgaaggtcaagctgaaatttaccatacatatcatacttgctcatttgtttccctttttgactgtatgggggttcccacactcgtgcatacacacacatccatacactctgacaatctccacgctagtgtgaacgcctctgtcccgaggcgcagcaataataaggcagctgttgaatgtgaagggtccctttggaaaattaacctactgggagggttcttgccagacagaactacagttccattgtctcgtggtcttgtaatgcactggtaaaaacaaaataaatagatgaataaataaagagtgagagaagagagaatcaggtaccttttttaaattaaaggactttgttactttagccacaaagctaaaacagcattacctcagctctaaactagccttgaagtttacagacatgactttgtaaatgtattgtttttctttgttgtgatgtccttttatttttttctttgaaaactgctatcatgtaagataaaatgtaaattgctgccaactgtagtaatgatgcttttaataaaagtgacccatgataaaaaaaaaaaaaaaaaaaaaaaaaaaaaaaaaactcgkag

SEQ ID NO: 13 - DNA, 1529 bp, Homo sapiens
ggcacgagagtgtgtcaggcgggcagcttgccccgccgccccaccggagcgcggaatctgggcgtccccaccagtgcggggagccggaaggaggagccatagcttggagtaggtttggctttggttgaaataagaatttagcctgtatgtactgctttaactcctggaagaatgacagatgacaaagatgtgcttcgagatgtgtggtttggacgaattccaacttgtttcacgctatatcaggatgagataactgaaagggaagcagaaccatactatttgcttttgccaagagtaagttatttgacgttggtaactgacaaagtgaaaaagcactttcagaaggttatgagacaagaagacattagtgagatatggtttgaatatgaaggcacaccactgaaatggcattatccaattggtttgctatttgatcttcttgcatcaagttcagctcttccttggaacatcacagtacattttaagagttttccagaaaaagaccttctgcactgtccatctaaggatgcaattgaagctcattttatgtcatgtatgaaagaagctgatgctttaaaacataaaagtcaagtaatcaatgaaatgcagaaaaaagatcacaagcaactctggatgggattgcaaaatgacagatttgaccagttttgggccatcaatcggaaactcatggaatatcctgcagaagaaaatggatttcgttatatcccctttagaatatatcagacaacgactgaaagacctttcattcagaagctgtttcgtcctgtggctgcagatggacagttgcacacactaggagatctcctcaaagaagtttgtccttctgctattgatcctgaagatggggaaaaaaagaatcaagtgatgattcatggaattgagccaatgttggaaacacctctgcagtggctgagtgaacatctgagctacccggataattttcttcatattagtatcatcccacagccaacagattgaaggatcaactatttgcctgaacagaatcatccttaaatgggatttatcagagcatgtcacccttttgcttcaatcaggtttggtggaggcaacctgaccagaaacacttcgctgctgcaagccagacaggaaaaagattccatgtcagataaggcaactgggctggtcttactttgcatcacctctgctttcctccactgccatcattaaacctcagctgtgacatgaaagacttaccggaccactgaaggtcttctgtaaaatataatgaagctgaaacctttggcctaagaagaaaatggaagtatgtgccactcgatttgtatttctgattaacaaataaacaggggtatttcctaaggtgaccatggttgaactttcgctcatgaaagtggaaacattggtttaattttcaagagaattaagaaagtaaaagagaaattctgttatcaatacttgcaagtaattttttgtaaaagattgaattacagtaaacccatctttccttaacgaaaaaaaaaaaaaaaaaa

SEQ ID NO: 14 - DNA, 2114 bp, Homo sapiens
ggcacgagggacgccgggcgcgcagtcggtgctgattatcacaactgtttggtgacctacttcactgacctaatggaaacagactgtaatcccatggagctaagcagtatgtcaggatttgaagaaggttcagagctgaacggttttgaaggaactgacatgaaagacatgaggctcgaagctgaagcagttgtaaatgatgttctctttgctgttaacaacatgtttgtctcgaaaagcctgcggtgtgcggatgatgtggcctatatcaatgtggaaacaaaggaaagaaacagatattgcctagaactcactgaagcagggctcaaggtggtaggctatgcttttgaccaggtagatgatcatttacagactccctaccatgaaacagtctactccttgttggatacactcagccccgcctaccgagaagcatttggaaacgcactgcttcaaagactggaagctttgaaaagagatggacagtcatgactacactttctcctttcagaggggctggtgctggtacagaatgtagatacaaagcttaaaattcttgcatatggtcatagaaaatgcatctttggttttgtgtttttatcacttgcttccaacttaggcttttggctcagaagattattgaataatgatttgtcttagtttctgtttcagtaagggaattctgaggccgttgctatgataccatcattaagacattcacatgtcttcatataatatctcttcatttcaaatcctaatcactatttcatactattacagggctttgatgctgccagcactgtcttttacataggaaattctagatttgcacagtaatagaggaattagaagtacctaactatacactttgattcagcctgctaaatcaggggttcaatactagcttggacaaactttgtagtaattaattgctaccagccttattggaaacaaattatcaactagtttcccctgcacaaattttgaaattcactgcttcacttaatctatttatattactaataatggattaataaagatgaattaattatatattacttaactagtattaaatgaaaaacagggactgaaatagttctgtattccgtgtttgcaacagccagccaactaagcagaggataaaccgttagcaaatgaatgtaataattactcatttccaagatatctaagcacataagcaaatacaggaacagacttcattctttttcttaacaaaaaagcatcttcagtgtgtgatttaaaagaaagaagattctggtttcctagaaaacaatattttggcctgtgttgattcttattctgaatgtgtgtttacataatgtacagtatatattcagaaagtatttttgcttcaacgtttactttctatgatgtagtgctttggtattcctacagcaccccaccttccccaacagatgtacagtgttctgtctccattcgaaatctacaatgtaatatgagtgcattgtatgggtttgaaaccaaaggatgaatgaagcattcagagacttaatatttgaaaaaggaatagtcagtattttatattttattacaggtactgatatttataaatttaataaactgtaccatgctgctgcatgttttcaagtacatgttgaacagtaaggattggggagttgttttttaatggtcacctaaagcagctgctatagaaatgttgaactaaaattttgcatctggtcataccttcatgcatttatcatttgcagatatttttccatcattattaaaaaacaggaacttttaggctctgaagatcatgtggaccagagcaaattaaagttcagtttgtgacacaattcattgccagacttcattggaatgctttgtttgatgatgtatgttcattctcagctttattttcagatgcttaactgggcaatgaagtctaacttcaggttgaactttctcatgtttaatctcaggctaaatgtaaatgatatttgtaaagtttgaataaaattctgtttactcattttgagttagtatgaaaaaaagtgattgtatgtttaagaattgaaattgttcattttgtgataaatgattaattccaaaaaaaaaaaaaaaaaaaa

SEQ ID NO: 15 - DNA, 2158 bp, Homo sapiens
gaattcggcacgagtgctgattatcacaactgtttggtgacctacttcactgacctgtgaggattccttcccttcaagtactggattcttgatctttctgcatcatcaagaatggaaacagactgtaatcccatggagctaagcagtatgtcaggatttgaagaaggttcagagctgaacggttttgaaggaactgacatgaaagacatgaggctcgaagctgaagcagttgtaaatgatgttctctttgctgttaacaacatgtttgtctcgaaaagcctgcggtgtgcggatgatgtggcctatatcaatgtggaaacaaaggaaagaaacagatattgcctagaactcactgaagcagggctcaaggtggtaggctatgcttttgaccaggtagatgatcatttacagactccctaccatgaaacagtctactccttgttggatacactcagccccgcctaccgagaagcatttggaaacgcactgcttcaaagactggaagctttgaaaagagatggacagtcatgactacactttttcctttcagaggggctggtgctggtacagaatgttgatayaaagcttaaaattcttgcatatggtcatagaaaatgcatctttggttttgtgtttttatcacttgcttccaacttaggcttttggctcagaagattattgaataatgatttgtcttagtttctgtttcagtaagggaattctgaggccgttgctatgataccatcattaagacattcacatgtcttcatataatatctcttcatttcaaatcctaatcactatttcatactattacagggctttgatgctgccagcactgtcttttacataggaaattctagatttgcacagtaatagaggaattagaagtacctaactatacactttgattcagcctgctaaatcaggggttcaatactagcttggacaaactttgtagtaattaattgctaccagccttattggaaacaaattatcaactagtttcccctgcacaaattttgaaattcactgcttcacttaatctatttatattactaataatggattaataaagatgaattaattatatattacttaactagtattaaatgaaaaacagggactgaaatagttctgtattccgtgtttgcaacagccagccaactaagcagaggataaaccgttagcaaatgaatgtaataattactcatttccaagatatctaagcacataagcaaatacaggaacagacttcattctttttcttaacaaaaaagcatcttcagtgtgtgatttaaaagaaagaagattctggtttcctagaaaacaatattttggcctgtgttgattcttattctgaatgtgtgtttacataatgtacagtatatattcagaaagtatttttgcttcaacgtttactttctatgatgtagtgctttggtattcctacagcaccccaccttccccaacagatgtacagtgttctgtctccattcgaaatctacaatgtaatatgagtgcattgtatgggtttgaaaccaaaggatgaatgaagcattcagagacttaatatttgaaaaaggaatagtcagtattttatattttattacaggtactgatatttataaatttaataaactgtaccatgctgctgcatgttttcaagtacatgttgaacagtaaggattggggagttgttttttaatggtcacctaaagcagctgctatagaaatgttgaactaaaattttgcatctggtcataccttcatgcatttatcatttgcagatatttttccatcattattaaaaaacaggaacttttaggctctgaagatcatgtggaccagagcaaattaaagttcagtttgtgtcacaattcattgccagacttcattggaatgctttgtttgatgatgtatgttcattctcagctttattttcagatgcttaactgggcaatgaagtctaacttcaggttgaactttctcatgtttaatctcaggctaaatgtaaatgatatttgtaaagtttgaataaaattctgtttactcattttgagttagtatgaaaaaaagtgattgtatgtttaagaattgaaattgttcattttgtgataaatgattaattccaaaaaaaaaaaaaaaaaaaactcga

SEQ ID NO: 16 - DNA, 443 bp, Homo sapiens
ggcacgagtgcacgcccaatcagaccgagcacttgtgacactaccccaacacctctcccagggctgaatgaggaacgcgccactggacacatgaggaagaggctgccctgggagctactgatgctgtgacctcacctctctggctttgggcggcaggtccctgcacctaggatgcctgcctggaaatgtccttgcattcgtggcctccttcacagcctcctcctcagagaagcctctgcgagtgcacagggagtgtgtgcagccttgtgaagggctgggaccacttgcccagactggggcccctcaggcacaggcgtggggtcctactgacctgtctccccagctcccacacagaaagcatctaaaataaacacacgtggatggaaagcgttaaaaaaaaaaaaaaaaaaaaaaaaaaaaaaaaaaaaaaaaaaaaaaaaaaa

SEQ ID NO: 17 - DNA, 1315 bp, Homo sapiens
  SITE (38): n equals a,t,g, or c
acccacctttcaagggccaataattgaaggcccaaacnggaggtggctgggaaacgtgtcaaagaatgacccccaggttacctctcttctcttcaaacacccaagccaaaagctactttgagcctcctgcagctgggccttgatgagcacaacagagtgaaggtgtatcgcttctgaggccctgagcaggggcttggggcagcccagcctctcctccacccagaccaagtgcctgaggagctgcctgccttcttccatctgagaaagcaccctccttccccctttgacttgcaggagccaccagggaccagggggttgagtggaacagtaaagccacacattctgtgactatataacctatctcaggctaaaatgtgtggacttgtacgagctcttgtcattgacatggcaagctgatggcgtgcggtggctgcggggtatcagggccgggagccctttggraggaagggaaggcgttaraggagctgccttcggaggctcagggagtccctttggagctggttgtttccttggccctgcagcgcactgctcggggctcccaaggaggttgtgtgtatggttcttaattcatcaggacaaagacccccagcatgtgtgtaccctgggacccgatttctctgggcccacatctatctccaatacctcagcctcagatcagaccctttcttttttgtctttcttctcttaatttttaaatgcctcttttcttgagcattccatctctctttttgaccctctcaggactgggcttagctgtccagagccctgccggarggtgctgggggctgtccctctgcaggcactgtgttttcctcaggggctgtcctcagaacacccctcctgctccctggggctcctcagggagccatttcagctggagtctcaggtctcaaaaacaacttctccaggaggccaaaaaaagactgggttggcttctggtcctcatgatggcttttatcctcctgggacactttgggtatattcatgggcattgtttccatctgtcttttctacctgtgccacccctgccctgattccacggctgcctcaggcaggcaggcaaggagctaggccggtgccyggccctggcagcaaggggtctttgtgcagttggagatgctgccgttgtggcagagcgtcctgcagccccgcttccatcagcaggctctggggtgggggctttgcaggggatgctctctgatgtttgttccgttgtttaaataaaatgcacttatttttgtttttttttttgcaaaaaaaaaaaaaaaaaaaaaaaaaaaaaaaaaaaaaaagt

SEQ ID NO: 18 - DNA, 1174 bp, Homo sapiens
ggcacgagcccaccctccaactttgcgacggaaatgtgtcatcgaaagccaggtacaccaggggttggaaaaaccacactaggcaaagaacttgcgtcaaaatcaggactgaaatacattaatgtgggtgatttagctcgagaagtctgatcatcggatatcatggagtctggcaagacggcttctcccaagagcatgccgaaagatgcacagatgatggcacaaatcctgaaggatatggggattacagaatatgagccaagagttataaatcagatgttggagtttgccttccgatatgtgaccacaattctagatgatgcaaaaatttattcaagccatgctaagaaagctactgttgatgcagatgatgtgcgattggcaatccagtgccgcgctgatcagtcttttacctctcctcccccaagagattttttattagatattgcaaggcaaagaaatcaaacccctttgccattgatcaagccatattcaggtcctaggttgccacctgatagatactgcttaacagctccaaactataggctgaaatctttacagaaaaaggcatcaacttctgcgggaagaataacagtcccgcggttaagtgttggttcagttactagcagaccaagtactcccacactaggcacaccaaccccacagaccatgtctgtttcaactaaagtagggactcccatgtccctcacaggtcaaaggtttacagtacagatgcctacttctcagtctccagctgtaaaagcttcaattcctgcaacctcagcagttcagaatgttctgattaatccatcattaatcgggtccaaaaacattcttattaccactaatatgatgtcatcacaaaatactgccaatgaatcatcaaatgcattgaaaagaaaacgtgaagatgatgatgatgacgatgatgatgatgatgactatgataatctgtaatctagccttgctgaatgtaacatgtatacttggtcttgaattcattgtactgatattaaacatgcatgctggatgttttcaagttgtgttttagaaaactaataataatgagtaaacacagttaccatacttttcaattgaaatgaaggtttttcatcagccttaaaagtgtaagaaaaataaagttgtcattcattcgaaaaaaaaaaaaaaaaaa

SEQ ID NO: 19 - DNA, 916 bp, Homo sapiens
gttttgttttcttcactatgtaaatattatttgggcaaacattacaaaaagggatccaaacaatttgagtttcagtatttttttctccctaggcatgtgcttcaatttcaaatatttttttctgtgtggaaaatgccatgtaactattgcactaccttctgtgtggactgtgttggtattggttctttctgtatatcaaaagtcagggtgtttataactgcaaagtttgtataagtggctttattcctcttctagaagatttatgaggagcctaggaagcactattggtacaggaggaaaaaagaatggaaaacatgtttacagactctagctttccttattagcttaaactggggccctcaaagagcagcctgttgatcttttggccaaatgacttgagcataagtcttttatttctttttaaggttaaatcgtaaactgtatacctttactactgaaaacaaaactatagggcatcatactaattgaaaatcaatagtaatgggttccatccattagctttttaaatgaatagatctggtattgatttccttcctgtttttttgaggcacattcctttacaaccagtgtttaaaccaccacgtaatcatcttctgcaaacaaggggtgccagtgttgcctaacagaagataatctttaataaagcaaatcctctgcttcaaaggtttttgaaataattggatccctttttgaaaaggaagatgagtttaactgtgtccaggtggagtaatagtactgctgttgcatgaatagatgatacaaagcaagtgatgaggttggtatgacttctttagtgaccttttagggtttgcttttattttcctctcttttttgtattatttctttcaaacatagtaaatatatgattttacagccaaaaaaaaaaaaaaaaaaa

SEQ ID NO: 20 - DNA, 1228 bp, Homo sapiens
ggcacgaggaaccctgaggtgtgcacagcgctgggatgccaggttcggcctcgaagcggaggatccctgtgtcccagccgggcatggccgacccccaccagcttttcgatgacacaagttcagcccagagccggggctatggggcccagcgggcacctggtggcctgagttatcctgcagcctctcccacgccccatgcagccttcctggctgacccggtgtccaacatggccatggcctatgggagcagcctggccgcgcagggcaaggagctggtggataagaacatcgaccgcttcatccccatcaccaagctcaagtattactttgctgtggacaccatgtatgtgggcagaaagctgggcctgctgttcttcccctacctacaccaggactgggaagtgcagtaccaacaggacaccccggtggccccccgctttgacgtcaatgccccggacctctacattccagcaatgggctttcatcacctacgttttggtggctggtcttgcgctggggacccaggataggttctccccagacctcctggggctgcaagcgagctcagccctggcctggctgaccctggaggtgctggccatcctgctcagcctctatctggtcactgtcaacaccgacctcaccaccatcgacctggtggccttcttgggctacaaatatgtcgggatgattggcggggtcctcatgggcctgctcttcgggaagattggctactacctggtgctgggctggtgctgcgtagccatctttgtgttcatgatccggacgctgcggctgaagatcttggcagacgcagcagctgagggggtcccggtgcgtggggcccggaaccagctgcgcatgtacctgaccatggcggtggcggcggcgcagcctatgctcatgtactggctcaccttccacctggtgcggtgagcgcgcccgctgaacctcccgctgctgctgctgctgctgggggccactgtggccgccgaactcatctcctgcctgcaggccccaaggtccaccctgtctggccacaggcaccgcctccatcccatgtcccgcccagccccgcccccaacccaaggtgctgagagatctccagctgcacaggccaccgccccagggcgtggccgctgttacagaaacaataaaccctgatgggcaaaaaaaaaaaaaaaaaaaaaaaaaaaaaaaaaaaaaaaaaaaaaaaaaaaaaaaaaaa

SEQ ID NO: 21 - DNA, 1960 bp, Homo sapiens
  SITE (13): n equals a,t,g, or c
  SITE (23): n equals a,t,g, or c
  SITE (25): n equals a,t,g, or c
  SITE (26): n equals a,t,g, or c
  SITE (37): n equals a,t,g, or c
  SITE (1094): n equals a,t,g, or c
  SITE (1952): n equals a,t,g, or c
  SITE (1956): n equals a,t,g, or c
gggggggggggtntaaatcgttncnntacttccacanattgctttgagggcccggaattataaatatatattatatttwaattgtttgagattattttgacacatttctttgatacgtagagtgttttgtttttaatttaaatctgtcctcatgcaaccctccatgaggggcagcgagcggcagggagcagactggctttgtaggttcagcactcggccccccactgcgggagaggcggaacccacttgcatgtcagcgtttttgattcgagaaaagaaatactctcaacgttttaccaagtgattttacctccacctttactaaagtctttacctaaaacatggcagtcgctggacacaggaaagcccaccttttgtttggccttttcgaaaggtgacccatattgcacagcagaacatcacagctgtggtcccagatgagacactgacatgcgagtgaaggcctctcctcctgggccccgggctgcgcaggctcctcactctgggcggtgtttcctgtctcagaattgacacggtgaatgcttagtgtctggattttcttgtrccagtgtttacatatctgacatcgagctcctctaagaggccacgttcaagcttgtgtgtccctgacccaagatagccagtgctgctcccaggtggtacttctggtaccgtgttgagacacttgggattctcagactgtggacaggagtgtttgtcatttttcatactgttttcttaataagcgctcaggcctaaggtgtgacaggaagtcgcacgcgcttggccagagcacagtgaagcaaaggactgggtgctgatggatggagccacggcggcatctgcccacccggccgcagcccccagtgcctctcctggtggtcctcccagtctagagggtcacggcccccccgccctcctccgtctctggcaagctgaccttgactaacccaggaatacagggtcatcctcattcctaagtaagtcaaacagcaagacatggtttgcgcgggtctttgccggaagccggtcctgctggccaggtgttttacgtcagcagggaaatgtggcacacgccctcgaggcattttaanactgcgcttcaggaaatctcaagttccatcttgtgttagtaacgtacccacattttgctggagttagtttattaaagatgcctamggtgaactctctggcgcaggttaaatgcagttttgaaaacccaggaccctggctcgtgagtgcgtctgggtcaggaagagacctctctgtgcgtctcaggctgagatgcagatttctgttttctaaaactggaagcgaccttgacgtgtattgaaggtgtgtgtgcccmaccccacccagcacgcactcattcagtccattgccttaacacaagcctgatggggctgttttctcacaatataaacgaataaagtgtcttctggcctacttctgaawtacttctcaactgtatggtttggggaagggagggaaacctaaaatcccgtccaaataagtgaaattcctgaagaagtggctgagtcctaccaggttggggttagggaaatgttctgggttcaggcgcccctcccagggctgagaaagcgcagccagggacagctttctgttctctcccagggtggctaggttagtatcttacatgacaaaaaactgagagtgttctaacttctgtgcaagcaaggttaatcctgagactaaatcttggcgttcagactcccgtagaggtcatctgtgtccaggcccacccgggcgccggctcagcggtagtgccgaaggtagatgagcttctggggagggaacttctcccggcagaggggacactccgccttgctgctgcaccacgcggtgatgcactcccagcagaacaggtggccgcagggcgtggctgttgggtgcctgcgctcctccaggcacagggtgcacagggtgtccancgtnccgc

SEQ ID NO: 22 - DNA, 1425 bp, Homo sapiens
gaattcggcacgagttttagtagagacagggtttcaccatcttggccaggctggtcttgaagttctggcctcaggtgatccaccctcctcggcctcccaaagtgctggaattacaggcatgagccactgtggccagcctaacttatcattttcttaaatgtgacttaaatgcagttgaaaacttgtattatgactgagtcgttttatcccctgaatcagagaaagcaaaatgaaaatccctctgctgtgctaatgcacctctttcttttttcagtgaccatgcagcaggtggccaggacagtggctaaagtggagctctcagaccacgtgtgtgatgtggtgtttgcactctttgactgtgatggcaatggcgaactgagcaataaggaatttgtttccatcatgaagcaacggctgatgagaggcctggaaaagcccaaagacatgggtttcactcgcctcatgcaggccatgtggaaatgtgcacaggaaactgcctgggacttcgctttacccaaacagtaaccccacactgcaagaggggacccctccacccccagtaccctggaccccctccgcagagtctcggcagagccctttgtgctgctgcttctggaagtagtcycccttcctcccgggatgacctcaggactctgtcggtttcccctctttacccttccccgtccccgtgttctgctgggctctgattctgcccaatgagtatccccataggttctcaaaaacatgaacaagtctgtaaagctcagacatttgtcagcctcaacagcaccacccattcaagcatcctgtggataaagaattcagggaaccatccacacacctgccaaccctgggaagcatccagttctcaaatcgtttttgctatggatttatactaacaagaacattccttgacttccctcctgctggtgttttaaagccacaagtagggaagatatctggcaggcagaaagaagtctgtgatgataaacaatgatgaggatgacctaggcaccctacgctagtgtgagaagcctgcgccccaggaaggatctgtgttagtccctgggatggctccaaggcctgctctaggaaggcagcatgctcagtgggaacacagcaagattcagaatttaaagtagttgcttcatggctctgtgcactcccttttcttcctcgcagcctccctaagatgactccagtgtgaccctgtgcttagtgagcaatagtgattgagctcatgttccctgcaagtgccatttcctctccaggatgggcctctaaagctgaggcctggctcagagcctgtttgccctctgtcttaaacaattgtaaatatcacttaaattataaccatttgcaataaacatccccaaagttaaaaaaaaaaaaaaaaaaaaaaaaaaaaaawaaaaaaaaaaaaaa

SEQ ID NO: 23 - DNA, 951 bp, Homo sapiens
ggcacgagccaaggtctaccttctctaccggcctggacactacgatatcctctacaaatagggctggctccagcccgctgctgccctgctgcccccctctgccaggcgctagacatgtacagaggtttttctgtggttgtaaatggtcctatttcacccccttcttcctgtcacatgacccccccccatgttttattaaagggggtgctggtggtgagccgtgtgtgcgtgtccctgctctgctgcccgcctggctgctctgtctgctgccccctccccccaggtgggtccccctgcttttcacctatctactcctgagcttccccaacaggagcaggtttgaggggccaggcctcttggaggcccctcctgcttcgttgggttctgcttccttcccttcttagctggctcaggggcttctatgggatcctggaagttccttagggacttgcccagggtcccagggccacccacacttcatctgctccctcataggccccacctccacgtcccggctgggccccagaccccagcttcctgccctccaccgggagtctgcatggttgggagtcctgggtggaggggcctttgtgaggctggacccggctcagggcaggtggaggagctgggcctcccacagggtgcccgggcagtgccatcctggtgggggagggcagccttcaaacgtgtggggtctacagtcctcaggtctaggcagggctgccggttctccacctccccatccgccccaggccccctgcctgtgcctgccttgcaccccctctgcttgggccacggtgtctctgcattgcctgcctttttgccttcacctcttttcttccccgccccctgcacattcggggtctcagcccccaggctgtgagctccttgggggcaggccctcaataaatgtgaactgctgctgccgcaaaaaaaaaaaaaaaaaaaaaa

SEQ ID NO: 24 - DNA, 229 bp, Homo sapiens
ggcttgttgtggggcaccagcagagggcaaagtcatactcctgcactgacagtgttcgtgaagagaatgaaatatgaagaaagctatgaatagttggaaattcggggggctgtgcttactcctgattatttcagtttggctaaaacagagctggcatcaaggaagggtttgttgtgatgattccagagagggtgactctcagggagttgcccaccaggcccacgaagcc

SEQ ID NO: 25 - DNA, 508 bp, Homo sapiens
ggcttgccaccaacgtgttcatcctgagactgtgcatgattaaggttattctccctctctcgcctctcgccaagtttatgcactcttcccctgtggaccatctctttcgacaaatccagcaaaaccccacccccatcctggaaaatttcttcttcaatcggggttaagtcggggatctagagaggtcgggtgtgaaaggaaaggaccttcgggcgggaaccaataccaagctaccctcctggttttcgttgtttatatacatgggagggggaaaatggtctgtatttttaaaacagaagatgtcctgccgtttctgcttctgtttttccttttttcttttttttttttttaacagccaattcttttgaagggagatagccagccaattttccatttctccttgcctacggagctcatgcaaacttccctacgctagccggctggccctgtgcaaccttcactaccacctcccgccaaccccctcctctactccttcctccctaagccg

SEQ ID NO: 26 - DNA, 1099 bp, Homo sapiens
ctctataggttaaagttggtacgcctgcaggtaccggtccggaattcccgggtcgacccacgcgtccgaaatgcttcagtccgccgagagcagtaccgtgtggccaagaggtggactcagagccttccttgagctaaactcggccaaccaaggcacgcagcatgtcccctcaggtctccagtcagtccaggttgaccctcagttctggacgtgtgtatatagctgtatttaatacctcaaggtcattgtggctctggggatgccggggcaggaggacgagggtgcgctgtggacacagcagtccgcggaattccgttctgggaagccaatggtcgccggcaccccttgcttcctccctctgttgtctgcctgtgtgacacacatcaatggcaataacttcttccaactcctcgcagaagtgggagaggccggcagcctgcaccgagaggggctttcctctctcttgctccccgcttcgttctgttttggctgcagagagtggttcatccatactctcattccctcgcctccccttgtggacgggggtcttgccttttcaattcctgtgttttggtgtcttcccttatctgctaccctgaatcacctgtcctggtcttgctgtgtgatgggaacatgcttgtaaactgcgtaacaaatctactttgtgtatgtgtctgtttatgggggtggtttattatttttgctggtccctagaccactttgtatgaccgtttgcagtctgagcaggccaggggctgacagctaatgtcaggaccctcagcggtggagcctgctggggggacccagctgctcttggacaagtggctgagctcctatctggcctcctctttttttttttttcaagtaatttgtgtgtatttctaactgattgtattgaaaaaattcctagtatttcagtaaaaatgcctgttgtgagatgaacctcctgtaacttctatctgttcttttttgaggctcagggagaaactagcatttttttttttccaaactactttttgtcactgtgacagttgtaaataaagtttgaaaatgctttccaaaaaaaaaaaaaaaaaaaaaaaaaaaaaaaaaaaaaaaa

SEQ ID NO: 27 - DNA, 990 bp, Homo sapiens
  SITE (948): n equals a,t,g, or c
  SITE (954): n equals a,t,g, or c
ctccaaccctgtggctgcccttcacacttacaggcctaaccccagcaggacctgccagctgcttcatgaacaagtccctgcctcatgttaattgcaagcactcatttcactctccctgtgtgccaggcaatagcataagcactggaagaatacagatgttatagtgagtcctacaatagccctggaaggcaagagctgtttccttkccatttctacaatgagtcaattgcagatgatgctataacacttccagtgtttctgacacttccctgaagctatacctgctaccttcatgggccgagcttgcccttatgaggcccacaggtggcagtgggcagaggggaccccgctataccacctcgctgctgttccactgtctgctcccgtgttctgaccacagctctggtgccgtttctcaagcctgggcttcattcaacattttctatctagctcttcatggtgctgctcctgctatggttccacagggcttcttctcgcaggtcagctccttagagaggtctcccagattccccgtaaagcagccctgcagcctctgcctctctcagccgcatcaccctgttgcttccttcacagcatgtctcaccatctgcaaccatctttctgtttgtcgtcttgttgatttgctgcctccacactgtcagctccttgggaacagagattggtttgtttactgtgcatccctggtgcccagaacagggcatggcatattgttggtgcataataaatattgtggaaataaaaaaaaaaaaaaaaaactcgagggggggcccggtacccaattcgccctatagtgagtcgtattacaattcactggccgtcgttttacaacgtcgtgactgggaaaaccctggcgttacccaacttaatcgccttgcagcacatccccctttcgccagctggcgtaatagcgaagaggcccgcaccgancgcccntcccaacagttgcgcacctgaatggcgaatggcaaa

SEQ ID NO: 28 - DNA, 3152 bp, Homo sapiens
  SITE (361): n equals a,t,g, or c
ggcacgagcccggcttctcctgtctgacatgtggtccagcaaggaactgcagggtgtcctcagacagcaaggtttcgataggaacatgctgggaaccttagctggggccaacagcctcaggaacttcacctcccgattctaagaagagactgtccaagcaagttaggcttgcaggaagatatgacccagctgagaagccctcaggcctcgctggatggggttttctgtccatcctgtgcagtatttgggaaagttcacaagaaactgagaagaaacctaaaaactgtggatagtggaaagatttttagattttttttttccttggggaaactggcaggcaatgggggttagggaggttggngcsgggggggctttcttgagttaaagggcttatatgtgatgtcaatatttcttcctctgagaaatggtatatatatgtgtctaatgtaagtgtgtgcatgcatgtgcgcgtgcatgtgtgtgtgtgtgagtgtcttaaagcataaccacaaactgcaaaaagctaggtaagctattttgttgcagctcataaggtggtgaaaaggactctcctgtgtttcttactcataggcaaggacaacatgtgctttttggtgagctgctcataattcctgaaatgtgtggtgccagggcaagggggccatcactgcagtcaggccctcagaggagtcctgcaggcttcctaccagtggtctccaagggtgcaggagtaactggggctgggccagcctccccccttacaaggctgctttccaggaagggaggtctggtgtatctcatgggagaatctggggtgtctgtagtgtcacccctccagcagcgccacaaggactgaggttgggtaggtgtgrggttccagaggacagcaggacactctcgcatactttgccaaatgaggcctgctcagaggagtaggagctgaaagatggtgccttccaccctcttgggctgtgtgcccatcagagcaggctcagcctgcaaagkccctgcattcagaggtcttgtaatctacttgttgcaggagaaagaaggtaaaaaatgatctttttaagaaaagctattttattgcagctctttcccaagagctgttctgggaatggctggtcttcatattcccagtggagaggggaacaagtggggctgggcatatacctattccggcttctagtgggatggagttggggtatagaaattaaccaggaagatgtttccaccaagcctgctgtgagtcaattgagggagtgtttggggtcccaggagacttggacggggggagtttgggtagactaggaaaggaaagtgccatatcagggtaccggtaccggcaagctcacatctcagccaggggccatgccccacttcccctgaccccagctgtcttgtctccactctgtgaaacccacaggggatgtgataaacagggctattaggggtatcagccacgtcgagcccccagactctgtgcacttcagaccagcagcagcaggagggctcccgagggccttatgagaaaacctgtgtggacatcccttggtgtacactaagacagagcagagcccagcgctcccaagccttcctccttccagcttctacctccatgctagcattgctggtgttagagaggaattaacttcctggtctgtgcccttctctagaagaatataagatgctcctcctcctcaccccttctcagcctcctcccaagtcttcctcttctgcaccacccccgagtccaaacccacctcttgccccagcattcaggctggaaaacactgatgtggactcagtatgacaactgagatgggggaagccagacatgtgaggacgctgtcctccgagaggtgtccccggctgttagccagctgtgctgtggtgctgtgggtctgtcataccctcccttgcttctgttcacactgggaggcccactcctggctcacctctccctctcagggacccacgtgggagcctggatccctggactgtcctgggcataggtttcaggggcctcctttgttgtcatcagaacccagaggaattcttctcctaaaaaatacgtatggcataccaatctgtgcggggcagtgtcctaagcacttagactacatcagggaagaacacagaccacatccctgtcctcatgcggcttatgttttctggaggaaagtggagacacaagtccttggctttagggctcccccggctgggggctgtgcagtccggtcagggcgggaggggaaatgcaccgctgcatgtgaaccttaccagcccaggcggatgccccttccccttagcactaccctggcctcctgcatcccctcgcctcatgttcctcccaccttcaaagaatgaagagccccatgggcccagcccctgccctgggaaccaggcagccttccagacctcaggggctgaggcagactattagggcagggctgactttggtgacactgcccattccctctcaggccagctcaggtcacccgggcctctgacccaggcctgtcactttgagaggggcaaaactgagaggggcttttcctagagaaagagaacaaggagcttgccaggcttcatgtagccgacacacgtctcaggattttaagtccacattggcctcacactaccagggccaatgcccaaaataaggagttccaatttggggccaaatgaggaaggacacagactctgccctgggatctcctgtgctagcggccaatgacaaatccagtcattggccaccagccacctctgcagtggggaccacactagcagccctgactccacactcctcctggggacccaagaggcagtgttgctgtctgcrtgtccaccttggaatctggctgaactggctggsaggaccaagactgcggctggggtgggcagggaagggaagccgggggctgctgtgagggatcttggagcttccctgtagcccaccttccccttgcttcatgtttgtagaggaaccttgtgccggccaggcccagtttccttgtgtgatacactaatgtatttgctttttttggaaatagagaaaatcaataaattgctagtgtttctttgaaaaaaaaaaaaaaaaaaaaaaaaaaaaaaaaaaaaaaaaaaaaaaaaaaaaaaaaaaactcgag

SEQ ID NO: 29 - DNA, 1402 bp, Homo sapiens
ggcacgagtcaccctcttctttcgtcacccgtccccgaccccacccgagcccggcgcctcagctgcccccggccatggcgtgcggaccactctgaaaaggactctggatttcgacccgctgttgagcccggcgtccccgaagcgcaggcgatgtgcgccattgtcggcgcccacctcggccgctgcctccccgttgtcggcggccgcggccaccgccgcctccttctccgctgcggccgcctcgccgcagaagtatctccgaatggagccatcccccttcggcgacgtctcctcccgcctcaccacagaacaaattctgtacaacataaaacaagagtataaacgaatgcagaagagaagacatttagaaacgagtttccaacagacagatccgtgttgtacttctgatgcacagccacatgcatttctcctcagtggaccagcttcaccagggacttcatctgcagcatcctcaccattaaaaaaagaacagcccttatttactctacggcaggttgggatgatctgtgaacgtttgttgaaagaacgtgaagagaaagttcgagaagaatatgaagaaatattgaacacaaaacttgcagaacaatatgatgcgtttgtgaagtttacgcatgatcaaataatgcgacgatatggagaacagcctgctagctatgtttcatgaatcacgtatcctgcatttgtgggctgccttgttccttgttgagttgttgcaagaggtcccaattatgacatgcagcaatgccaataccccttctgtgaatacaggttatttcaagctttcgtcagtggcaaccactcttaggcagcagcaactggttttggaaatttccctgatgtcagtaccacctggatgtggacctttgctacctgtattaataccagtggcctcattttgctgtatcattacaatttggcttcttatattaatgtttgaaaaggattaaagctggtattctagaacatgcccttcactggttgtgtaaataaaactgtagaatgacacttcagatgaagttagtgtgattttaattgtgcactacaaccgagctgtaaccagttactaattttagaatgtaatcccaggacaatattaagcaaatagcctgcagtgcttcctgtgaaatagtgaaggaggagggcatttctgtattccaggacttcttggggtttcagaatgggtttgtatgatttttttttttttttgtagttttatttattctatcagtctttttaacaaatgtttattgctgcattttttttttttccagtgtatcattgttttactgcccttgtagtactggaatttagttggaagaataaaacatttacttctaaaaaaaaaaaaaaaaaaaaaaaaaaaaaaaaaaaaaaaaaaaaa

SEQ ID NO: 30 - DNA, 841 bp, Homo sapiens
  SITE (23): n equals a,t,g, or c
  SITE (45): n equals a,t,g, or c
  SITE (69): n equals a,t,g, or c
  SITE (84): n equals a,t,g, or c
  SITE (762): n equals a,t,g, or c
  SITE (767): n equals a,t,g, or c
  SITE (782): n equals a,t,g, or c
  SITE (789): n equals a,t,g, or c
atttttgggaatttggcggttanatttacccggaacggttttccnttgttccgcaagtcgaattacctncctaagggaacaaangtggagttcaccgggttgcggccggttttaaactagtggacccccggggctgcaggaattcggcacgagatcctgacccaagctcaggcacacccaaggcacctgcctctctgagtcttgggtctcagttcctaatatcccgctccttgctgagaccatctcctggggcagggtccttttcttcccaggtcctcagcgctgcctctgctggtgccttctcccccactactactggagcgtgcccttgctggggacgtggctgtgccctcagttgcccccagggctgggtgcccaccatgccccttcctctttctcctcctacctctgccctgtgagcccatccataaggctctcagatgggacattgtgggaaaggctttggccatggtctgggggcagagaacaaggggggagacacaagtagacctcaggtagaacgacactgggcggagccaccccagggcctgctcccagggagtgctcgaggcgcatcaggcccgttttttaccagtttatatcacggtcttcatttttaaaagtaacgctaactttgtagggacgatgtctcatggattaaataatattctttatggcagtaaaaaaaaaaaaaaaaaaaaaaaaaaaaaaaaaaaaactcgagggggggcccggtacccaatkcgccctrkagkgmktcgnattanaattcactggccgtngttttanaaattcgtgaatggggaaaaccctggggttacccaacttaaacgccttgcag

SEQ ID NO: 31 - DNA, 966 bp, Homo sapiens
  SITE (130): n equals a,t,g, or c
gcgaatgacttttttaagctctttaagggttaagtatattagccatttgtgctatgaatcacaaatatttttctccaacctcgttttctttttctttttttgccatgggagtattttttatattacgtantttaacctctcagtgctttctttcatggtttctggggtttgtatccgcagaaagttttgagcagtggtccatatctgggagttagaaagagcccaagagtgctgatatgaggcagaccaatggagtgagacgagtctgggggaccccgggttctagttcaagtagttcagacaccagtgtgaagacagtgaatcatggatctgagcagtgattaaaaaagcctaacctctggtgggggggagtgggtggtggccaggagagaagaggagtcacctctgggtgccaagaatgctggaggcagggtccggcctctgcactcaggccccttgctccctgcccctgcccaatccaggaggagctggagttctgtgaaaagctgctacagacctgtttctccagcccagcggacgacagcatggatcggtgaaaccaggtggcttcttgcccccttctccgtgggaaccccaggcctcttgcctccctccccacctacaaggccctctcccaagggatcgcagggcctaggtgcctggacccagggtgtgccagcccgtctctgtgcagtccctggaaggggcgctgagaaaggcaccagctccttggaccccacctcccatgctctcactctcatccccgttctcttgtccacacagctcttccaataaaggtgtttctcttcctccttctcctccttcactgccgcctttgtcatctcctttggagggtgcatgggggacgggaggaggggcacgggtttaagggacttggggagccactggaagaataataaaagtgttgctctttatcatctaaaaaaaaaaaaaaaaaactcgaag

SEQ ID NO: 32 - DNA, 1005 bp, Homo sapiens
  SITE (883): n equals a,t,g, or c
gagtgcctttaccttggtgctaagagtccctccagattagtggctttcccgtgccctttctcttctctgggctgctaatgccttccttccccttattagtaatattactgataaacaaattgtacattctctgatctcayttcagaggctgtttctgtgcactgaagatgtacacacagtcttaattcaaaagagatagcatttatgtgctgccacattraacagattgcaacagtattactattgagtttgtgttggctctgtgcaaccctcatggtgcccaggaacagatgaaaccaccagagacttggagcctcaggttcattcaatggtgtcccagggaacggggttggagggcttattcccagaaggcctctgaaatgtaagagctattaacaaggagttataagtcatttttggtagctataggcccaggcaatgggtagagatcaagatgggataaatggtaagatcagtagagtattgctcagataaatatgtaagctattttactggcacactgtatctagtgatattaacatgataagctataggtaggataatttctcatcagattgcagaaatacatttatagcctatttcctgttatataatgaaaagctactaatggggtagtagacaatgatatgggtaatagcttaracagccttcgttgtcacttacctgaattcaggaatgwcaggtttctttcatgcatgaggtactggatacattaaacacacacacacacacacacacacacacacacacatatggcattgagttctagtcatatcctaaagaaaaactatggtgcgctatgttatttatagtactatactctgtgtgagtgactctgtgtgtatgtgtgttggtggaggtncagggatgacttgtttgtaatataccttaaggaagtctgtccgaatttgcccttcaaatactaaataaattcatctctcacctcaaaaaaaaaaaaaaaaaaaaaaaaaaaaaaaaactcga

SEQ ID NO: 33 - DNA, 464 bp, Homo sapiens
ccacgcgtccggagaccactgtcggctagcagcggctctcagggaaggcctggtctccaccctcccagcctagcctcgcggaccctcgtcctccccacatcggacctgctcacctgcctggaccctgggctgccagatgcaggaagcatcaaaccccccagcctcgtgggtgcggggcagggcgcaggcagcacagcttagatgccctggtttgtccctcttgtctcctgggaagagcttgctcccgcccagctctcctgccactggcctttcagggttgggctgggcccagagtgccttttagtcgcttctcacggtggcctgatggctcaacccagtcccaaacgggcccagtgacactgccgactgcaccccagctcaggcccccactgcaccagcaatgctagaaaaccaagccaataaaagtgatttcttttttcattaaaaaaaaaaaaaaaaaaaaa

SEQ ID NO: 34 - DNA, 839 bp, Homo sapiens
  SITE (823): n equals a,t,g, or c
gaatatatttgtggtttccttcagctcgatgtctgaagattctcacaggttcagggactattccaagtttgcaacctgtgtgtggattttgaaacaaatacagacaacttatgagacggtttctttgctgggcttcttgcttgacacagttttctgaaacatggctctggcaggcttttttcttccatggacacattgctgccgtttatcactgaagttcctctgtggagttaccaggagctaatatttggatgatgtacttttcttgcagaaaatattagcaaatgttgcagaaactgtgctttaaaacttttaaaaggggaatggattcccagtttaaaaataagcmaaagaaaggataaacatgatttcattgatggtgtgcaactgctttagaacatcagatattttgtgatgtgaaatgggatgatactctattttacaaaatgtgtactgcttatagaaaatgtatttactgtaccactaagccaaacttaggtgttgctttgtttccttaaaatattttttgagtcgctgtggctgccccacagatgatgggggagtaggcattctttctgcccagagcacttgttctcttcctccacccttttggttgttattgtagcatcttgactttcagcttaacacatcccaacttaagcagaagcccttttgccttctctctctttaaaactagatccatagaaattatttttattacagtaatagggcaagatagttttatgtcatatataaactggaattatgtagtgttagtagtagttatgtctcctgaaaggaaccagttgattataaaaaaaanaaaaaagggcggccgc

SEQ ID NO: 35 - DNA, 1102 bp, Homo sapiens
cccacgcgtccgcaaagttgcattgctcttcaggaggctgagacgaatgcctgcctcccagggtcattgcaaaggttaaatgggtattaaattggtgaggtgccaaaacagggccctgcctgcgatgagagctcaagatatgctcatcgttttacttattaatttgtcctctgaaccatcgtgttaggattttaaaaaggagcatttgttctcatgtggaggctttagtttcatgccgcgacctctgagctggcatgggtgtgagttaggggcagacggtgtggagggcgttccctctcaccatttcttatgtgttctgtgcgcagctcttgtcctcaaacgatgccacgacaacgacacccagcctgcagcctgggaaactgatactcttgaggtcaaaggacttcctcaaggccaagcatctgggatgtgggagagctgaacgtaaaagcattctgttgggcactttggccaagccatttccattgcacggtgtggttctcaagtccacagcttagcgggggcctattctgaatactggcacaggttcgaaaaatttcattcgtatgcatgtgtatatgtatacacagagacacataaaaatacacatataaattatatatattcatatatatatatatacacacctacacatatatatacaatgtgtatgtacaccgatatgtatttgtgtgtctgtgcccctgtatttttattcaattattttactttatttttagctctttaatgtgtattcatttttttaaaagtacaggaaatggccagacgtggtggctcacgcctgtaatcccagcactttgggaggccgaggtgggcagatcacaaggtcaagagatcgagtgagaccatcctggctaacacagtgaaaccctgtctctactaaaaaaatacaaaaaaattagccaggcatggtggcgggcgcatgtaatcccagctactcgggaggctgatgcaggagaatggtgtgaacccgggaagtggagcttgcagtgagctgagaccgcaccactgcactccagcctgggtgacagagcgagactccgtctcaaaaaaaaaaaaaaaaaaaaaaaaaaaaaaaaaa

SEQ ID NO: 36 - DNA, 1112 bp, Homo sapiens
gatttggattacagcagcatttcctaatctaaactatcctgcatatcaagcaaagtatttcaatttctccaccatgagccaggcacagtggcttacacctataatcctagcactttgggaggctgagggaggaggacagctcaaactctttgcctcaagcaatcctcccaccttggcctcttaaaatgctgggattataggcatgagccaccacacctggctatgatggttaattttatatgtcaacctgactgggtcatagggtaaccacatatttggtcttactctgggtgtatctatcaggatatttctgggcctcattcaacccattgaaggcctgtacagaacaggaaggctgattaagagagaatctctgtctttgaggtggaaaatcagtcttctgccttgtraacgtggactcagactggaactcataccgtcagctctcttggttttcaggcctttggaattggcctggaactataccattggctcttctgggtcctcagcttatcacctgcagatcttgggacttctcagcctccagaaccatagaagccaattccatatagtaaagctctgtctctcatctatatatcttatcggttctgttyctctggagaacagactaatgcatccatattgacaggaaaatagttcattcattgtaattgctgtatactatgccactgaatgagcatatcaatttgttccattaccctagtgaagcattattgggttgttcccacttttcccctcttataaatcaatagcaatgcagtgagtattttgtatgtttacttgggcctatgtgttagtttctccaaaggaggaaatatcactggtatttagctttaccagttgttaagttgcttttccgaagtggttatgtgaatttcactttcaccagcatttccctattctgttggtgttgagtggttctattaattttaatttacatatcattgatatctgataaggttgaggacttttttttattgatttattggccattagtatgtttaccctctgggattttcctatttatatccttccctccatctcaaaaaaaaaaaaaaaaaaaaaaaaaaaaaaaaaaaaagggcggccgc

SEQ ID NO: 37 - DNA, 2531 bp, Homo sapiens
atttttataccattttacaggtgaggaaatttaccaagtttaaataatttacccacagtcacagtaaagtccccaacctcaggtagtttataatgaagtggaggagacaagatgcataaagaagtgactattaatagtaattttaaaacagctattacaaatcagcataaaattatatgccatgcagttaacgaatgtcctgaattaaaaagagtgtctctactgctggaggcttcaataattaaacaaaataatgtatgttaatttgaacacagtgcatgatgcgttattatatttacttctattattattaattatggataagatgtggatgggtgcagagagagagtaggaagaggtacctcgtatatagaatctggaaaaaaaaggtagaattgtggacgacagtaggggtggccagaatatagtttgtatagcatagtgataggagataagattagactggtagattgtagctttatcttagaaggctttgtatgtcatgctgaaatataactgagccttccacaggctaaatggctaaattcgttgtgcggcattccatcctctgcttaagtggcttctggtgacagggctctcacagaaagcctcattaggaacagatttttttcctttggaggatttttttatattaggaatcaccttttattgaagcaaatccatctcactgtagatttcactccttgaaattaggcaaacaatgtagttacatagagtgaatctgcaggtcagacatttgaggatggctgtcatgcttctctaggttttttcataacctgggctactattaccagttccttcacccaaactatattaagcttgacactgaattcctctcttttaagtcagtttgtctggcagctctcctggaattaaattttgattctttcagatgactacacattaaatggtgatggattgggttttgttatttccagactatatatttttgtttcatctataattcctagcattgcttggtcataattttttttcttagaaccgtgattatatacattattaattagttttaaaaatcaaatccgcaagggtaatttaatcccagaatgaaaatgacctctatataagtatttcaaaaatcatttatttgtaatgagtaaaaatgttgaaaataaggcttacttttattatttgaatatggtaattatgtaattatccttttaatatgttaaggttatattctgtgccttagagtatgctaagcactttatacataattatcttatttaagcctcgtagaaatcttatgagcaaaatgttactcggtacacttaaagtacaggtaactgaggcttagagatgtaaaataatttgtccaccacagtgcttttaaaagatgctcgtaaccactatattgtaatttcaaaccctgattccattaatgctttttgttgtgttgcctttactgataattgtgttcaatattcccatgagggaggcagtctttgactttttatttatgataaagattattaaagtgcttaaagttttttattgtatagcgtgttttatcatcaaacaggttttagttttttaagttaaactgatcaaaaataataaaagctgatggctctatgacacttgcatttgagagaacaagaatagggagcaatatttcaagaaaatcattcttactgtttttcaaaactgtttagtgtcagagatgccccaagaccactcctaggtttattgtttcgatagaaggacttacaggattagtatatagttgcactcctgactaagatttattatagcaaaagaatacacagcaagattagcaaaggaaaaaggtgcatgggaccaagtctggaggaaatgagtctcgaactcctgacctcaggtgatctgccagccttggcctcccaaagtgctgggattacaggcatgtgccactgcacccagcctggaagtattacttttaagaattgttattatactttacttgaaagaaataaccactgctatagtattatatcataccaaagcatatattttataatttgggctacctagaattattattttttttttggaaatgatgttatatgtagttataaatcacaaatgacttggtaataaaggccatatgatcttcaaaaccaaactggaactagcatagataagacctgctgtttaaacaggtaactcttggttgagagaagataatggcagtcttgtctcttttttccctttattatgaatgcataacactgggtgttctgttaggcaagggttgtttcttgtttattgttttgtggccagtgcatagcacaaccaacgtttggcatatagtaggtgcttaaatatttatgaatgagtgagtatgtgagtagaaggagtaactgggctgggaatgatggctcacacctgtaatcccagtgctttcggaaactgaagtgggatgattgcttgaggccaggagttcaagaccagcctgaggagcatagtgagacccctgtgtctacaaaaaaaaaaaaaaaagggcggcc

SEQ ID NO: 38 - DNA, 954 bp, Homo sapiens
ccacgcgtccggttttgattcatcatttttatttgactcactagcagccatctgttagttacaatttaactttcaaggatctgcgtaatttgttttttgttaatgaagtgctataaacagcattatgaaggttttctcttttaatcttgaaaggaaaaaaatccgtctctaaaaaagcaatcacaaagaagaggaaaactgtcataaagtcacctactgtaccagagtttcaggtaaatgtttcaactttgtctcgaaatttttcaattttttgtttcagtgttcatatcattcctcgagagtttggctgaattccaagaaactgtagcacacttacttgtaatgaaatgtttctgacagtgacttttctccctgcaagtgcagatgtaaccaagatttaatctgctagtatttcgtaatttttacctctatttttgtcttttaataataaaaacccttttttatatcttaatctctactagtacatttcctagaagcagtttaatagaaatagtatatatatactatatagtatatgtgtgtgtgtgtgtatgtatatatatataatacataaaagcaaatgtgtgaatgaaactcttccaagaacaaatcataatttggagatggtaatagtgcctagatagttcgttttcatttatttgggcactgtagaaataaatggtagatttattaacttggaaaacaaatctttcaactcttagctgtatatgatcttcagagagaatattaagtaaaggttaattgaaatggtctttaaacatttctgtggaaagaaaaagtaattatctgtactgccatatgattaagtgaagagttttttatttgtagctaatactaagcagagaatctcaccctaattaatgcttttattttctattttataaaagatgtattttcttcaataaacactttctttaaaaaaaaaaaaaaaaa

SEQ ID NO: 39 - DNA, 3342 bp, Homo sapiens
ccacgcgtccgctgaaccggaccttccccgacaacgtgaagttccggaagaccacggacccctgcttacagaggaccctgtacaatgtgctgctggcatatgggcaccataaccagggagtgggctactgccagggaatgaattttatagcaggatatctgattcttataacaaataatgaagaagaatctttttggctgttagatgctcttgttggaagaatactaccagattactacagcccggccatgctgggcctgaagaccgaccaggaggtcctcggggagctggtgcgggcgaagctgccggctgtgggggccctgatggagcgtctcggtgtgctgtggacgctgctggtgtcccgctggttcatctgcctgtttgtggacatcttgcccgtggagacagtgcttcggatctgggactgtttgtttaacgaaggctcgaagattatcttccgggtggccctgaccttaattaagcagcaccaggagttgattttggaagccaccagcgttccagacatttgcgataagtttaagcagataaccaaagggagtttcgtgatggagtgtcacacgtttatgcaggtgtgtggggctgcacgtggctcagtcccctcccagggggccccgcctcacctgcagcccgggggctgctctgaccacccggagggtgcacaggacgggcaccagtgggcatagggcacaggatgagcctccagctctgtcctgcatctgccccctgcgcctggcctccgagggctttcctgtctatggcggccctgtcttcttggccctggcactgcggacgctgctcctggtcctaatggctgtactcatctgctgtgtgtggtgccagaagtgtggcttcccgaggcccggcctccccactgggtcctggacctggcgcaggccgtatagactcaggtcctgatgagggcgttgtgggagctgtacctgacaggccttctgaggaagccaagacgccaggagaggctcaggcctgggagtcagtagtttcctaagagggagtggaggctcggggccactctgggtgcagcatggcaaacgtgggcggtatttcagcagctgggccttcatcaaagagaagaccatgttggccgggcgcggtggctcacgcctgcagtcccagcactttgggaggccaaggcgtgtggatcacctgaggtcaggagttcaagaccagcctggccaacacggtgaaaccccgtctctactaaaaaatacaaaaattagccaggtgtggtggctcacgcttatgtagtcccagttactcgggaggctgaggcacgagaatcacttgaacctgggaggcggaggttgcagtgagccgagatcgcgccactgcactccagcctgggcaacagagtgagactctgtctcaaaaaaaaaaaaaaagtctaatggaagcagatggccttttcttccaccgtttgattcatttaacatttctgagcagcaaagctgcagtcctaggccccagggcaggagtgagatggtgacaatctgtgggtcaccccagaagcccttggatgtggactgctcctccctcacctcacacgaggcctgtctgtctgcctgccagtctgggagagctaacgtagaaatgggttgttgggtttgtttttaaactaactgtttgccttccagaaaatattttcagaacctggaagcttatccatggccaccgtcgccaagctccgcgagagctgcagggcccggctgctggcacaggggtgagcgtgcctgtcccctgcgttgctcgtctctacactgacgatgcccctttccagagttgacactggaccaactttcactgctttcctttttagtgttgtaaatacttgacatcactacactttagttgtgaattttttaaaagagcagtttaaaatcaggtcattctaccagcttttgatgattagctatgaagtcatactttttaaagaaaacttatttttacctgagagatcaataatatataaaatgtgagtgtgggtttgtatctaataaagtatgccaacacctgtgtttgtgatcagtttctcagctgactggaaattaacatagtgagtggtcactgaggtcttacagcggcagtgtcaatattccattcctttctgtgacagagcgtgcagtttatgtgaggcttctgcacgtagtaggtgatttctctttagaaagatcattttctcccttcaacttttaacttctgggtacaggtggagggtgtacaggtctgttgcacaggtaaacgtgtgccgtggtgatgtgctgcacagaccatcctgtcacctaggtatgaagccagcatcccttagctattcttcctgatgctctccctgcccccgacccaacgggccccagtgtgtgatgttcccctccttgtgtccatgtgttctcatcagaagctcccacttacaagtgagaacaagtggtgtctggttttctgctcctgtgttagtttgctgagaataatggcttccagctctatccgtgtccctgcaggggacaagatctcatacctctttatggctgcatagtattccatggtatctgtatgaaaggtaatttttttaatgatttaaaaattatcatgttacatgaatgaaccagacaactgtgccaggcactcgggccactcccaacaccattccctacgtctggcaccaagaccaccctcaccccccgtttccctgacacccttctctctgcaccgagaccaccctcaaccccgtttccctgacgtccttctctcatgagctcccattttagctgacagaaggacaaggcccaccccaaaaagaaagaggctttttattacattgttacaggcaatgcattacgtgagctggtcccgtgtacaatccccaagccacggcaaaacatcaggagaacgcaccgatctcacattgtacacagcgcagaacaggatcaccccgaatgtcaacagaagaccaaaaatcactttacaaaaaaaaataaaaataacacccatttttatatttaaaaaagtgccagcccttgagctgcagacattagagacgcccaaggacgtgccgccactggaacgaggccgccagccacgtgtggcccgtcctggcctttaaagctgaactgaagcgctccagacactcatctctggagttcctctgtcttaggattttccctctctactgttgtaatgtgtgagcatgtcagcctcaccacgagtgaccttcatgcgtcctacgtgtgacggccagaggctttccctttgtaaggcttaaatctgagtgcagtaaagaatgaagaaaccaaaaaaaaaaaaaaaaaaagg

SEQ ID NO: 40 - DNA, 620 bp, Homo sapiens
ccacgcgtccgcggacgcttgggtggccaccactcactcccacaacacagccaccatttcccacccagaatttcctgtgaaatgtgctcattttaaaacagcacacatcctgagaattgcaaagttgggcatagagatcaatacaaattagacttctttttagatacgctctacgctctgcagagccctctggggtctccaagggctgggacctgctggataaaactggatgaaactaagttgctgcttctttggtgcccttgaatggactttcttggctgcagtgacgttaggtccgcttcctagccgcgtgctgctctgccatcggggatgctaaagtcggggagggccaggaagcctttctttgcttggaagtttttgtttctccttcgcctgctaggttgggataatccgttgggaagtctctgagcgtctttaaacataaaatctagtttcaaaggtttaaattcccaagttgccccctaagttacatgttgcttaggcttggttgctatctgtatggtataaataattccatttagaaattaagaaattatgggctgcatttttgatgccagtggctctgtagtatcccccaaccaccaaaaaaaaaaaaaaaa

SEQ ID NO: 41 - DNA, 830 bp, Homo sapiens
  SITE (814): n equals a,t,g, or c
gagcttctactcctactcccaaactctagcaaaccactgatttgttttttgtacctatagttttgctaaaatatcatacaaatgaaatcaaacagcatgtagcctttttagtatggcttctttcacttgktataaaataataaaaattcatttatgttgctatgtgttttaatagttcattgctttctatttctgaatagtcttgcattgtatggatgtcctacggttgtttatccattagccagttgaagaacatttggttgttgccagtttgggtgattataaacccactctaaacattcatattcaagtttttgtatgagcatttaagttttcatttctttgatgtaaaatcctaggaatgggatcgtgggctctatatgataagtttattttaactttataattaaccaccaaatttttccaaagtgaaatattatcttgtactgccattgacaatgtatgagagtccttactgctccacatctttgttagtacttagtattgtcagtttttgttttgcttttagacattttaatagatgtctggtattaactcatttgcactttcttaatgactaataatgttgaatatgtgcttatttaccatccatacgtcttcttttataaaatatctattcaactcttttgaccatttttaactgtattgtttttcttattgttgagttttgagagtttggatatgtcctagatatgagtcctttgtcagaaatgtgttttgtaaatattttctgccaggctgtagcttgcattttcagtctcttaacagtgtctttcacagaacaaaaaaaaanaaaaaagggcggccgc

SEQ ID NO: 42 - DNA, 4054 bp, Homo sapiens
acgcgtccgagagggtagaggaggagagggaggaggaggagggaggtggcggctcctgctcctccaggcgctgcccagccccttgtcagccagggctgaacccccgcaggataaggaagcctgtgtgggtaccaacaatcaaagctacatctgtgacacaggacactgctgtggacagtctcagtgctgcaactactactatgaactctggtggttctggctggtgtggaccatcatcatcatcctgagctgctgctgtgtttgccaccaccgccgagccaagcaccgccttcaggcccagcagcggcaacatgaaatcaacctgatcgcttaccgagaagcccacaattactcagcgctgccattttatttcaggtttttgccaaactatttactacctcctttatgaggaagtggtgaaccgacctccaactcctcccccaccatacagtgccttccagctacagcagcagcagctgctgcctccacagtgtggccctgcaggtggcagtcccccgggcatcgatcccaccaggggatcccagggggcacagagcagccccttgtctgagcccagcagaagcagcacaagacccccaagcatcgctgaccctgatccctctgacctaccagttgaccgagcagccaccaaagccccagggatggagcccagtggctctgtggctggcctgggggagctggacccgggggccttcctggacaaagatgcagaatgtagggaggagctgctgaaagatgacagctctgaacacggcgcacccgacagcaaagagaagacgcctgggagacatcgccgcttcacaggtgactcgggcattgaagtgtgtgtgtgcaaccggggccaccatgacgatgacctcaaagagttcaacacactcatcgatgatgctctggatgggcccctggacttctgcgacagctgccatgtgcggccccctggtgatgaggaggaaggcctctgtcagtcctctgaggagcaggctcgagagcctgggcacccggacctgccacggccgcccgcatgcctgctgctgaacaccatcaacgagcaggactctcccaactcccagagcagcagctcccccagctagagcaggtcctgccagcacccagcaacttggcaaagcaaccagggtaggggagaaccacgagagaagcattaagtgactttcaaagactttcagagtacagccacttggttcctttttgtttgttttccttctcctctcctgcattttcctccatctccaggtacagttcggggtgtggatgcctcttcctccacaagggcacagtgttgtggagggctaagttggttctgtgactcattcctcataccctaactccatctcctttctttaaagtcaaatctcacctacctgtttgggtcagagagatgtgttttaaaagcccccaaggaaggaggctgggactgtgccctgacatgattcttggtgatggaataggtttgtgctctgattctagtttaagagaacgttgctgtatctcagtccaggagaggcagcccatcttggccctggatgaagaaggaaacccacagaggcccagggcttgtcattgggctgccagtgtctgccaagccagcattgagctaatcctgtgggaggatgagagctactgggccgttgtatgataggttggtagggcttgttgatctgtcaaattccaggtgacaagatctatgcaccccatgcgtccttgaggggccttttccccgcaggctctggctggccgcaggctggttctggtgtgaaaggttatactgccttttctttgtttgtttgtttttttctctaaaaacaaacagcaaaagacagctgaaaacaagaacttcaccggtgggcaggcaagaattctcttctggaaaatgacgtttgtggctctttcccaagttggccttcaaagagcctgcctgctgttgagccagaagatgtctcgtgtgaaggctggggtggcggctgtcttggaacctctgtgagcaggaggccctaagccgcaccagtggatagaggtgcagctctctgcctctctgccctttggtctgtgttcacaggtgaccccgtgtcagcctgcatcgcaagcacacaccctgcgggccttcaagtctcactgttccgtatgaggaaccagacagcggactgaggaagcgatggccccagagaaagggcccctgtagcctggctctcacacagtattttatctttgattctgaataaatattttttgtggggttttttttttttttttggtggcagttgtttgttttaaactgaccacttggaagaaacaccttggttatctgtggttttcatgccttgtccctgcctctacccccaccccttttgagtcgggtgactcatttttctgtgtagagactcggtggcccaggcaggaggtgaaagcagccatccggaaggccctggggacccttgtgcctgttgctcgccttcaggtcaccagctgagctgcgataggaaaatctgaatggaggcagcaaacagccaaaacaaacattccccacccggccctgtgcatatgaagtctttcttcccccaactcttgaacgatgatgatattcagacgaagcattgatgttatggaagaaagaaagaaacaaacaaaatatatatatatatgtccaaaaacagacaaatccaagggtgtgaggtaaacgagtgtctgcatttagattccacaaaaccaaaatccatgttgaacaaagttaagtccgtacacagtgactttttgggtgagccgtgtgtgtctgtctgttgtgtgtgtgcctcaagccctgttttcctgtgaagatactttgagtggcagccattctctccacgtgaaccacacgtctggagcacagacaggcctctcaaggtcattgatcttacgcatttactgtttaccgaacaaatgtctgactgtgtactcgggtgtactccgcagcattgtcgactgcagtcccctgtgtttgccagagatactgtgctcgaagtagaggttttactctactcatcactgcgatttgcacattgctccgtggacactcggaggcctgcgttctgttccctataaatggaagcgtgctctgagcctgtctgcctccctcggctgctgctggtcctcagtaccagcgcccgggggtgtccacaaccacttgggacagaagaaggtggaatttcagacagaagcttgactgggtcttcaatgacaggcttggactagctgtggcccagacatcggccctgcccagaattgccaggaggaggctttgcaggctctagaggagccgcagggcctgcctgcctctggtgagtccaacaggcacaagcaagctggcgtgtggccagaggtagccggagtgtgtcacagcccctcagatgcctttccttccacctttttttattttttaagaatcccaaataactcactgaagtgtctcaaaggcgaacaagttttaccaaaatgaatcctttttcagttaacagatcaaatggatgagttctgagcctctcaagttcctttccccagttagagtggggaactgggcaagtgttaactgtgggactcactgcagcgtcctatcctaaaggcacgaaaagacggaaatgcaacctgcggagctgggcttggttccccaggtcacagtttggcccccgctacaggatgctgccctgctcagagagagatttaatagggagctgaaggaatcgttagggggccagggagatgtgactgaggctggctttccacgtgaatgagacggggtcggtggagggtttggtgctacagccagtcagaagatttgcaaatgcgaacacattcctgtgtgaggcacgttaccctttgtcagttattgtgaatatgtgtattttaagcaataagattcagctggtcagacttttctgggcagtctcagtgacgcatttcctgtgctgtgattgttctgaagacagagtggctctaaccactgtgagaagcccaaataaaaattgatcccaaaaaaaaaaaaaaa

SEQ ID NO: 43 - DNA, 452 bp, Homo sapiens
gataaaataagattttcatacattaaacaaggtaggatttttctatctgggacggaactttcaacacttggaggggttgtagttatttctcctcaaagatggcaaacatgagtgccccgagttatccctcctctctgttcaagttcgctaactaatcacccagtatccatgctatcgctggcccttctgtggcctatttttatactgttcactgttcagtgtcacttgtttggtaacactcaacatcaacgtgtgctaccaaattgacaccagaggacaaaaaagaatcaagatatgtacagcctgctttgtactgagccagctgccactagatgttttttgtgataatgaacacgtgaggccatgtggacgcgagagatggctccgggttccctcagacggctcacagccagctggtctgcagtgcggytttagayyccgatgtgggaacc

SEQ ID NO: 44 - DNA, 625 bp, Homo sapiens
gataaaataagattttcatacattaaacaaggtaggatttttctatctgggacggaactttcaacacttggaggggttgtagttatttctcctcaaagatggcaaacatgagtgccccgagttatccctcctctctgttcaagttcgctaactaatcacccagtatccatgctatcgctggcccttctgtggcctatttttatactgttcactgttcagtgtcacttgtttggtaacactcaacatcaacgtgtgctaccaaattgacaccagaggacaaaaaagaatcaagatatgtacagcctgctttgtactgagccagctgccactagatgttttttgtgataatgaacacgtgaggccatgtggacgcgagagatggctccgggttccctcagacggctcacagccagctggtctgcagtgcggttttagattccgatgtgggaaccccataaaaaagaatatgcaggccaggcgtggtggctcatgcctgtaatcccagcaatttgggagcctgaggcgggtggatcacctgaggtcaggagttcgagaccagcctcgccaacatggtgaaatcctgcctctactaaaaataaaaaaaaaaaaaaaaaagggcggccgc

SEQ ID NO: 45 - DNA, 1193 bp, Homo sapiens
aagctctaatacgactcactatagggaaagctggtacgcctgcaggtaccggtccggaattcccgggtcgacccacgcgtccggattttctacatgaacttttttctaggactttggttactatacatattgtatattttaagaattctttatacaattttaatatactgcaatactgcagtttttgacaatttggattccatttggtatatgaatttttgcattcattattgaataactcttttaatatttttgagcaatgattatactgctttaccttgtgtcactttttttttttttaggaaaaactcatgttccagtatatttctcttacagagtgaagtcattacagcactgtatttctgtgttgacatttgttggcagtgtgctaagtaatgttttttaaagcacaggcttgaggactatggtttacatcctgttggaaacattccaaatgggacttgtgtattatacccaggaggctctcatatataccatcttggcatctgtactgatgaataagttataatgaacagttaaaaatgctcattgaaaattaaataaaacaaaaaggcagttatttcatgcttggtcaaaaacatcaatacctttccaattaacactgagaaattaaggttaagattctccttttgtactgggaaacaggctggaggactatggtcctcaagtttagaccaagaggactatggtctcaaggttcaccatgagaaatgtgttgaacattttagtatgctctattgtataatttttttggagggggggatggagtttcgctgttgttgcccaggctggagtgcaatagcaccatcttggctcaccgcaacctctgcctaccgggttcaagtaattcttgtgcctcagcctcctgagtagctgggattataggcatgcaccaccatgcccagctaattttgtatttttattagagacagggtttctccgtgttggtcaggctggtctcaaactcctgacctcaggtgatctgcctgtcttgcctccggcgtaacactttttaagaccagtgtaacagaaagagaatgtagccattctagccaccgttaaaagatacacagtgaggtgttgtgttttgtttttttaatgatgaaaagttacacattttttggagagaaaagtcttagctgaaggtaaatcaatggaaaaaaaaaaaaaaa

SEQ ID NO: 46 - DNA, 1594 bp, Homo sapiens
gctcccagagtgtgccggggaggagatgaggcagagaagacagctggctcatctcctcccagagtgtgccggggcaggtaacttagttgttctgagagaggtgaccccctctcagtgtccatgagtcccagatgaattggccaagtcctagaaatagaggggctgcagagcggrgaggaagaggtcccaatgaccagcccttgactgccaccgtttgtcactggccccctggccctgttcccgtgatcccagtcagatgccacatttttataataaaactagggctgagcaggaargcgctggcarragttcattaccttgcttattttcaaactcttcctaacccttctgtcctggttgttgtttgacctgaaagatgaagagaacactgctgtcttctgtcatctgtctttctgcttcacctgcacagggccaagccccgtggcagtgcccagcggtcactggggacagtgctgaggttacttatcctgagaaacccttgcacggcctgtcccgcagagaaaagacagcccttccgggtccctggtttggtctgmgtcgtgggaaaggaccctagggcatcacaatcgcagccatgtaccctgcagctcacagagtcaatcagtttggttttatttgcatttgaacagaaaccttgagaaaaagaaagccaatttgtttatcttctaggggataaaaataggcaagtgtggcagccctgtggccacgcaggtcagacactgcagcagtgacactggggttttattaatcaataggatgtagctcacttgttctgtccttttaaaaaaaaaagcccaccctggagaagagatgcttggcccagctcctacacaagggcagcagtcatctccggtccagggagctcttctggaggtttttgcaagtagattctagagaactgagagaacaagaagtcttccccactctgggcacatggaatcttcattcaaagagtttggtttgaattgagagctctcagttttgcatatcaggtaactatgatgtgaaaagatgaagcggcctctttacctctcagagtcagcccagaccctcttcgcctcccctcctctcagagaagctccctcgtccctttctcctccttttgactagagctagtgggtggagagagtaactgaacgggaatttcttagtgttattctctatcaataatattttaattgtcagtgctatagactgggtggctgggggttgggagctggtggctcttgaaaatcaccaagtggcagaaaggaagttataggaagaacataaaggcttagtgccagtggtgtcaggtaatgcatattgatacctcaactaaaagaacatttggggctttattaaaattgactaattcttccaaagatagcagctaaaggaggacttagatgaatagaggagggaggaggcttgcaggacggtgaagccctttgcttccagctctctgcctgctcagccattgctccgtccctctgcagttagattattccttgcagatagcaatcaactggaaggaagtgtctgtgtctaatttgcatgagattatttaaaacaacaaaaaaagggcggccgc

SEQ ID NO: 47 - DNA, 1762 bp, Homo sapiens
  SITE (10): n equals a,t,g, or c
  SITE (41): n equals a,t,g, or c
  SITE (1748): n equals a,t,g, or c
  SITE (1752): n equals a,t,g, or c
  SITE (1756): n equals a,t,g, or c
  SITE (1760): n equals a,t,g, or c
  SITE (1762): n equals a,t,g, or c
gcgccccccnaaaaggccttcctaaaattaccggcctcccncttattaaggggaaaaagcttggttaccgcccttgccaaggtacccgggttccgggaattttccccggggtcgaaccccacgcggtcccggttaaaaattattttttgccatatgtaattttgtgttgcaggctgtcgagagataaaaatgattttaaatctgtgtactgatgattctttcggtgttaagaaacacagggttgtgtacttccctttttatgggcttatggattctatttatattaagacctgtttataattgttttctgccaaagggaattgtctaacttcagatttctacattgggttcatacttactgttttatatcagaaataaaaaaatagcttctgctttttcatatgaaatcttggtacatcagaaagaattcctgaaaatttataatagaatgaattttattaatgcagaaaaataccccagggtgttaaaatatatgaagtgtgggatatattcttatagtttgtaaaatgtagtcaaccaatactgtcttctaatttggtaatttatttataaaattacttaaacattaggtaattatatttgttaggatttgaaattatttgtagttaaattgtcatgctgtttgaaataattgatacttgtctacgtaatacattttactgtatgttttgaagatggttataatttcactttcaaaatttaaaaaatcaattttaaatgttttaaaaacatatagcttagggatttttttaaaaaaggttttcttagtaaaaacataaatttaaaagcccctgagttctaggagagggcttattgaattgctataagaaagctggagttactttgataagtaataaattataaatagcactgatctataatgctttatttctatcggaaggtactttttcttctttcatcatcagttttagccagttagtaaatgggaatactcagttttagggatttgatttttgtttggtttaattttctttcaaaaattaaaagtatatttctaaaagttttccccagaggccagatacagtggctcatgcctataatcccagcactttgggagcctgagataggagtattgcttgaggctaggagtttgagmccaacmwggcaacatggcaagaccctatctctacaaaaattttaaaacttagccaggtgtggtagtgcacctgtagtcccagctagtcagtaggctgaggtgggagtattgcttgaggctgcagtgaggtgtgatcacgccactgcactccggcctgacagaatgagatcctgtctcaaaaagaaaattccccagaagaagaattctaattttatcaagctgaattaaagtttgagagtcttttttttaaaatcttactgtgtcaaaagaggcattatgttgcttgtgtgatatagtgaatagtgtccctccaaatttcatgtacacctggaatgtcacaatgtgacttaacagtagccacccctcacccccgcccttatctgtggtggatacatttgcaagatccccagtggatgcctgaaaccgcagatagtactgaaccttatatatactgtttgttttcctatgcatacatatccctatgataaagtttatgaatttggcacttaacagcagaactaataagatgaaagagttgtaacaatatactctaataaaagttatttaaaatgtaaaaaaaaaaaaaaaaagggcggccgctctagagganccangctnacgnan

SEQ ID NO: 48 - DNA, 1042 bp, Homo sapiens
ccacgcgtccgtaagaccaacacatgggactgctatacatggttcttctcaaatccattgttttcttttctggtgtaagtgaagaattgaaggcttatggggtcggtctacagaccgttattgagttcctacagaatacccggttctgggcttggcgctggatcagtcaggccctgttgggtcttgcactcaaatgacaaacgtacaaggcttacaccgtgtgtcagatggcaatggtgaagcagcatcagggagttggggaggagaggtggactgctttttttattggagggaggtcaagaaggatgcctgaataaggtaacatttgagcagagtcctaaagacagtgaggggacaatcatcagactagcaggggaaaaagaactccaggtggggggaacagcaacggcaaaggctgtgaggtagaaacgcaataacgtgtttgaggaataaggaggccaggtggctggaatggaggttagcaagggaatgaggtaggggcagttctgcgggctttgttaggattctcttggaggaaagcttattaccacagcgactgagagtgctgccattagcctatgaccctcagctgtcagcttgttcagaggtggcttagctgcagatggctggcttcccacatccgatgactgaccacagtagggatatgagggtctgaccatttctgcccaatgctgtccaactctgatgggccattccagttccaaggctcctgcgggactgatggaggctgttcatgggactgtatccctccctggcttctccctctgcccagttctcatgcctttccttcctttccactggtattgatcccaagggtacatgcttagtgccatctcaggactcagtttctccatttagtgtgattgaactacgtgcatttgccagccctgtagtcccagctactaaagaggattgcttgagcccaggagttcgaggctggaatgagctatgattgcaccactggactccagcctgggcaacatagcaagactccgtctctctaaaaaaaaaaaaaaaaaaa

SEQ ID NO: 49 - DNA, 855 bp, Homo sapiens
ggcacgagctcaggcataccaggttatagctccaagttccacaggtctgctaccacaggccatcaaaatataagtttccaggctttgcagaagaccttgtctccttagaaatgccccagaaattttccacaccctcctcggtatccatggagagcctggggccagatatctggctcatctctggcattgcttcctctccttccttcctgcatgtgttggtggtggttgtggtgggggaatgtggatgggggatgtcctggctgatgcctgccaaaatttcatcccaccctccttgcttatcgtccctgttttgagggctawgacttgagtttttgtttcccatgttctctatagacttgggaccttcctgaacttggggcctatcactccccacagtggatgccttagaagggagagggaaggagggaggcaggcatagcatctgaacccagtgtgggggcattcactagaatcttcaatcaacctgggctctccccaccccaccccagataacctcctcagttccctagggtctcttcttgcttgactcaatctacccagagatgccccttagcacacctagagggcagggaccataggacccaggttccaaccccattgtcagcaccccagccatgcggccaccccttagcacacctgctcgtcccatttagcttaccctcccagttggccagaatctgaggggagagcccccagagagcccccttccccatcagaagactgttgactgctttgcattttgggctcttctatatattttgtaaagtaagaaatataccagatctaataaaacacaatggctatgcaaaaaaaaaaaaaaaaaaacctcgtgcc

SEQ ID NO: 50 - DNA, 1120 bp, Homo sapiens
cccacgcgtccggattttggacactgccgtgattaatttgaaaggacgatactttgcctggacttgttaaaagaaaatgtgaatttaaaagatgttaaattttaattaaggttgtttttaattgttttgaagcaacatagtcttcattaataataaaattgctggacagaatgatttttaaaagacagcctatcagttttaatgaagtatctagtttttaaaatgggtgcgttagtagagcttttatatatttttcccttcctccttccttcctttctttctgaaaagttactagaaaagaaataatagtgaacaaaactgatctagaagaaaagatggaaggacataaaacactaggaatgaaataaggcataattataactatgccaggagctcgtgtatcacaagaacaggtgcagctttagtgcactaagtttgaaaagctgaatgaagcttactatagtaaaataccagttattaaaattggcttgcagaaattcgtccaatataagtaaacaaccaatagcaaccaggtgtaaatagttttataggctaatactaccaaacctttaaggaacatataatttctgtgttctagaacttgggaaaagatggagagttcaaaactcacaccgtatgcctagtataacctcaatgccaaaccagacgtggcacgcacagaaaaataaaatcagaccaaagtcatttgaaaaaaaaattcctatatttatgattcaaaactcagttattttataaaataataatattaagtggataaagaaacgccagttgtactatcagctaaacattagaaaccttctcatcaggccaggtgaggtggctcatgcctgtaatcccagcactttgggaggccaaggcgggcggatcacctgaggttgggagttcaagaccagcctggccaacatggagaaaccctgtctctactaaaaatacaaaattagccaggcatggtggcacatgtctgtaaacccagctactcaggaaggctcaggcaggagaattgcttgaacccggaaggcggaggttgcggtgagccgagatcacgccattgcactgggcaacaagagcgaaactccgtctcaaaaaaaaaaaaaaaaaa

SEQ ID NO: 51 - DNA, 1278 bp, Homo sapiens
  SITE (20): n equals a,t,g, or c
gcctcaaggtcccggtccgnaattcccgggtcgacccacgcgtccggccgcagccacagcttgcacgttgcgccgggtgtgtctgtgcgtgccagctgcatctttgcgtrccatgtgtgcaaggctgtgtttggctgagtgttcatgtggsccgtgattgtgggcatgtttctgagtgtctgagtgatgcctgctggtgtgggctggtgggtgtgtctgcatgtgcgtgtgtgtctggggagtttcaaaggagaaagagggactcaccatcacgctggctcagccttaaaaaggtaggacatcctgacacgtgctgcaacatggatggaccttaaggacattgtgctgagtgaaacaagccagaggcaaaggaacaaacatgtgatttctcccagatgaggtttctggaggaggcagatctgtatggacagaaggtagcatggtggttgccggggcagggggaggagagaatggagaattagtgtttaatggggacagagtttcagttggggaaggtgaaaaggttctggagctggatgatggtgatggttggacaacactgtgcatgcacttaataccmctgagctggacacctaaaaatgcttacaatggtaaatttcakgtatattttactacaatttttaaaaaattggctgggcgtggtggcttatgcctgtaatcccaacactttgggaggccaaggcgggaggattgcttgagctcaggagttcaacaccagcctgggcaatatggtgaaaccccgactctacgaaatatacaaaaattagcctggtgtggtggcttgcacctctaatcccacctactcagtaggctaaggcacaagaatctcttgaacctgggaggtggaggttgcagtaagccgagatcatgccactgcaacccagtctgggcgacagagcaagactctgtctcaaaaaataaaagataaataaaaaaattagaggccaggtgtggctcacacctgtactctcaacactttgggaggctgaggtgggaggatcgcttgaagtcaggcatttaagacatgcctaggcaacatagtgagaccttgactctacaaaaaaattcaaaagttaatgagacatggtggtgcacacctgtactaacagctacgagagaggctaaggtgggaggatcacctgagcccgggaggttgaggctgcagtgagccatgattgcaccactgcactctagcctgggcgatacagcaagaccctatctcaaaaaaaaaaaaaaaaaaaaaaaaagggcggccgc

SEQ ID NO: 52 - DNA, 742 bp, Homo sapiens
ccacgcgtccgggatcaacaactgcgtgggaagccggaattattggttcttcttcagcactgtggcctcggccacagctggcatgctctgcctgatcgccatcctgctgtatgtcctcgtccagtacctcgtgaaccccggggtgctccgcacggaccccaggtatgaagcagcgccaggaccctgaccaggaggacctgggccagagaagcccctcggggtgcaggacaagactgccagtctcagccccaggcatggctgcacccgcactgcacacagcccgggtggcgagacagggaggacttgcctgcccttgttccagaacattccggagccaacacggtgtgacatttttttcaaggatgagctttgccagctccacgtggaagtccctaaagctcctccttccacttcgaagcgtgactgatgcctccagggcctcacagccgcttctgaagcacttcctgaaagccagctccaccctggcgaggccctgacctcagcggacccaagcccaggacgatgcctgttgcgttcttctcccccagtagcaagtcaccttccccagcagcctccatgttgtctgggctctccctgtgggggatgccaggggagagtgagagagcagaggtggccaagatggcatgtgctgccttctctcctggaacatgctgcttccacagggcaaaaaaaaaaaaaaaaaaaaaaaaaaaaaaaaaaaaaaaaaaaaaaaaaaaaaaaa

SEQ ID NO: 53 - DNA, 1033 bp, Homo sapiens
  SITE (928): n equals a,t,g, or c
  SITE (958): n equals a,t,g, or c
  SITE (977): n equals a,t,g, or c
  SITE (1005): n equals a,t,g, or c
ggcaagtgcagtagagaaatgggccaagttctctggacacgtgtggatgtgtatattgtgttatacacaaggccccaaattcctgcaactatttatacatgcaattgttctgttgtttgctgagatggaaatcatatacacagagttacaaattcctgaaatgttccatctatatttgatataaacagacatacagtagctgagaaagtaacacagcttgactattgctctgtttaccttctattggaaaaaataattgtatccagaacaccatatcagccttatagcacgactgaatatcatgttgcaattaattaacaacctgatatctatttgggagcaaatttaagggaagactggaggcctaggaaatagaatacaaaatctcaaaactttttaaaaagaagtaattcctgaaagaacaaagcaaactcattccttcataccatgcttctgaaagctattccagcagcccytcccccaaacaggcatgtaatttatggatcttttacaaggtaataaaccacagtaattacctccctgcatcccaaactaagaggacaaattaagtcagaacttgaaaataatttaaaagagttttcccttgtttcaaataggaaaaggaaacgccaagacatagaaaaccacgcttttcccgtaggaagaaccgatgatgagccctgatgaaagaaggaagaagacccgctgtctgcgaaggcctaaaggttagaaatacagcaatttttctcatgccgaaggaaaggcaaaatggtctaagaaactgcaagagtgtgatacaagttttcctcaacagcgagctgggactggcgacaatttcttaactcacagcctccgcagtcgccttagtcgacaaagagagcagcccacgcagcggccgccggcccgttgcccgtggcctttttatttnctttttgccctgaaagtttcagttttagtnggttttttttgggggtttncagggaaggaaacaaacacatttccctntttgatttttccaaaaccctttttttgc

SEQ ID NO: 54 - DNA, 1913 bp, Homo sapiens
  SITE (12): n equals a,t,g, or c
  SITE (14): n equals a,t,g, or c
  SITE (398): n equals a,t,g, or c
ctcgcaagagantntttgtgtttctaatacaggatctggaagtagtgctttctaatcctcatttcctgtaggatgttcctgcactataacaagattatgttttcttccttctgcagcagctttctgcttcttgggtactactagctattgttcaattcaggtgaggcctgtgatgacatatatgtagcatgtgctctgcgctccctgcaagctgagcagatacaaccaatgcatcactgtatactcttgctgagaatgtggatgcagcctcacagatctttgcaacactccaaccagccaggaccagttgatcagaactgatcttattggtctgataaccaatcttatttgtgaactgattcatatctgtctttccactcttggttctcttgccgtangaacaaaaacagtttaggaagcataattacgaacatttaggaaccaatatgtataagtaattcggagactccaattcacctgcccctcccccatcccaggttgtggaggctcgaggaagctgacttcttaggctaaaggacaaaaaaatctctttacctccttggccattttcatgttctctgccaattactataggcagtcttcattttgcagaggtgaggtaagacttcatcttattcttcatgtaatcccaccttctaacaaaaaataaataaatatttaaattccaaggagaagtgttctttgtgtatttctagcagaaaacagatgcttaagcctaagaaggaagatccgtccatgacaaaggaaagtggaaaactgaaccagttatctgaatacttcatgccaggacagttgctattagcaactgttttgcaccttcagggctttaaaatgggctctgcagacagcatttgcatatgcaagactcagtagccaagcctccactgccaattgttgaaggcagtttcagatcgccaccttttgaggtacatttctttaagcacaagagaagtagaaatggcctttgccttgtctccagtggtttgtccctctggtgcctcagcagataccagagcttattcttatgaccatttggaagtagtcctcaaagtaaagatcaagaaaaaattggattctttttccattttctcataatagtagcctagtcaacacaagactcccataaaatatgactcactattgggagccatactattttataagcttacttcctgctgacaaaactagctttcctcaaggaaatataaaggaggggaaagtcacatagtgttaggaaaacattcctgtgttttgaatacgatgaatccataggatagagaaaaatctgcttgttctattctgagagttctctgagatatcccttcactctgcttggcatttggccattgatattcaacaggtcactgaccaagcttttctaaatttttcagagagagttacttaccaataaggtctgttcttaaacctacctagttgattttcatatctttccataaagtgtcatgattctatcatagaccctgacttaacattgtaaggactatgagtcctcccattttttaattaatttttttttagcaaattaggacttcggcaggttttcctctcctaaactcattctttcctccacaggattgctttgtccatctcctgctttcatttcaagtgcataaacaaaacctcaaagggcctgggaaggtgaggcaggccagagtctgtgttctgtgttgagtgtcaagctatttgttaagaaggtctgcaacaggcctttggtgtggctctgccagagactgttctgaacactttgcttgagatccgtgccctgtaaaatggatatgatgttttactgatgtctgtaatacatttgtaaacttccaataaaatttgaataaaaaaaaaaaaaaaaaaaaaaaaaaaaaaaaaaactcgag

SEQ ID NO: 55 - DNA, 1992 bp, Homo sapiens
  SITE (1950): n equals a,t,g, or c
ggcacgagccgctcctrctctgggggttgggactacctccttttccgcgggccccgcccaggcggctgcccgtgacctgcctgggcgcggggaactgaaagccggaaggggcaagacgggttcagttcgtcatggggctgtttggaaagacccaggagaagccgcccaaagaactggtcaatgagtggtcattgaagataagaaaggaaatgagagttgttgacaggcaaataagggatatccaaagagaagaagaaaaagtgaaacgattctgtgaaagatgctgccaagaagggccagaaggatgtctgcatagttctggccaaggagatgatcaggtcaaggaaggctgtgagcaagctgtatgcatccaaagcacacatgaactcagtgctcatggggatgaagaaccagctcgcggtcttgcgagtggctggttccctgcagaagagcacagaagtgatgaaggccatgcaaagtcttgtgaagattccagagattcaggccaccatgagggagttgtccaaagaaatgatgaaggctgggatcatagaggagatgttagaggacacttttgaaagcatggacgatcaggaagaaatggaggaagaagcagaaatggaaattgacagaattctctttgaaattacagcaggggccttgggcaaagcacccagtaaagtgactgatgcccttccagagccagaacctccaggagcgatggctgcctcagaggatgaggaggaggaggaagaggctctggaggccatgcagtcccggctggccacactccgcagctaggggctgcctaccccgctgggtgtgcacacactcctctcaagagctgccattttatgtgtctcttgcactacacctctgttgtgaggactaccattttggagaaggttctgtttgtctcttttcattctctgcccaggttttgggatcgcaaagggattgttcttataaaagtggcataaataaatgcatcatttttaggagtatagacagatatatcttattgtggggaggggaaagaaatccatctgctcatgaagcacttctgaaaatataggtgattgcctgaatgtcgaagctctacttttgtctataaaacactatataaatgaattttaataaatttttgcttyagcacttggccccattgtagattgccctgtgcagtaaactttcaaggtgtcrgctgccccagattgcttcatttgctgggtgtggaaagagttgctatggccaggcatatgggatttggaagctcagcagaagtgacttctgctctgtggttgctgctccccggctttcacagacatggtatggcagccattcttttatctatttaaccaagaggatgctggggaattgtgctgcttgtcctgttggctggtggctgcattatgtcctggggtgtgcatgtgggtctatttagagcttctgtcccttccttcccattgcaagttgcacccagatgagacagctgtagtactaggtctctttcacctctcattgcctgtccctgcttcgagctggttgtcttgtgcgtgggacatgggccttcctatctgtgttttctcaaagtcaggagctgaccaggagcacactaaggtgtggtcatgcatcataaccaacattcactcatctgggacattcttaagatacatttataaatcatttcagcagtagtactttgtatgtgttgagagtttacagagctctttgacatacgcgatcttagtctttacaaataaggaaaacagctcagtttgggaagtatcagagatgggattcaaacccagatcctctggtccaagttgtatgtgcactgaactaatcaggcaggaaaaaagcccagccactgtctcacagattgttttttgtatattgtagcaaaatcctgaaacaatggggtccttccagtctcatccatacaaaaantgggcaatcttgggctggggtgcggtgggtttccatggccct

SEQ ID NO: 56 - DNA, 1386 bp, Homo sapiens
ttgagggaatctgcccctcgagcctaagattccgccccggggtttgaaattacagcaggggccttgggcaaagcacccagtaaagtgactgatgcccttccagagccagaacctccaggagcgatggctgcctcagaggatgaggaggaggaggaagaggctctggaggccatgcagtcccggctggccacactccgcagctaggggctgcctaccccgctgggtgtgcacacactcctctcaagagctgccattttatgtgtctcttgcactacacctctgttgtgaggactaccattttggagaaggttctgtttgtctcttttcattctctgcccaggttttgggatcgcaaagggattgttcttataaaagtggcataaataaatgcatcatttttaggagtatagacagatatatcttattgtggggaggggaaagaaatccatctgctcatgaagcacttctgaaaatataggtgattgcctgaatgtcgaagactctacttttgtctataaaacactatataaatgaattttaataaatttttgcttyagcacttggccccattgtagattgccctgtgcagtaaactttcaaggtgtcrgctgccccagattgcttcatttgctgggtgtggaaagagttgctatggccaggcatatgggatttggaagctcagcagaagtgacttctgctctgtggttgctgctccccggctttcacagacatggtatggcagccattcttttatctatttaaccaagaggatgctggggaattgtgctgcttgtcctgttggctggtggctgcattatgtcctggggtgtgcatgtgggtctatttagagcttctgtcccttccttcccattgcaagttgcacccagatgagacagctgtagtactaggtctctttcacctctcattgcctgtccctgcttcgagctggttgtcttgtgcgtgggacatgggccttcctatctgtgttttctcaaagtcaggagctgaccaggagcacactaaggtgtggtcatgcatcataaccaacattcactcatctgggacattcttaagatacatttataaatcatttcagcagtagtactttgtatgtgttgagagtttacagagctctttgacatacgcgatcttagtctttacaaataaggaaaacagctcagtttgggaagtatcagagatgggattcaaacccagatcctctggtccaagttgtatgtgcactgaactaatcaggcaggaaaaaagcccagccactgtctcacagattgttttttgtatattgtagcaaaatcctgaaacaatggggtccttccagtctcatcatacaaaatggcaatcttggctgggtgcggtggttcatgccct

SEQ ID NO: 57 - DNA, 1733 bp, Homo sapiens
  SITE (893): n equals a,t,g, or c
ggcacgaggagatccgggatttgtatgttaacatccagcctgttcaagaacctaaagaccaagcatttggcaatggaaatggaataataattattgctgagacctccactggctgtttgtttgctggatcatcgcttggtaaacgaggtgtaaatgcagacaaagttggaattgaagctgccgaaatgctattagcaaatcttagacatggtggtactgtggatgagtatctgcaagaccagctgattgttttcatggcattagccaatggagtttccagaataaaaacaggaccagttacactccatacgcaaaccgcgatacattttgctgaacaaatagcaaaggctaaatttattgtgaagaaatcagaagatgaagaagacgccgctaaagatacttatattattgaatgccaaggaattgggatgacaaatccaaatctatagagtatttgcctcttaaatgatacctcattgatatattgcactatttcataaatactataaaataatgactaggaagtaacttattaaaggctatgacttaaatttgaagatgaagtacagtgttctaggtttgctgagaaggctcattaaattaatctcactttgaatatctcctgagagatggacaatgaaatatcagttggtggatatgtgtgatagctgatttcaatattgaagtattgaaataaaatattctttacacctgaagtaaatacatttttcttttttatgtaattaattaaatcagggatatagatttgatctgtaatttgggtataattctaatctttgctgaaatcacatctcaagtataatgaggcaactttatgcaaatgtacttgttgtgacaacaataacattttcctttttttttttttttttganacagtctcgttctgtcacccaggctggggtgctgtggtgtgatcttggctcactgcaacctctgcctcccgggttcaagcaattctactgcctcagcttcctgagtagttggtattacaccaccatgcccagctaatttttgtatttttagtaaagacagggtttcaccatattggtcaggctggtttcgaactcctgacctcgtgatctgcccgcctcggcctcccaaagtggtgggattacaggcgtgagccagcgcacccggcaacaataacatttaataggcattgtctcattctaatgatatataccttctacctagtgggcactttgtacatatttattttttattttatttattcattttttttgagacagagtctcactctgtcaccaagttggagtgcagtggcacaatctcagctcactgcaacctccgccttccaggttgaagtgattctccagcctcagcctcccgagtagctgggactccaggcacgtaccaccatacccagataatttttgcatttttagtagagacggggtttcaccatgttggctaggatggtctccatctcctgacctcgtgatccgcccaccttggcctcccaaagtgctgggattacaggcatgagccaccacagctggccgtaaatattttttgaatttgaatctgttttggaagccaaatatgttttggaagccaaacaattaagagaagtaaaattttaaccctagtaggtttcgcagattcatccccagatatgtttttgtttggcttgtgttattaacaaataaatgagtgtctttcaaatggaaaaaaaaaaaaaaaaaaaaaaa

SEQ ID NO: 58 - DNA, 2722 bp, Homo sapiens
tttgaaaaaaaagatgcttactgtatacttgttttcaagcatcctctaaaatcaaaggttttgatcacaatatgcagatttctcttgatagatacttaaataggctatttctctcctcttcttgggcaatgccttgttttctcctctgaatatttgcatttgaaaggattgcttcctgttctgctcattgatcaaaggtagggccaattaaggattctaaccctaacccagcaccacaaagcccccctggagcatcttcccggctggcaggaccatgccatctctgtggagaaggtgctggggagggaagtccttccagtgccacatggagtgaggccctgcccatgctggggactttggggaggaatttggtattctggtggccttgctcagctctcattgagatcttttcctatcagaatgttagtgaatatacttcgcagctctttgttcagcaataaggaatattctttcaattcctgctcttcaagccaatttactacacccagttgtctttccagaagttcatcccagcggtaatatgttggtgtttgttcttctttggatttcacatctgttttctggtagaagtgagcactgttcacttgtgcagtcgtcttattttccttcttcctagatgactcagctctttgtaaatgttgtgctcaacttctaggggccagttctagactttggagatgcagtgtctcccaggtgtgcacggacacctggtccgtggaaacaggtgtgatgggcacaggctgctgcccttctgtctggtcgggggattcctcttcttcaagctgctcagctaacccagaagaggggagagagtactccggtggttcccagagcccctcccgttgtgccgcttcgacctgacacctgctcgatgctgacttaggcttcctgccaccaagcaggaaactagaaagagaacatttcagtgtaaggtctgttcccgacagcatggattagcttccgtgttctgaagttgttcttttcatggtgtctgacaccgagggcgttgttcgtccatcaggcgggattggatggagtcttggtgttttgccttctcagggaccaaaaatgtatcattgactccttaacagtgaccttcctcccaaggacatatccgtgttcatttttcataggttttactcatattcataggtagattctgttaatgtgagttggaaagaaaagaccaatttgtacaccagtcacaccacaagacagtttatcatataaaatacctcaattttttgtattcctcatttccacctcacaattgtactggtgatgaattttaagggtctgtcctttagcttataggtgatgtttcacatctggccagattcttatacctccattgtatacttgaaaaggttcagaattacaggaacagcagtgagaatttggcccactaccacgactcatttgtttcattcacattcctcacgtgcaacaacataattatattttaagaaaatgtaactttgttacatcaaaatatgttgtctagtaaaaagttgatattcagtagaacaaggatcatgtaaataaacatctatttcacatgtacccaaaagcatttaaaaagcagaatccagggcccagagcatgagccagggaggaggatgtttttcttcytttctctatttttccctaaattgtgcaaacataggtgagtctcttaacctttctgtgcctcagtttttctacctctaaaggggtgggatggttcttcaaattgtttctaaaacaccggcactttcagcagtgttctggtggcctgagatgagagcaccgtgttcagaagtgcctgggagtggcacagtggaaactccgcttgcacggaccatggagtctgctcaggaccatgctgtaggacacacagcctcatgcgctgagaaagcaaaggaagtgctgggtgtaaagtttgcatgattccatgaagctttagttttcctttttttgttttaaaagaaagggttttatatgttctattgtaaaatatggaaattaaacagggacttcagaaagccgcacagaaagatcaccttcygatggtgtgatgtgctcctgacattcggccgaggtctgtattctgaaaaagatttaatggcctgtgaaacacgtggattctgttgcactggatttgtaataaatgacgctgaacttcctgcttccaagcagctcaaccctgatgctgaactgacaccaggcgaatgtcagggctcccaaaccactagtgccaaagggtcatgttgaaaagttcagaatatttatttgtcagaatataataattgccccccaccttagtatttttgcactttacagaaatttagatactgtttttcagtggcttgagcgttttgccttttcaaaggataactattattttcttgaaaatggaatataatcatgagaggaagaagatgtaaaaaatgtcaaatgttgattggttgtgtaaaagttttgtcatagacatgtattggggagcttccaattagcatacatagacacatgtgtcagtggccaagacctgcttatattttgctttatagatgtagtcatagcatgttgttattgcctcatgtaaataaaaaggctattaagttttccagtaatatttattaatctgtatgtgttttaaaataaaataacttatttctagctgaaaaaaaaaaaaaaaaaaaaaaaaaaaaaaaaactcgta

SEQ ID NO: 59 - DNA, 1094 bp, Homo sapiens
  SITE (470): n equals a,t,g, or c
ggcacgagtacttgcatatggtgaattactactgttgacagtttccgcagaaatcctatttcagtggaccaacattgtggcatggcagcaaatgccaacattttgtggaatagcagcaaatctacaagagaccctggttggtttttcgttttgttttctttgttttttcccccttctcctgaatcagcagggatggaaggagggtagggaagttacgaattactccttccaatagtagctctgaagtgtcacatttaatatcagttttttttaaacatgattctagttaaatgtagaagagagaagaaagaggaagtgttcacttttttaatacactgatttagaaatttgatgtcttatatcaagtagttctgaggtattgatagcttgctttatttctgcctttacgttgacagtgttgaagcagggtgaataactagggcatatattttttttttttgtaagctgtntcatgatgttttctttggaatttccggataagttcaggaaaacattctgcatgttgtatctagtctgatgtacttatccatctcattacaaacaaaaacacacagactgcatttgtagctctgtaatccttgaatacggaagtaaattttcttctttcctgactttgacattgtagctatactgtttccatttttgtttttacaaatcctttgggtctaattctgtgagcctacctatagcactggattaaaatgtctgcatcatttctttagttatccagttaactttaaaactgttgtaaaagtgtaaaccagcccatgacaggtttttgtacatgttaaagaacttcattgttcagttttcatgattattgtgtaaggaagactgatgtagatgttctgtgctgtcctggaccatgttaattacacttacgacgtattttagttccacatcacaatgatttgtccccagtgacccttttatcctttctaggcacatttcttgttgttgttgttgttgcagttcccctttgcattgtattgctttgacaactgtaatttgaatcagatctgaaagaggtccagaataaaatatattttgatattaaaaaaaaaaaaaaaaaa

SEQ ID NO: 60 - DNA, 1839 bp, Homo sapiens
aattcggcacgagtgggcagtgaaatctagctagatgaccataatatgtctgcttttcttgactttattattattactttttaagggcattgttcaatcctcgattttgtatctatggcagcaggtgaaggtctctagatgagcgttcacatacacgatgacaaatggttaaggaattttgaggctaaaatctttactgcttagatgtcatgtactttataggcatagcatttctagatttaataggaaggatctctgctctgtatgtgcttttatgtgacttgcaaaggaactattccatttaaatagatttcaattaggataatgggtttgagacatttcacaatggtatattttctagactcttaagatagaattgtcaaattatagcaaatagagttagaaattattttgcaattttctcagcagattgtaatttctcctgccatacatgtagtcattgtaaaaataatagtgtaagggtaccttttataaaactgattattttccaaatagactggtaccttttggtttagaaaaaaaatgatggaagaagattgtagttcaggagagcaagcagaaagcagtcatttttcagcctttcattttattgtacctttggtcacatttttgaagaaaggcccaaaattgccatatgtatgaaagaatattggtaatggggtagagttggaatgaaagtgagattttcagagtaacaaggtcactttcttctgtggcttgtagaaacagatatgtgatcacaacaggtccagcagccagggttggggggagtagagagttcatgtaatttgtatcatgcttaaatttccatatttgaaaaagcaactagagaacaggattttgtcaaaacaaagagaaaaaaataatttttttaaacaggagggggaaatgtacgtgttattcttacaggatgttgaaaaatgtttaaatagctgcgatacagtttgttgagggggcaggggacagtgggaacagtgactaaagggttacattttgatgtagaaatgcctagttgaagaaaaaagcttgcctgggaggaaagtttctgtggagatgtaccctgcatttggagtgatgtactgaagcatcaaagactcagcattaattttgatctttcttgggaagctggagaaaataatgcatttctgagaaaaaatagtaacttatgaaatgtcaaagcctgctctggacaatgtcaacatccatgagtgcgaggcaaattcaagaatccaaaccctaagtgaagaccttcctgacctgctgtctagacgtcaggggctgtttgagcggtgaggtccagcgggttaggcattccaaagatacgagaggcccacacccacatcaggattgtgtgttagttctcaggcttcctaggatttttcttgggaaaaggtttttgaccccaagtggctcccagcttgacagaaatctttagaggcagctcagaaaaactttggtttcccaaaataatccaaaggctaaagttctgccaccctttaaaagagtagtgttttggctgggcgcggtggttcacacttgtaatcccagcactttgggaaaccgaggcgggcggatcacgaggtcaggagttcgagaccaacctggccaacatggtgaaaccccgtctctactgaaaatacaaaagttagctgagcatggtggtgcatgcctgtagtcccagctacttgggaggctgaggcaggagaatcgcttgaacccgggaggtggaggttgtagtgagccgagatcccaccactgcactccaacctgggcagcagagtgagactccatctcaaaaaaaaaaaaaaaaaactcgag

SEQ ID NO: 61 - DNA, 1964 bp, Homo sapiens
ggcacgagaaaagattcatttattgatttgtgcttcaggtttaatttgaaaacaaaaacaataggagaattggaggaaaggaatgggaggacagagtacatgtgttggcatacctttgcttagctctagaggataatgatgcagatttagatcaattatgtagctgtgctgaaatttccctcatttgagcacctttaatgtgaattattatgtgttcttgctggacttacactgttacatcattgtcaacttgcttagtgtgctcagaaataaaattttcatagctttcctctggaccttgttttaaagggtaatatattgatccacttggagacaagaggctggtaatagaaatttggtacttggtaacaaaattgctgaatgtgtgaaataagctttgaaaaatatatgttatggttaaaatgttggaagggcctcagaattttcacagcagttatttgtgtattttctttctaggtgcatgctattatgatgctaatcagtctatgtatgtgtttggaggctgtacccagagcagctgcaatgctgctttcaatgacctctggagacttgacctaaacagcaaagagtggatccgacctttggcttcaggtaagagatgaaatgctgatctttgcctccttaccaggtgactcccttggcatggaaactctacctgatcatttttggtgttggtctcaaggataggttactgggactcaggtccttaagtttaatgtgccatgtaaatgataatagtaatatgcttgtgtaagtctttgttttttgttaaattatactttatcattagtaatggtgccctgccaaaattgctgtactgctgtgtgaattcatttgcatggttttctcaagtatactcatacaggtgtgatacatcatttggtaggaggttgaagtaagaacagaaacacagagtcgtgagaactgtagttgactgacagaagctattgtcctagggctaaggtctctgaatatctgttgttgttgccagctcagatatttggggagtgtatgggacgtgcctctgctagttactcttaacaacccaggggtgtgggaagattctacagtaggtacattcctacccagtcccactatgccagaaatctggcagaaagaaactagattattttcttatttttgacctaacctctcctgggggaaaaaataaaaacaatggtttttgcactcatgaggcagggcaatttgaggaggcatagattggaggggttggtgtgatggagaaatagtgtccactgagtataaagtattctgctaggttttttggcaagcttttcccaaaacattcatttggctttttagtattaggactcagtcttaggactaaggacatttgggtttccattgggcaagttccttatttatttaggccttgccttactactttgattaccagataggaggcatcattgtatattagaaagggcactggactaagagtgaggggacatgagtttcatttcctggcatagtcaccaattctccatgtaactataaataagttattgcacttctctgggagaaatgtggagtagtactaaatgactatttttaaatgggctaaaaaggctagtttatgtttccctttctataaccgctactgtgaatgtctaggccagggacttaaacctgtttatgagaagaagctgcattttgcttccctaaaacttaagttcctgttctttccgcctacattaggcaaatataggaggagcctactgagtggataccatgggtggagctgggctttgtgtagatgaagttctttattaaaattattggcatttggagggtaggagggtggtggtccagtctgcagatggccacaccaggaggaggagctattatatccccttctcttccacttcctgtcacaaccaataaaggccgtttgtgccattcataaaaaaaaaaaaaaaaaa

SEQ ID NO: 62 - DNA, 1330 bp, Homo sapiens
ggcacgagcctgcagctatcattcatccagttaagaatttgaagaagtgtgtgcacaaagtatcacaggcaccggaaaatatgcacatgatgctggagcattagaatgcaacagaaagagccctgggcttggagtatgcagaactggttcttgttacaactcctcttactagtgggctctggaagaaaacacattgaattcatgatcatggttaacctttggagagagagaggagaccaggatgaaggagccagtcgaagatcctgttcaagtgtacactgagccagcaggttcaccagaaagctattgagcgtttgctggaacacattatgcagggtgaatttctcctggaatgttgccaaggattttttatgcttctgtggcaggcatttcttgaacattgtcatttagccaagcaaagaagattttcttaaaggatagaaaatgtttaaaaatttttgtttgtttgaagataggttaaatggctatatgatctcaggataagacagagaaaatcacttatttctctaagtgatctgattaggttagtgatgttttgcctttaaacagattcatcattattcctaaagtattgctgtattaatactgtctctagaaagtatccaccagtgcctacttttcttcgatatcattagctgtttttcgaaactgaatttgctcttcagagatttctcatatgtttgcgtataaggaactactggtaatagccaagaaaatttggaggtgcagagaacatgctgaaacagaatttcactttcaattctagaactatgccataaaaaaaaaggaaaatgtaaaaatgtctttatattagagcagatattttaaaagtattgcaaattcaatgataaattctaaggttaaaattggacacataaaaaatacaatatataaatatctccccagaaattattatctaatgaatagtaaaagctgactacaaaccatgtcattttaacaagggtttaaatagtaccaagattctcatcatatgctctgggatacccagtgatgtacaagggttctctctaaacatggggaggaaaaatttcaaatataaagatttgaatcttgtctttgccattcactagctgtgtgatcttgggtaagttacctggtttctctgagcttcagtgtcatctgtaaaacaggaataataatacctagctcagaggtgggtgtggtggctcacgcctgtaatcccagcactttgggaggccaaggcaggtggatcactaggtcaggagtttgagaccagcctggccaagatggtgaaatcctgtctctacttaaaaaaaaaaaaaaaaaa

SEQ ID NO: 63 - DNA, 1504 bp, Homo sapiens
  SITE (1120): n equals a,t,g, or c
gctcctctgatccaggagcattggcaggtttgtgttgggactgctggttaagttggagctgtgtaactacttagtttttggtagccaatcagaacgcatgccccacatattccagctcggtacatgttgataaacagactcatccaaactttcaaaatggattcgtactaaacatgctcaggttttaaattttggtttgcttttgagcttttcctctttatgtggctcttaataataagtagttagaatgaaccaagccatcccagttattccaagcaggctctcaaatgacctttgagcacccttcacctggctggtccccagkccagggtccacagccctgctcccttctcagcaaggagggtggcctgtctgacagtgcagttgaacctttgctccctactctgcaacttttgaagacttcaggctaatcaaaattacttataattagaatcaagtgcctttattcttgttttttatttttattttatttatttatttttttagatggagttttgcccttgttgcccaggctggagtgcaatggcatgatctcagctcactgcaacctctgcctcccgggttcaagcgattctcctgcctcagcctgctgggtagctgggattacaggcatctgccaccacgcccggctaattttgtgtgtgtgtatatgtctatgtgtgtgtgtgtatgtatatatcttttttttttttttttagtagagatggtgtttcaccatattggccaggctggtctcaaactcctgaactcatgtgatccgcctgccttggcccctcaaagtgctgggattacaggcatgagccaccacacccggcctattcttggtattctttattcttggttttctagcctttagaaaaaaaaaatctagtcttggtaaagaaaatgttcattttaatcaagctccagtacagcttgtgtcaagacctagtaagaccacctttaatgtgttcctggatatgacattaaaaactaacttgaaaattgttaggatatttccttgttccctacttttattgtaaaatctactacattcttaagaattaaaaaatgccatttcagaagagatgatagttttatcttggccaaggaattatcnttcttagtagcctatattggcttattccaaaaaaggcgttaacctccatcaaaacatcttctgcgcctctctctcagcatatgctttgatatttgaagtgtgtaatagattggagctatcagtcacttatttctaaaaaatgtattcttttttcttcatagctgtgaagagggataccaaggaaagttctttctgctgtctttctctttggtaatgcttatcttatgaacactcaactgaaaaaacactccacctaaaagcaggaaagatggcaattctaaatagcagctattatccccgggtataaactatttttgttgttggcttggggctttgctgcaggtattaatagtttaaaaaaaaaaaaaaaaaaaaaaactcgag

SEQ ID NO: 64 - DNA, 1828 bp, Homo sapiens
ggcaacctctgcctccagggttcaagcaattctcctgcctcagcctcccgagtagctgggattacagatatgttcctgacccttccttcttgaagggacagctgtgtaaccattcaaccatctggccatcagtttccacatctgtgaaatcaacttctgcctcatggagccatgagttcccaagcagtgaaggcagtgaggggctgtggtgtgatccaggaggctgagaattatgcagtgggtgctgtcaccttgaagacatcagcgtgatcaggcagatcatcatggtactgcatttcctggacacgatcttaattttcttaatacctccaccgacatttcaaatagcgtctctaatgccccagagacttttatgcccctaaggtagttttctttcttttgtgaagcagaagaagggaaattgttaaagggaatattttaactaaatttatttccataaaactatctttgtctttatatctcatagaaagtgttaggtagcctcaggattatatctccgttggaaaactgtagatgtaaaccttcttgctatctacatacttacatatttttctgttgttatttacttatgaatagcattttgattatagcagaaataaaatacattaaatgactaagctcagaaataagaaaaaaaggtcaatggtgatcatttatttggaaactatgatattttaatgatattaatggtgtaattgacatttagttaaacatatttcatcgtaagtagagcactttaactcttacggtccacttaaaatgtaatcatacatttatgtatttctagttaatgtatcaaactcaactgagtaatcaatgtacatcatttattttgctcctaagttaatacactaagttatgctttaaaattactaatttgctgcaatatccaatactctcttttaartcttacgtgtgcagaaaaggatataamcatttcatgacaccaaacccaagtatttttgatgcccttggcagtgtcagttgaacagacagtgtcatttaatgtttgagacagcatctgaattccttttattcttaaaattctattttaaaatgcagtttttggaaagtwaatgtgaatagaaaaatttctaacattttatgtgcatgtgttttgtttgttacaggcttagcatctcaaatctgaaaattcgaaatctgaaatgtttctaaaattcaactcttttgagtgctgatatgactttcaaaggaaaagctcattggagcatttcagattttggatttttggatttgggatgtttaaccagggtaaaatatagaatgcaaatattccaaaatctgaataaaattgaaatctgaaatgcttatggttccaagcattttggataagggataattaagctgtataacttataaaactgaatataacaaaatttcccaacatgtggaaaatgatgtcttttttcaaaaatgtcaatagcagatacatggtacagtaagttaggggaaaaaatgaggtttcatatcttctagtttcctaattaaaaggagcccattctgggttggaagaaagtgtcagtaagatcatttctcctatttgaaaatcatrcaaagcttgtcagagygactcaggccaggagtgtagctgggcgtgtagctaaatgatatctccccacatctatataataagctgttacctgctttaaaaggaaaagctctcagcatgactctaatgttgcatttctggaatrcagcttgaaaagctcttctcagggttgaacagagcatgaaggtaatggttattatctactcacattaaaaaaaaaaaaaaaaaaaactcgag

SEQ ID NO: 65 - DNA, 1280 bp, Homo sapiens
  SITE (893): n equals a,t,g, or c
gaattcggcacgagctcctgtggaggaatttctccctttggaactaagacctctaagccagtggggcataaaattatgagaacaggaagaataaattttgctagtgggtcaccagggttaataatgcatggtgccacttttgtttctaccccttgattcctggctatggagggaaaaaaagtaccatttattggatgctgattcagagcrtatatatagccctctggagaactctgccctccctgcmagtwattgccacctagctggtgctataactgaatcttcaaaaggccatcccatcatcctattaggccagcttctttagcatgataaggaacatagaccagtgaattccaggagcaatgactcatactgaaattyttttgctgtgaykgaktcttgatcasaagcaatgttgtatggaatatgacaatgggtaaagcattccatgagaccatggatgacaattttggcagaattttgtatgaggaagcaaatctgtatcgagggtctgttctagtaagaacaaaatgctaccccttccatgatggaagtagttcaatgtaatcaactacaaagctgactgagcacccagaggaatagtgccatacttggagtcagtgtygttktcwgctgctsactggttgggccctcagcagtggcatccaggttggccttggatagtggaaatccatattgctgagcctatgtatgamctccattcttgccactgtggccactttgttcatgagccatgaacaaagaggataccagttagcctctttccccagccctgttctgacaggggtggctggaatagagactgactggtttccacagacttgattatcctatattcacttcattattaaaatcctcctctgctaagatcncctttggtgagaattttatggcatacatccttcttttcttttcttcttttcttttttttcccattgagagaggtctgtcctgggtgggtgtgatggctcatgcctgtaatcccaccgctttgggaggttgaggcgagtggatcgcttgagcccaagagtttgagaccagcctgggcaacattgtcaaaccatctcttcaaaaaaatacagaaattagccaggtgtggtggtgcactcctgtggttccagctacttgggaggctgaggtgggaggatcacctgagcccgaggaggtggaagctgcagtgggctgtgatcgcgccactgcactgcagcctgagcaatagagtgagatcctgtctcaaaaaaaaaaaaaaaaaaactcga

SEQ ID NO: 66 - DNA, 1528 bp, Homo sapiens
aattcggcacgaggtttgtggaaacaacccttagaatcctattattttttaagaaggaaaaattggacagcctcctgagccagagtaggctcggagactcctgttgtttctaactgaaatagtaaataatgtatttccaccatttacccagagtaggctcagagactcctgttgtttctaattgaaacagtaaataatgtatttccaccatttagtagcttttcaagagtccttaaaaatttttggacagcacagaaacatggattacttagccctttagttctcagattgagttatatacttcccagcaatttctgttatttaagattgctatctcatttctggtgtaatacttacatggaagtctttctctatttgggggtggtggggttctggcacataggaatttcttaatggcagaatattctgaaattctcggcattaaagtatacttgataattagttcacttaatattaaagcatgttcattcttttcttcccaggtcgctattaaagcatgaagactttctgaaacctgccctagagctgggatattgtttgtgggcaatattttttattgtctcttgtttaaaaagtgaacagtgcctagtgaagttaggtgacttttacaccttttacgatgactacttttggtggagttgaaatgctgttttcattctgcatttgtgtagtttggtgctttgttccaagttaagtgttttcagaaaagtatgttttgcatgtatttttttacagtctaaattttgactgctgagaagtttctattgtacaaaacttcatttaaaaggtttttctactgaatccagggtattctgaagatcgaagcctgtgtaaaatgctaccaaatggcaaaaagcaacaataaacagtttgatttttacttttctttctaacatatcaatgcttagcagaactattcagattgtcagtagtaaatttaaagacaaatgcccgttttcctccagtccatgaaacataccatacttatatacctgcaactaagtgtttaaaattatgctctgtaactctgtactgctagtattagaactaaaaatcttaaaatacagccagtgcttaatgcttatatcaatgtggatttgtcggcttttatgtaatctgtaatatgtatagcaggaaatacgaagagttacacagtgtatgccttaaaaggctgtttcttaaaggtgttacaaggggataatggtatttcaactagttatcagcaagtgacaatacattccaccacaaatacactcttgttcttctagcttttagactatatgaaaaaaccgggtgcttcaaagtacatgataagggaacactatacctgtcatggatgaactgaagactttgcctgttcattttttaaatattattttcaggtcctttgcttaccaaaggaggcccaatttcactcaaatgttttgagaactgtgtttaaataaacgcaaatgaaaagaaaaatgttggtgcagctgttcacaaaaaaaaaaaaaaaaaactcgag

SEQ ID NO: 67 - DNA, 1458 bp, Homo sapiens
gaaaaaatgatctctgattcatcagcatgaatttccaagtttggggtacagggcaatgcactttcctcagtttatttatattattgtttttaaaaatttgcaatacttaccaaagataaaggatttgttagaaacagcttttggaagaggagcagtgatataggtttattttactaatgataatagtaagtaaattataaagaacctttaatgttttctgagaaagtaaagcctattcttggagtttataatcatttaagtggttctggacaaaacttaccaaattctttactgttattactaaaaagratgttaacaattttaagaaaacaaaaaaattattttttaagaattttgtttatcggttgatatactcattgccaaaccagattaaagtaatattccaattggattggcttcttctaagctctacttctaaggaaattgtttggattgatttgctgtctgtgctttgagaatgacttttttcccctcctccttttttttaaagcaaactttgcgtaacttattgagcaaggtttccccttccttttctgccgaacttaaacaactaaatcaacagtatgaaaaattatttcataaatggatgctgcaattacagtaagtattatcattacaaacccttgtaaaataaagaataatatttacatgaatctttatgttaaagtaagttaacatttttctttttacagtgagtttcagatatttagtcatatataaaaataaatgtaaaaatagacattatgactcagatatagaaatgtcactttattgtatgactcttcccagaaattctacagtttttaagaaatttgtgtttatcagacttgacagccattgataagataaatagcatttcttagaattatgttattggtttaaaaaacttgaatatttcctttgtcaagattaataaatataacaattagaaaaaaaaattataaagttttccacagcatagttctttaaatgaaaggataatatttactttaatcttatgtatgtgtactacagactttcagaattttatgaacagatttgttctataagcattattttactattttaacattatttcctagaatrttttttcactgktattattttcacacacctcagattaaattttaaatttccattaaaacacctagaagaatgattgaaatcaaaacataatactttctttttatgataattacttttatccttgcagttaaaaagacttgaacataaggaagtgcttaaaatgtacactaatgtgaatatacatgcacactcacagttacattgtcactgaggtaaataagaaggtagagccatggaccaggcacttggcctcccataatcccagtgctttgggaggccaaggcaggaggattgcttgagcccaggggtttgagagactctgtcttaaaaaaaaaaaaaaaaaaactcgag

SEQ ID NO: 68 - DNA, 1538 bp, Homo sapiens
ggcacgagctatagtattgtcttgacctctggagttaatttctctttaatgcagctccatgataagcagaggcatcacgatttacttgaccgttttgctgacttacactgtggttctattttatctctttaaaagtggcttctctgccttccattaatcatgatgggatgcttgcaatactttcagcacagaataacctttaaggaaagacatcgtaagtgattgtccaagaccagtttcccttagaggaaagtgggagggcattttcagacagatcgttcatggcggtcctgtccctgttcatgaatctatgaaggcgacagtttctcctgagaaatacctcgtccattttggtaactctggctcaaagcatggttcaggatttcttgtgagcatgtttcagtagcagccagtgacgtgtgggggcttgaggctgttgtgtcaagagagagcagaaaagtctgatgatgatcttcgaacagcttccatctcgcacttcccctgagtcctgagccagacaaaggatgggcctttctggatgcagagcgagggagatctatcatgtttgattctctgtgtccatcctcaaagtgccgtgatcttctttgaatacttggagcatcccaggaaaagaagagtcatttgagtaaagaaatagcctaacaacccatgtaaacatggatgaatgtctttgagaacagaggaagtcataaccatgataacccagaacttatgcagatgttcagtgcatggtttggtgcttgaagaattgctaaaagcctcttgttgcaaaggaaggtgcagtcaccacttttcatacacgagttgtcacctggaacctttttactcaaatgtcatcatcctgagatttttggtttcctggggagtccagtgactatgaatttagtgcagcacagttcgtcactgggaaagaagaatttgagaacatcaggtggaactcaaggagtctcattgtgtcgagtttttgagagctagagtaggtcaagagaaggaacactggagtaggaatctcaccatttgcaatgtaattgtgcctcttcctttgcactgatgttaggggcgctctgtgtgccactgtctccatccgcactggagatcatcactgacgtagctgaaatatggaggtcctttcatgcaagggtcataagtgccatcgctcccagtgacactctttttattaacatagtaatatttccttgaaatattgtcctgggtctgctgggtgcagtggctcatgcctgtaatcccagcactttgagaggctgaggcgggcagatcacctgaggttaggagttcgagaccagcctgtccaacatggcaaaaccctgtctctactaaaaatacaaaaatcagctgggtgtgttagcacatgcctgtaatcccacctactcgggaggcttaggcaggagaatcacttgaacccaggaggcagaggttgcagtgagccgagattgtgccattgcactccagcctgggctacagagtgagactccatctcaaaaaaaaaaaaaaaaaaa

SEQ ID NO: 69 - DNA, 557 bp, Homo sapiens
gaattcggcacgagtctgaggcctcacacaaaatcacccttaaccctctatttatggctttacaggctttttctagcctgctcctccatattctttcaacctctacccattacccagttccaaagccacttccacattttcaggcattatagcaacaaccccattcttggcaccaatcttcttagtccatttcgcgctactataacaatatttgagactgggtaatttgtaaagaacagagattttaggctaggcgcagtggctcacacatgtaatcccagcgctttggtaggccaaggcgggaggattgcttgaggtcaggagttcaagactagcctggccaacatggtgaaactgcatctctactaaaaatacaaaaattagctgggcatcctggtggcaggcccctgtagtcccagctacttgggaggctgaggcacaaaaatcacttgaaaccgggaggcagaggttgcagcaagcctagatcatgccactgcactccagcctgggtgacagagcaagactctgtctcaaaaaaaaaaaaaaaaaactcgagg

SEQ ID NO: 70 - DNA, 1568 bp, Homo sapiens
ggcacgagttttaaattaaatgggaatgccactgacgtgatgtcgtttgcactgcaggatgacagaactgttgtgtgaataccattgtatttgccaaatggtccactcgtcatttcagaacaaacaaatggatggtgtctgtaagtcggcaaacactggtgacatttagccttgtttatgttcctttccttttgctgcatatttttggctccaaaagctactggctgaatcaacagggcctctgaatcaggagagaagtctggtagcattaattttagttgctatgtccatattctcttcagactgcatgaatcctactgctcaggaccaagtctaggtgagaggagagggcaatcaacctctttggtttcggatgttgtgtgcaaagcccagggttcaaataagcagtaattatctcctattacttagtgctgatcaacagcacctctacgtctaattgccaacctgccctaatcatgttgactattcttgctttagccagagacagaaggaccaaattttataaataacactttattgtcattattccattaaacgattaggggatgtggccctgcccttgctttcaaatgcctctagccctgatggtttctggattatttaataaatctgcacattttcttgcaggtaagtgacactccctgtcctagtcggtctatctggacttgcccttgtctgttcgtggtcctcggtggttatctgcagcttgttaatcgtgtaaagtcaagagaagaatgtatacacatatgtgtgttgaataattactattggcataggtatgtgtatacacacggtgcaccaatctacagtatatatagcagagaatcagaggctaaaaatattaccccatatgttccagtattagtcatggattgcaaaggcttagtaacttgagcaggagagaaaactccctcaaagtcataaatcctgagtgacaactgctgctggatgacagatcccttcacctgtggacaacctggctgggggtggggggctgttccaccagctcacctgagcatgtagaggtgggtcctgcagtggtctcgtgggtattactgcttgtgtctgattgtcctgtattttgtaacactttagaagaatacagaaaagtgcagtaattctctttctccatagtatttaagcagaaatattgctagtttaatattgtgtcaggtcgtcctattaaccaggagcagatgacagtaaaatttcagtgaatagcaccttgacatctacaacttaaaaatggtgattgaagcaaaatatgtaaacttgtacggggtgatcgtgtgctttggaacagagtattgttgaagtaattagaagatatattaaggtgttcctggtaatgaaggcatgtaagttataataattgtagctttctgaataagtgtcaaactatatctttaagtgtgctgtatgctgagttacaagttaggtcatttatgaatggaatgtaaaataatactaaaaatgcttcaataacttatcttggtattgctaataaaaaaaaaaagctgtgaaacattaaaaaaaaaaaaaaaaaa

SEQ ID NO: 71 - DNA, 1228 bp, Homo sapiens
ggcacgagtggaaactcaacagagatttgtaaagtactatatgtgttttaccagttgtccagccgattaagtctttgtgggtttcttttgctgttttatgcccgggaagttaaatccatgccttctttggttattaatactgatgttatttaagaaatgcaaaaaggcctctttagtttctaagcggtcttggatttacatagcataaaaattagaatggatttaaatgggagtaaacagcaggagcttgcaaagtcaggcccatctgacattgttatctaggctgtgttctttgagtatggaaaatgacaaggaaacattaacacaatagcttaatagtttacttcctgtctttggtcaaaatgttccaaaaactgaattcttaccttgaagtcactggcctttgggtgatgaattcaattgtaatcactctgggtttgctcatgacagtaatgcagtaacttaaagttagaaaataatttcaacccaggagcatcttaaatagaagtcattattgtctctatgtaattcttgttggaatgtttctttgggcaatttaaactgcccacacattagggcagtgactttctgagcattttgtagcaattagagttgttgtttctcgttcttggcattgtttttgttgccttgtgagagaagatgtgtggcaggatgctgctcttaaaacttttcctttaaattgactcaagctgttacttccttctgaatgtctgatcttataagacatagtagatgctattaagaaagatttgttttactgttgtttagcacttaaaacatatattttgtagttatatgggttagctagggtcaaacatataaaaactcaaatgctggctgggcgcagtggctcacgccggtgttcccagcactttgggaggctgaggcgggcggatcacttgaggtcaggagttgaagaccagcccggccaatatggtgaaaccccgtctctactacagatacaaaaaaacaattagccaggagtggtggcaggtacctgtgatcccggctgctcgggaggctgaggcaggagaattgcttcaacccgggaggcggaggttgtagcgagccgagatcacaccattgaactccagtctggtcaacaagagcgagactgtctcaaaataaatatattacaataaaaaataaaaactcaaatgataccagaaaaaaaaaaaaaaaaaaaaaaaaaaaaaaaaaaaaaaaa

SEQ ID NO: 72 - DNA, 1715 bp, Homo sapiens
ggcacgagatcatggccttgttttttacaggcccaacgaaggaaccacttctgggaactcattgaggaaagagagaacagcaacccctttgacaacgatgaagaagaggttgtcacctttgagctgggcgagatgttgcttatgcttttggctgcaggtggggacgacgaactaacagactctgaagatgagtgggacttgtttcatgatgagctggaagatttttatgacttggatctatagcaaccttgcgtggcgtgtgaactggtctgctgacctcagacagcagatgtcccctgtggtggtgtggcagtgcctgtgttctctcctaggcaggcctctcaactccaggtgctgtcctaagaatttttacccagggctgtttctcaacccctcacctttccctgaggagtgtgttgttttccctgttgaaaaaagttacaaaaataaatcttaaagttagttttttgtaacacgaatttaactgtcagacagttagtgtaggtgtgttgcgtcatctgttttcaaccagattgcatttatggacttttcacacactcattttgaggaccccaggttcaaaagtaaaagcagtggccctgctttggggtccaagaataggagtgatgggtgaagggacctaagctggccaatagccctctgccccagacatgggatgtggatccttgaggtttctggtgaaatctgcacatctgtgtttttatatctgttccctaccctgtaatccctaccacgtgcacttgttctgtggttttggtctcttgtttaattgcacacaagtaatactactgggtaaccagaatcaggtgtgaatgtgttgagattttttactgttttgcatgataggaaaattgagaaagaatacgtataaaagatagagaggcataacatcaatgcagagttggaagttggctcccaagggctgacatggtgtgagtgtgtgggtgtgtgataagcttctcatccctgcatagatgcagtattcttagccttagtagaaaaacctggtttagtggtttaagccttgtgtggcagatagatcttaaagggcaaagcagtatattggtagttgtcaatatagcagtgctagctctgtctatataaatagagaaatggggttagccatagaggttaaaactacctggttatcccatataataacacaaactgggtcttggatacacagttgtatttaatgttttacgatctagcctttccagtacaggcactttctgagaaacctttgtcctcacttgaggcattttgttgtcgggtttttgtgtttgtttttgtgggtatttgcctcattccacccctgagctttcaggtagacagacgtgattcaaaactctgttctaaggtgtttattgtagtggagtaatgggtttgcagtgataagtcatacttttccaccgaaagggagggcttgggaatccctgagattagctaaagttaagttgttggaagaattccttgattggaaattgtacctttgtgttttgttgctctgtttcctgaaaataactcggggatgctcctggtttgtccatctactgctttgattccttggatcccacccattctttcactttaagaaaaaacaaataattgttgcagaggtctctgtattttgcgctgcccttttgtaagaagcacttttcccaaataaaacaattaaaaaaaaaaaaaaaaaa

SEQ ID NO: 73 - DNA, 1896 bp, Homo sapiens
  SITE (1871): n equals a,t,g, or c
  SITE (1884): n equals a,t,g, or c
gaaaggtgtaagaaactaggaaacaatgccttgctgttgaattctgtgatgtctgccttccgggctgagttcatcgccacaaggtctatggatttcattggcatgattaaagagtgtgatgaatctggtttccccaagcatcttctttttcgatcactgggattaaacttggccttggctgatcctcctgagagtgaccgacttcagattctcaacgaagcttggaaagtcatcactaagctgaagaacccacaggactacattaattgtgccgaagtgtgggtggaatacacctgcaagcatttcacgaaacgagaggtgaataccgttttggcagatgtcatcaagcacatgactccagatcgtgcatttgaagattcctacccccagcttcagttaataattaagaaagttattgcccacttccatgacttctcagttcttttctcagtggraaaatttctgccgtttctggacatgttccaaaaagagagtgtgcgggtggaggtttgcaaatgcatcatggacgcctttatcaagcatcaacaagagcccaccaaggacccggtcatcttgaatgcccttttgcatgtttgcaagaccatgcatgactctgtgaatgcactcactcttgaggatgagaaaagaatgctgtcatatttgattaatggatttataaaaatggtttcctttggccgtgattttgaacaacagctgagtttttatgttgagtccaggtcgatgttttgcaatctggagcctgttcttgtgcagttgattcatagtgtgaaccggttggcaatggagacaagaaaagtaatgaaaggaaatcattccagaaagacagctgcatttgtccgggcctgtgttgcctactgcttcatcaccatcccctccctggcgggcatcttcacacgtctcaatctctacctgcattctggtcaggtggccttggccaaccagtgcctctcccaagctgatgcttttttcaaagccgctataagccttgttccggaagttccaaagatgattaatattgaygggaagatgcggccatcggaatcgttccttctggaattcctctgcaatttcttttctactttattaatagttccggatcatcctgaacatggggtcctgtttcttgttcgagagcttctcaacgtgatccaggactacacctgggaggacaacagcgatgagaaaatccgcatctacacctgcgtcctgcatctcctctccgccatgagccaggagacgtacctttaccacatagacaaagtggactccaacgacagcctctacgggggagactccaagttcctggcagaaaacaacaagctgtgtgagacggtgatggctcagatcctagagcatctgaaaaccctggccaaggacgaggccctgaagcgccagagctcgttgggcctttccttctttaacagcatcttggcccatggggacctacgcaacaacaagctcaaccagctctccgtcaacctgtggcacctggcacagaggcacggctgtgcagacaccaggaccatggtgaaaacgctagaatacatcaagaagcaaagcaaacaaccagacatgactcatctgacggagctggccctcagactccctctgcaaacaaggacctgacccccgggcccatccccaggctcagggactctggtgccaaatccagaaagatctgctctgctgccctgaactcttacggcaatttaggtttctcatttttcttttctttttacatatgtacaaattgttttaagctttggcctctatccaggttattctgacaatgaagaaatgggagttgtcagagcattaaaatgcaatcttcactaaaaaaaawaaaaaanaaaatgctggagnatgaggaaaaaa

SEQ ID NO: 74 - DNA, 2075 bp, Homo sapiens
ggcacgaggtgtttgatgccattttggattctcccacatgttgattgtttgtgtgtatgtatgtttggagtgaggatgtgtgaaacattgctatggttctgggagtcagagctgtacagaacggtttacaaaatgtcactccctcatcacccctacagtgcccttctcactctcttttttccaccatcttcccactcacactctagtttctagtttatccttgctgtatttcttcacaaatgagcagatacagtacatgtatatattcttttatctcccttttttgtttgtctgtttctgtgtttttttggtttgatttgttttttgaggctagaaggcagtggcgtgatctcggctcactgcagccttcacctccctggctcaagcaattctcatgctgaagcttcccgaatagctgggactacaggtgtgtgccaccacccgtggctaatttttgtatttctagtagagatggggtttcgtcatgttggccgggctggtctcaaactcctgagctcaggtgatctgcccatctcagcctcccaaagtgctgggataacacgtgtgagccactgcgcccagccttatctccttttttatacatgaatagcagcgtgctatatatatagtctttgctccatgcaatwattttawtttawttwattttttagaaaggttcytgttctgtcacccaggctggagtgcaatggtgcaatctcagctcactgcagcttcgacttcctggctcaagcaatcttcccatcttagcctcccaggtagctgggactacaggcacacatcactgcacccagctaaattttaattatttttttagggacaaagtctccttcactgtgttgcccaggatggtcttgaactcctgacctcaggtgatcctacttccttggcctcccaaagtgctgggattataggcatgggccattgcatctggcctcattgtttatttgtttgttttcaagatggggtctcactctgccacccaggctggagtgcagtggtgtaatcatggctcactgcagcctcaacctttcctgttaaaatcagcctgcaaagcctcgaaattctctcccaccttttgccattttttctttctgtggaagtcatggggttctcccctgattatttagattgctcccttatctcacataatggcctggtaataaagtaagattcaaaccatatgcagaggtagagagatgaattacagtgaatacctgtcttagtccctttgkgttgctactaaggaggacttgaggctgggtaatttgtaaagaaaagaggtttatttggctaaaagaagcatggcaccagcgcttgcttctggtgaggatcccaggcatgtccagtcatggtagaaggcaaagcggagcaggcgttagatggcaagagaggaagcaagacagggagggaggtgccaggctctttttaacaaccagctcmwcagaaactaatagagtgaaaactcactcacatccccacattccgcattaatctgctcttgaggtatctgccctcctgacccaaacacctcccatcagaccacacctccaacattgtgatcaaatttcaacctgcacttagggtcaaatacccaaactatagcgataccttgtacacttttcacccagattttaacagttcaagattttgccatgtttgctttatctgtttatttctttttctttttctgaattawttawatatatatatcaccctatgtacactaaaaactatgcatctctttaaaaatgcggctattggggccaggcacagtggctcacgcctgtggtcccagcactttgggaggctgaggcgggtggatcacctgaggtcgggagttcaagaccagcctgaccgtcatgaggaagccccttctctgctaaagatacaaaattgcgggcctggtggtaatcccagctactcgggaggctgagacaggagagtctcttcagcctggggggcggaggttgcagtgagccgaggtcgcgycgttgcactccagcctgggcgacaagagtgaaactccatctcaaaaaaaaaaaaaaaaaactcga

SEQ ID NO: 75 - DNA, 1592 bp, Homo sapiens
  SITE (5): n equals a,t,g, or c
  SITE (805): n equals a,t,g, or c
  SITE (857): n equals a,t,g, or c
  SITE (1587): n equals a,t,g, or c
  SITE (1588): n equals a,t,g, or c
  SITE (1589): n equals a,t,g, or c
ccccnataacaatgcataagttatagattacataccattcagtgtagcatgatgaaatctcttgccaatctgttccatccacctgggatgtgaatcatccctctctctggtgtattcayactgtatgtgctagccgtctctgttacgagatcagctgtcgtggaatcagtgctagtgttcaggtaactcttatttaataattgcctcaaagtgcattgtgctgtgcctaatttataaaataaacggtatcataggtatgtatgtatacgaaaaacatagtatatgcagggttgggtactatccacagtttcaggcatctactggggggtcttggaatatatccccagaggtaaggggtgactactgtatacagccatgccaacatgctggttctcagagagttataagagagattaaaaatacatgcagctgtttgggcactttcttcccaaataaaatacccagtaaaatgtaacatactacctatagcttgataatctatctgaggatgtttatgatgtctgtctatatactttaatttggccttagcttctttgtaggtatcaagttatcacttgcaaatttattttcaaaaagcatagtttcttgtacattttagaagattagtttttcttattttgggacacctacaccaatgttttaaatgtggataaattttaatgtggaatttcttttaaaaataatcctcttcatagagcaatacaacaaaaatgtgttgtatcttggagatttacattataaatgtagtaacatttatgagcttaaatttaatgaaacctttttntttttttgagacagtcttgcactgtcgcccaggctagagtgcagggcatganctcagctcactgcaacctccgtctcccgggttcaagcaattctcgtgcctcagcctcctcagtaactggcattataggtgtgcaccaccacacctggctaatttwrgtatttwtcataaagacgggggtttcaccatgttggccaggctggtctcaaactcctgacctcaggtgatcagcctccctcggsctcccaaagtgctgggattacaggcatgagccatggtgcctggccaaacgtttttattacaaatattacattaaactaaagctcacaactgttactatgcatcaggaattaacagtcatttctcatttgtgttatycyccwattkgatamcatatagtgactatctctttatgggttaaatatcagtttcttggccagaattcaagatctgcccctaactaatcctacttctcccagtacccttacagcactcctaccctactagtaactctgatatctcatagtcctcagatttatcaagcaaacgaaactgaatgagcactactataaggtaccacaaactacaaaaggagacagttttgcccttgttgctttcagttaaattattgtgctattttttgcttaatttctaggttttttttgcgtgtttatcatgtctccgtaggtaaagtggccagaaatctttttctactttacatttcctgtaagtgctgtttgtttgaataaagttaatgtgtgaggttaaaaaaaaaaaaaagnnnaga

SEQ ID NO: 76 - DNA, 1324 bp, Homo sapiens
ggcacgagaagaacagaaaaaagctaatagaggaaggtaaatctctaaatgagttaaataaggcttaaataaagtttgcatggtatattctctaaaagttgattggcgtggaggaggctgtatgtgtttgtgtgtgtatgcacatgggcatgtctatgtgtaaggtcagaagggggagcctgaattatctactgcttttttggttaactagtcctatttttaaaactttgtctaactcccaaaacttattaatgcgacatgtagtactgaattagaagttattgttaaactcaggacagctctgtggagattcacaaagtaatttcatgaaaacttatgaggaagttgttcagtactgtcactaattaacgcgcacaaaaaaaaaacttgttgtgagtaattatgggtgatttcgctgcaaaacaaattagtatacgaattattatttttcctcaaattgtaaaggttttgtttctattaagtctctaacatttcccagattaaaaataccaaaactatttttaaacttaaggaataaagtatcaaaattaaccattaaattaatagtccttaaagttgctatgtatatggtaagtaaaacaattcctattctaagttatacatggtattaaattctaggtacagtcgcatgaagcattattgacttttattaactcagtgttttaaaaggtttcatactaatctatgaatgctctgaatgctgcagggaaaaagaagcacaatcagtatttcattatttatgaattctcaatggaattatcctatccggtccacacacataatagcattagcatttcttcttataccatgttgaaatactttaatacaaactctcaatagaagcttaaacataagtggttaagtctgttgtctagtctcattcacctgcctcaacatgctttctttcattctatttgcatacaaaatgttcttatttcagttttgtagacaggatatgagttagcatactcgtgtttgttcagctgtccatcctgcatcgttactacaatgcctttttctgccatttaatggtgtttgtatcaatgttcccatatttgctgcattttaactccataaaaaggaaatgtgatttcgtattaatagttttgttgatcaactcaatatttctgcaccaatcagcatacctatatgcatgtagtagtctgtacaattgttcaacatcaaaatacttgtttactttatgtcaaaatgtctataaaattgctggcattgttctccatttcagtctggtagaataagcgagatagaaaataaatgtgtaaatgaaaaaaaaaaaaaaaaa

SEQ ID NO: 77 - DNA, 1214 bp, Homo sapiens
ggagaatattaaaataaatgcagaatgcgttggctccgcttctggtgtgtgttctcttcatgttctcaacttggccttggacttccaaagaggtggattagtgtctccacaaagatccagcagataatcactgtttctccctttaatccttttagagacaaagtaagaataatatacaatggtaccttggccctccaggggttatttacctggtacctcagttattactaacccagctgagaagcaggaaggaaggagatgggcctctgaacagccaaaacagatgtctaaagttcaagctcacctggatcatttattcttaatttagacaacaaaatgaggtttttccagctttggcacgttagtgaggatgctatggcaggttccttgagagcagccagaagtgatagcctggtttgagctgaggggtctgtggaatactgatactcaaacacaatagctcaagaagccggatggtctgggcccacactcggttttcacagtgagtaactgctgttcgtaatgacagtgctgcattattagagagaaattaattcattcttcatataatcttgcaaaggctcttagagtatgatatcatttaggaggtattaccaccagatatgattaaactccctcagtttttctgctaagttttgttttcatatcagtgccagaatttaacagtggtctctatcctacgagggaaagatagagtagctgcctttagttagaaatatacataaccaaaagtgacagacattaggaattgttcaaaaaggatcttaacctggaacagtggaatgatttcctacaagtgcattatttgccttttgartwaaataaggtccactatcatccatctttgsggcctgatgarttttagaattcararcttttcagattttttgaaaggaaatatgtatgtatacaaaaccacacatcacataaaagccctggcagggtctaaggtaacacactatgataaagcattaatatttctgcagtgaaatgtacgaagaactaattaggacaaactctgtagtttatttaaataataaaccagtagactgggtgcggtggctcacgcctgtaatcccagcactttgggaggccaaggttggcagatcacgaggtcaagtgattgagaccattttggctgatacggtgaaaccctgtctctactaaaaaaaaaaaaaaaaaaaaactcgtag

SEQ ID NO: 78 - DNA, 1338 bp, Homo sapiens
  SITE (266): n equals a,t,g, or c
  SITE (327): n equals a,t,g, or c
gaattcggcacgagctatacagggcttatgtgcatatctggatgggggcttcccagtgccctttcgcagcggccctccggcctctacacttcctcctctgggtagcagctctccttggtctccagcagccactccagaggctgcagctcagaaatgcctaggtaccagtgaccagcctgctcctcaacctccctggccagctagtcttggttgccctgttttctgaaacgtacctccacatcamaggccactcttggctgcttranctgcactgtragtaagttgttctgcttsctgtcctgtgcacagtcgatttctgtgacgggnaaggcctgctgctgtgtgtcctcactgacactcaccacgaagagcacttctgatgtcagcagcaagcacccttcatgctcctggcctgagcccctcaccagaaccacgtccagggccatgtggacttctggtctgcccagagactgaagcattttcctgtttaaaaggagaaaagtgaggccaggggccagctgtgaaaagatggtcacttatcagtgctcattatttaccaatggggcaacctccacaagggcaaagggccctcaccaatccagttacccattttagcttgaaatgtaattgtcagttctcagactgattctgattaacagaacctgcttcctcctgggaacaaagatttcccttggttttgcttattagctccttttctccccattagaaatagcacctctaattagagtgctggttccacagggaatctcaggccctctagcaagactgggtttctctgccaatgtatgaccttccttgagtggttaggtacggaacagaggagttgtgcagccagccccaaacctggcaacagcagcctcttcctgtccctctacagtgctcttgtgctgcctgagatgccagtgccaacaatggctactcctgggctycctggaagcatggcccattagcttgagagcaagccaggagctattracatacmatatggatgtaaagttgagcacgtatctcaataattttaccagacatatttgacatggctgtttggagcctggtcagcatgtagatcacttggctgatggcgctgtttgggaagctgagaaagtccagctccatgtaaaatacctgtggtaagagaagtaagggagttttactacttgttttctggaaaacagtttcatgctgcaatgatgtcatctgttcagagccatccataaaatgttacagatccaaaatgatgtcacatctttggaagcaagcgtatagataatcattaaacattacaatgctcttaaaaaaaaaaaaaaaaaactcgag

SEQ ID NO: 79 - DNA, 1686 bp, Homo sapiens
ttaaaaacaaagaaatatagctagtaagtccaaaatgggaaacaaaatcaaatcactgtgcccagccatttgtttattttcttaggaaaaatgtctattcaaattatttgctgcctttggttcttcctttatcttattacgtgccagaaaccctccttgccccttgactttttcattcttccctcttcggaggtataatataaccattgtacagtggtttagagtttaggctactgtgatgtggcacctatttctacctcttattgtaccaactattgtatcttgggctagttacttaatcctgcagagcctcagttttcttgtctgtaaaacaaagatatcagtacttccctcacaactttgttgttttgaatgagatgttgtatgtaacatggttagaataggacctgacacccaccaggtattccataaatgttagctgctagagtattctgcacctgcccatgaaagattaactgtcacaggaattgccctcctgccataaacaatgagaaaactagataaaatatatgaaaccacagtttttgacattgaacaacaggcaacatgggactgttatctctaagagaagggaaaaaaccaaggtgatccctacagttgccctggcttactgcttaggcacagtttctaggctacagcaaggaaagagaaccaaaaactgraactggcaaccttacttgactagagmcagagatgacagtctgagaagagtaaggcaaagtgctgaaaaggctggaactctctacagagmcakccccttggttttttgtatatatagtaatctgtgcatgaatgagatgaagttcctcaaagcccaagatggaaccttcagaaagcaattgactgaataattcacaaaattcatgatttgtattcccaccagccagtgtgaagagtagtgggactaatttagtctcagaataaaaactattctggagyttccataacwaagtgtagagcaagccttggaagaagcaaactgattagcaggttacataattgtgcaccacactaacaccaaataccctttaaaggaatatttaaaggagcacccttcaaacaaaacccactacccagaaaagtcacaaccttgcatttaatcagtaattatcgagtgtgcaaaaataccaacttacatgaccagtaagctgaggagggataatcaatcaataggtaaaaaccccagaatgacggtgataatagaatagaaaagaaccagcctggcacagtggctcatgcctgtaatctcagcactttgggaggcccaggcaggtggactgcctgaggtcaggagtttgagaccagcctggccaacatgttgaaaccccgtctgcatgaaaaatagaaaaaattagccaggcatggtggcgggtgcctgtaatcccagctactcgggaagctgaggcaggagaatcacttgaacccgggaggcagagcttgcagtgagccaagatcgtgccattgcactccagcctgggcaacaagagcgaaactctgtctcaaaaaaaaaaaaaaaagaatagaaaagaaccttaagccaggtatgatggctcacacctgcaatcccagcactttgggaggctgaggcaggaggatcacttaagccgaggagttcaattccagcctaggcaatatagcaagaccccatctcaaccaaaaaaaaaa

SEQ ID NO: 80 - DNA, 1634 bp, Homo sapiens
  SITE (311): n equals a,t,g, or c
  SITE (567): n equals a,t,g, or c
tcggttgggcatgctgcttaccgcagatgatggaagcgacggcccgtacaaagacagaagcgttggtttcactgagtcagtgctgattctctcaaatagagcttgaaggataaatcttcatttttgtttcaacaaaacttcgaaacaaaatggaagaaaataatctacagtgcagtagtgtggttgacggtaattttgaagaagttcccagggagacggcaattcagtttaaacctccactatacagacagcggtaccagttcgttaaaaatttagtggatcaacatgagcctaagaaggttgcagacctngggatgtggtgatacttcactcttaaggctgctaaaagtcaatccatgcattgaattgcttgttggagtagatattaatgaggataaattacgatggagaggggattcgttagctcctttcctgggggattttctgaaayctcgggatctgaatttgaaccatcacattgtatcatggctccgttgtggagagagactctcgtttgcttgggatttggacttggataacgtgtattgaattaatagaacatttggnattcaggtggatctggccagatttcctggaagtggtatttgggtacctgtctccatccatgattgtcatcagcacaccaaactctgaattcaatcccctgtttccatcagtgaccttaagagattcagatcataaatttgagtggaccagaatggagtttcagacctgggctttatatgtggcaaatcgctatgattactctgtggagtttactggtgtcggggaaccaccagctggagctgagaatgttggatactgtacccagataggaatcttccggaaaaatggaggaaaggcaacagaatcatgtctttcagagcagcatgatcagcatgtttataaagctgtttttaccacctcatacccaagcttacagcaggaaaggttctttaaacttgtgttggttaatgaggtgtcccaacaagtggaaagcttaagagtgagccacctgccaaggcggaaagaacaggctggggaacggggtgataagyccaaagacawtggtggctcaaaggcccctgtcccatgctttggaccagtcttcacagaggttgagaaggccaagatagagaactctcccacacccttctgtgttggagataaatttttcgtacctctgcagagactccttgcgtatcccaagttgaaccgcttatgtgctratgaagagatgatgagatcagtcattgctgactcaattcctctgagcagtgatggttctgcagtggtggctgacctgcgtaattattttgatgaacagtttgagttttgaaccatgtttatttcctgaaatttcagggtctcagcgatagttgtgctcacttagaatttagttttttttgtgtaatcctaattcaagtaatgtttttaaagtttcactgcaaaagtctatgttccaagccattggacagacctgcttgagatatggccagactgcagtgagccctgagaaagatatgagggtttaaaacgggtgctttcctttgattttggacttttttgttttctcaagaataaagaagttggatgtggtaatatgttaaaaaaaaaaaaaaaaaaaactcgag

SEQ ID NO: 81 - DNA, 2012 bp, Homo sapiens
tatgcaagctcgaaattaaccctcactaaagggaacaaaagctggagctccaccgcggtggcggccgctctagaactagtggatcccccgggctgcaggaattcggcacgagtgtagagctcaaagaaatctgccaacatgtatgtggactcttgagaggtgggctttcccagtacatgctaaacagacttgttatgccaagaggaagtgaatagaaatgatagcatcaaatatccaaactgacaggaagtttcttttgcatagcatagaacatggttgtcttctgagttccactaatgttccaggatatcttggccctctgcctctggctgctccctggtgtttggcaccatagcgttgtcacttacaaccattgccttgggacacacagagtgaactgtttgagtgataagtaatttaggtagaaactttacccttaatttcaaatgataccaaacagctcattactaccccaagggacgctctccgtagcttctggattccccagtttccttctagaaacaaggactccaatagcactataaccctaaacaggccctaacccagaagaatacaccacaaaatgcgattgattttctcaaaatatcacagtcttagacactatacaaataattcaagaaaattctttctaccctgcagtggatatagtattctattatattctccagcaaaacttttaggacttttcaaactcatttctaagccaaatagtttagataaatatttacccttatatttggggggaattcaggctcaccatttgccgaggcaagcccatcaacagtctagaggcatattctgtgtcattccttcccgtctccttcatagaatactactttttccttttgtctcctggccattctccatcatctgctgattattgctaaccacaggatgctggcaaagcttacagtgataggcacatgtgttcagtgatgtccaatacactcttatcacagtggttattgcttcttactcttttcaaatgcattattctacccctcaacctatatccaatcattagaactatacctgactggagcccagaacttgggaccaatacttaattcaaatagcaggggcttgctcacaaacattaagcccaaaaagaagcacagcactttgaaaagtcaaataggcctttggtagctctgtacatttgcaattttacatttgttattagtttatagcactaataacacttcagtcgtgaatctacagtctcaatatgataagtcttagaacatgttctagaaatagtggtaccttgctgctattatacttagtaacttataccccaatataataataagtattaaatacagattgtgtatgcattctttgtgtgtatatgccaactgtactacttaacctcactgatgagcaattagaaaaatacacaaattgtcatagtgaaaataagtcttggtcaattcagatgatacgtgaacctgataaatgctctaatagatatgctattttgtcctgtattgcttgttttacagtatggtgcatgttgtttgctaagtaaaatgataataataataaagtataccaattttaaggttagaattaaaattttgcacatatgcttcttgatattctgaaatgtattctgtggcttaattatcttattcatacacatttcactttggctttttacccctaggaaataactgtccaagtatatatctcgtcttctttcttgtaactttgattaaactgcttacttcaacttacaacattgtaaagccagaatacctcattttaacagtgaaaaaaaatatgatgacctgatgtgttctcttgtatttgatttgaactacctaaataggcttaactgtaataataaatatacaattttggcaggcattttttcctttgtttggatgaacattttgttattggtccacttctaattttgtcttaaagagttataaactcagtgtcaataaaacatcttgttatataaaaaaaaaaaaaaaaaaaaa

SEQ ID NO: 82 - DNA, 1322 bp, Homo sapiens
ggcacgaggtggggctagctggaacttagtttccaactgctggaatggattatttccttctggctagggctgatccaaatgctcttccatgggaacctgctgaattctgtcctgtgttgcttttggctgtgacagggcagcactgagttccaatgcaaagtttcacaattacttcactcttcctcctccaaacacacggactctctcagcaccacaaggtactgctggagaatggcggatgagtggtgtagacaactcaagaccatcttttctacgctcttcagtgcctctttccttggtaggatgttaaaactaagtactgtgatcactcacctgatttttggttcttatgaaggtgttttcttgtgtggatagttgttcaattttggtgttcctgcagtagagacaatcaatggagggttctgttcaactctcttgggccaccttctccaatcctgttctacttaatgtatcttggcaaactttccatatcagtacagagaaagcttcttcattctgactgctgcatagtatcccagtgcttgaaggtagcatgattaatttagccatccaattcataggcacaggttatttgggttgctttctattacttgtaattacaaacagtgctattctgttatatcttgaacatatatttttgtgcacattatagaaaatgtcaaagtgattttcatgtaggttgttccagtgaatgagagttcttattttgtcacatacttggcaaccctgagattatcaatacgatttaaatctgtctgccaaacagataggtttgtaaaaatgtactttattgttttaatgtgaatttctttgattataagtaacaattaagaatatttccaaatatttgtgaaccatttttctttttttgtgagctgccttttcttgtcctttgttcattttaaatcgggttgttttagcctcttttaaattgatttttaaaacttgtatatattaatgatatgatttagttgtgtccccactcaaatctcatgtcgaattgtaatccccaatgttggaggaggggtctggtgggaggtgattggatcataggggcagatttcccccttgctgttctcatgctagtgaatgagttctcacaagatttggttgtttaaaagtgtagcacctcccactttgctctcttcctccttctctggccatgtaagatgtgcctgcttcccctttgccttctgccatgattctaagtctcctgaggcctccccagccatgcttcctgtacagcctgtaaactgtgagccaattaaacctcttttatttataaaaaaaaaaaaaaaaaa

SEQ ID NO: 83 - DNA, 941 bp, Homo sapiens
ggcacgaggaaaaacagaaagagcatctggggagcgagtgaaaattccttaggtgattcctaagatttccttgggtatctggtttttgttttcatatttgagtgtgtgcatgtgtgcatgactttaatgacttttttaatggggtgggaggtggctggggtgctggggttgaaggaagtttgggttgatttttgtggtgttttgtttaatagagaattttttttttcctgttcccctgtcagctggtctgacagatttaagaactctcattcttaaaagactttggacttaaatctagcatttagactaggactgttctactgtgaagaaagttctgtctcctttagcccggtttgtttctccctgctcaggtctagaatcccaagcagtgttcttttctggtgaacactgtgagccgcagatgtgactttttttttaaagtcatctcttcagcaatccagaggttccttgacctcattatttgtcctatctctcccttatagtcctaagccaagacatttgacctttgacatttgacctttgcagtgtcatgtgagggcgtcagtatagaggcctttgcatctgggcctggcacccgctctctgcctctggaggctaaaccctgtctggatttctcttgggatctaacgtgggatcttctggacagacaaccgtgacatcagcagtgctggtgctgctgtgtgtggactgaacacctgcactttgtcagaggacacgctgcatgggccccgcttgcggttcattcaggcctgctgcaggagctctgagaacaagaaagagtggacacccgttcccctgcatcatctgtattgcgtgctatttcagagtggggaagtgataaactatttgccttctggagctctttgtgaaaaattaaaaaaaaacttagctcaaaaaaaaaaaaaaaaaaaaaaaaaaaa

SEQ ID NO: 84 - DNA, 1874 bp, Homo sapiens
gatgacttatatttcaggcctttgtttgtttcctgttaggtctcattttttgatatgctctttctcattagagaagataagatgttttatttttattagaaatcaggaatcattttaactcacattaccatgatctggagcattgttacatgttggatttgtgtgtgcactggtgtgtttatgcaagggagactgaattcacaagtcagaggtgaatctgagcctcattaggcagaatattcaacccagcagaaaattgaatttgtcgcacaaagcacttaaacctacaacccattgcaagaattgaaatcagatcagggataagtgatatcagaatctgggaaagccggaggtgagggtggaggggaagaagctgaaagtctcaaagcaagcatcgttttcaccttggtggggtgaaatttcaggacaggattttacctgaatgccacagctgaggaggaaggtcagttgcagctttaggcgatttaccagctttgagaaactagtcagtttaggaaatgattagggtattaaagctaaggtttaagataaagaaagaaaaggccacctagttgagatccaactggttggacttgggtttatgggaaagagagacagtggttatggttgctgtgggacaaggtctggaaacagattcctgagggacatagcagctggcagtgggcatagatggaaatcccaaatgcctctttcttctgacccctctgtcttaaacagggtagtgtggctgattttaggtcatgtgcctgatagcagtgcaagagaatatacaagaggtaattgggagataaaactctggtgcagttgttactgggggcactcatagtgtacacaggagaaaaatgtcatggaatgtttcattagctgcatccttggattagagaaaacacctttccagagcctccttcctcctgcccgttaggttacctgggcatcgactcccctgtctttgagatagtcagctccctgaggccaaggatgctggcttgagttggtttcttcacagcatttaacatagtgcctgacacataatagtctctctatttatgctaaataaatacaatcctcaagacttgacatcagctctggaatagtagagtgggaatgctgcagaaaagatccagagaggaaagaaggcaccgagatgttaaaatgcggcttgttgacagaatacttgggattgtgcagtgctgctatttctatttttcacttttggcaggtatttattatttcactgataggagacatcaagttccagcattttaatcctgtacttgaaacctacatttacaagcacttcagcgccactttggcatatgtgtaagtatgatctgaaggaactacatgttgttggatctttggatttgtactcttaggactggattgttgagaaacgagacggacctattactattcagtaaatacgcctgttaaggcagaactcttattctaagcttccgggtggaaaaagggaaccatctaagtattctaactctgaaagggggctaagatcagggccttcattctggatcaggcgaaatttccttaaggatccagaataggccaggcgtggttgctcatacctgcaattccagcactttgtggggaggattgcttgaggccaggaattcaagaccagcctaggcaacataacaagaacctatctttacaaaaaattaaaaagttagccaggtgtggtgacacacacctgtagtcctagctactcgagaggcttaggtgagaggattgcttaagcccagggaagtcaaggctgcagtgagctgtgatcatgccattgcactccagcctaagtgacagagcaagacttagtatctaaaaaaaaaaaaaaaaaa

SEQ ID NO: 85 - DNA, 643 bp, Homo sapiens
ggcacgagccccagaccccttacaaactctgtacctctcggtgcgcggcagcctcttgctgtagttcttcttttctggatatgactgtcagtttcgtcatgagatttcttgctctcatttcgaactctttctttcttccactttctttgggggcgacccccgatccatgccaggtcttcctgtgaagaccgttccaacctcgtttccatttcttgaatgttgagtattacaacatcactgcgctagggtgcttcatggtgctgttctcgaagaggccagttgggctgaatctccttcctcccactggctcctgatatcttgctgtattttgtcttctttctgatttttccctaggggtttggggtgggtgacttaggggcggcttttgtgttctccctctctctctctttcttttctgtatgtatgtatggactggttaaagtgagtttgggcagctgactttatggtatgggttggctgacttttgttcaacattaaagacaaaccaacaaattgtacagctgcacacagaacacctttgagtgtgaacttgaatggcaactagaggcttactttttgaacttcaggtatgtaactcaaaagtaaataaaaacactattttttcaaaaaaaaaaaaaaaaaa

SEQ ID NO: 86 - DNA, 1669 bp, Homo sapiens
  SITE (1601): n equals a,t,g, or c
aggaaccacttgagcccggcaggtagaggttgcagtgagctgagatcacatcactgtactccagcttgggcgacagagcgagactccatctcgaaaagaaaaagaaaaagaaaagtctgtttcatcagaacaggtttctgtgttgacaggatttacctttcaggccattaattgtgttgctctgctctcttcctgacttcatattgcttcagaagagatgtctgcttccattctttgttcctttgtacatagtgtttttttcatctctggctgcttttcagtggtttttaggaaaatgattatcacattatttatgtagttttttgcacattattttgctggagttgtttgaacttcttggctctgtgtgtttatactgtttattgaattggataaacagttgtacacccatacagtgaatactgaacaacaaaaagtaatgaagtatttatacacgcaacaacacgggtgaactgtaaatcatgacctgagttaaagaagcccgggaaaataggtgccatatggattcatttatataaaacttgaagatgcaaactgatctacagacaaagatttgtggttgcctggggatggtggacagatggatcgatcacaaaggggcatagagacttttggtgaaaaaggaaatgtttttatctcgattgtcatgttttcactgacaaatatgtcagaactcaacaaattatatattataaatatgtgcaggttattcttcgccaattatgtatgtcaataaagttgttaaaggataaaaaatgaagggtttggcctgcacttttgggaatctgtagttctcttagtgacccatgtatacaaaaattcttaagtgtaggttatggtgtttttaacaatttataatactgatgaagtttaattagcaattcagaagtacactttaattaatttgatgcatacaaaagtgtgcaattataggtctaatgctatgctattgattgttcagttttgctgtagtgaatgtgaatttttattttagagatgaggtctcactctgtcgctcaggctggagtgcagtggtgccatcagagcttactcaacctcccaggtcaagtgatccttccgcctgagcctcccaagtagctgagactacaggctgaatgtgaatgttgaatgaatgaatgaattggtgttaaacaggctaaactgtctcagaacttgtggattgtgctgaaagcagtatggcctctggcagtgaagtaaaccttggcccagatactgccatgaggtggctatctagctgaacattttagtacaattctgagacttgcatatttattctctcatttcctagaaaataccggccaaaaaaagtatgaggtctataaggaggaggaaaaacatgaagtttaacatgcctatagaaaaatttacatcccatgaatgtatataatttgctgctgttttacacagcaaaagcacccctgtgactagcacccagatcaagaaatagaacaccacctagctctggcagcttttaacaattttattctggccgggcgtggtggctcacacctgtgatcccagtgctttgcgaggctgtggtgggaagattgcttgcgttncaggagttcaagaccagcctgggtaacatagcaagacctcgtctctactgaaaaaaaaaaaaaaaaaa

SEQ ID NO: 87 - DNA, 948 bp, Homo sapiens
ggcacgaggcggcctgggagtcagcggcccgagcgggaagcgccgggcgagcccactgtgcggccgtcgtgggggaagcgaaggttcctgattccacctacctcctaagtgaaggcttccgtccctggagaggaggcggcgccctgtatcggccttcgtcctccgcgggagctgcggcgccaagatgagtggagaggagaacccagccagcaagcccacgccggtgcaggacgtacagggcgacgggcgctggatgtccctgcaccatcggttcgtggctgacagcaaagataaggaacccgaagtcgtcttcatcggggactccttggtccagctcatgcaccagtgcgagatctggcgcgagctcttctctcctctgcatgcacttaactttggcattggtggtgacggcacacagcatgtactgtggcggctggagaatggggagctggaacacatccggcccaagattgtggtggtctgggtgggcaccaacaaccacggacacacagcagagcaggtgactggtggcatcaaggccattgtgcaactggtgaatgagcgacagccccaggcccgggttgtggtgctgggcctgcttccgcgaggccaacatcccaacccacttcgggagaagaaccgacaggtgaacgagctggtacgggcggcactggctggccaccctcgggcccacttcctagatgccgaccctggctttgtgcactcagatggcaccatcagccatcatgacatgtatgattacctgcatctgagccgcctgggctacacacctgtttgccgggctctgcactccctgcttctgcgtctgctggcccaagaccagggccaaggtgctcccctgctggagcccgcaccctaagcatcctgctgccttcccacaacattaaactctccttcctcagaaaaaaaaaaaaaaaaaactcgtag

SEQ ID NO: 88 - DNA, 2007 bp, Homo sapiens
ggcacgagctaaccttagaggtatcccaattggaatgttagttctgggaaacaaagtcaaagcagtgggagaggtaaccaattctgaagggacatgggtgcaactggatcagaacagcatggtagagttctgtgagagtgatgaaggagaggcatggtccttagctagagacagaggcggaaaccagtacctccgacatgaagatgaacaagctcttctggatcagaattctcaaactcctcctccaagccctttctcagtgcaagcttttaataaagggcaagttgcagtgcccaaggatttgattatggactcggaaatagcaaagttttgactgttttacccactgcaggtgaccaactgagtgccatattgaattccattcagtcacgacccaatctcccagctccttccatctttgatcaagctgcaaaacctccctcttccctagtacacagcccatttgtgttcggacagcccctttccttccagcagcctcagcttcagagtgatcgaggaaacatctcaacatcttctaaaccagcctctacatcaggaaaatcagagctgtcctctaaacacagcagatcgcttaaacctgatggacgtatgagccggactactgctgatcagaagaagccaaggggcacagaaagtttatctgctagtgaatccctcatcttaaaatctgatgctgcaaagttgaggtcagattcccacagtaggtcattatcccccaaccataacaccttgcagacattgaaatctgatgggaggatgccttctagctccagagctgaatccccaggaccaggttctcggttgtcatctcctaagccaaagactctcccagccaataggtctagcccatcgggtgctagttctccacgctcctcctcaccacatgataaaaatctacctcaaaaaagtactgctcctgttaagacaaagcttgatcctcctcgggaacgttctaaatcagactcttacacacttgatccagataccctccgcaagaagaaaatgcccctcacagaacctttgagaggacggtcaacgtcaccaaaaccaaaatcagtaccaaaggattctacagattcccctggatctgaaaatagagctcctctccccatgtggtacaggaaaacctccacagtgaggtggtcgaagtctgcacctcaagtactttaaaaacaaatagtctaacagacagcacctgcgatgacagcagtgaatttaagagtgtggatgaaggttcaaataaagttcattttagcattggaaaagcaccactgaaagatgaacaggaaatgagagcatctcccaaaataagtcgaaaatgtgctaatagacacaccaggcccaaaaaagaaaaatcgagttttcttttcaaaggagatggatccaagcctttagagccagccaagcaagccatgtctccttctgtggccgaatgtgccagagctgtgtttgcttccttcctctggcatgaaggcatagtacatgatgcaatggcttgttcttctttcctaaagtttcatcctgaactttccaaagaacatgctcctataaggagtagtttaaatagccaacaacctacagaggaaaaagaaaccaagttaaaaaatagacattcattagaaatatcatctgcactgaatatgtttaatattgcaccccatggaccagatatatctaagatgggtagcatcaacaaaaacaaggtattgtctatgcttaaggaaccacctctgcatgaaaaatgtgaggatgggaaaaccgagaccacttttgaaatgtccatgcataacacaatgaagtctaagtctcctcttcccttaactttacaacatttagtggctttttgggaagacatctctttggctactatcaaagctgcttcccagaatatgatttttccaagtcctggttcctgtgcagttcttaaaaagaaagagtgtgagaaagagaataagaagtccaaaaaggaaaaaaaaaaaaaaaaaa

SEQ ID NO: 89 - DNA, 1687 bp, Homo sapiens
  SITE (380): n equals a,t,g, or c
gtttaagaaaatgtttggatggggcgattttcattccaacatcaaaacagtgaagctgaacctgttgataactgggaaaattgtagatcatggcaatgggacatttagtgtttatttcaggcataattcaactggtcaagggaatgtatctgtcagcttggtaccccctacaaaaatcgtggaatttgacttggcacaacaaaccgtgattgatgccaaagattccaagtcttttaattgtcgcattgaatatgaaaaggttgacaaggctaccaagaacacactctgcaactatgacccttcaaaaacctgttaccaggagcaaacccaaagtcatgtatcctggctctgctccaagccctttaaggtgatctgtattnacattcctttatagtacagattataaactggtacagaaagtgtgccctgactacaactaccayagtgacacaccttactttccctcgggatgaaggtgaacatgggggtgagactgaagcctgaggaattaaaggtcatatgacagggctgttacctcaaagaagaaggtcacatctgttgcctggaatgtgtctacactgctgctcttgtyaactggctgcaaaatmcactagtggaaamcactctgatgtaatttctgcccagtcagcttcatccctcagtataattgtaaatcatcacagattttgaattcacacctgaagacatgctctcacatatagaggtacacaaacacaccgtcatgcacatttcagcttgcgtctatcatgattcctgttgagagggctttcattgtctgactcataatggttcaggatcaactatcatcaaacggaaggattaactagacagagaatgtttctaacagttgctgttatggaaatctcttttaaagtcttgagtacatgctaatcaataatctycactcatgcattcctactgcttggagtagctgtactggtaaatactactgtaggagtatctgcttgttaaaatggaaaaatgtgtctttagagctcagtattctttattttacaaacacaacaaaatgtagtaacttttttccagcatacagtaggcacattcaaagtggtccaagatggctcttttttctttgaaaggggcctgttctcagtaaagatgagcaaacatttggaatttacatgtgggcagacattgggataacaactttcatcaccaatcattggacttttgtgaagtcgacaccagctaaggctgcttaaaataagttctgatcattatataagaagggaaatgcctggcagacaccatgtaagttataagtgtctgtcttatctttactacacatattgtaacaaattcaatatcctagtcttcatttgtatgaatggtttgtattgtacatagtttaaccaagtgttatttgagctgcttattaatattaacttgtacttgtctctctgcttgttattggttaagaaaaaaggatatgaggaattcattttatcaatgtagctgtgaaggccattaaaaagacaaacttaatgtacagagcatttattcagatcaagtattgttgaaagctatacatatacaacattacagtctgtctgtatttagatattttatttctggaaaaaatgaaatgtacataaaaataaaacacttaaagttgagtttcaaaaaaaaaaaaaaaaaactcgag

SEQ ID NO: 90 - DNA, 952 bp, Homo sapiens
ggcacgagcttattttctggtggaggagcttagtaagtggtgctacaattgctgtgcaaagaaattccagaggggagaagaatgtaaaagtttggtggtgggtggcttggcattgcccctttttcccaccgattcggtggctggtgaaggtgggagatgtgaactccaattaagggactggagagaggtgaagaattttgcaggtgggagatttggatttgaatgtggacttgtaaatgacttgaccttgccatctgtgttcaaggtcacggtttgctgtggggttcctgggagagcttactcaccccggagtcttttctttctcttgctccaagaagagccctgttggtgctttaccaccgcttggagtctcccgaggacacaaacaggcagagagggacgtgtagggagagttctttcctgttttctgtgctttcctttttacaggactcccggaaggccactcatggccatgccaggagctttctcagaaacagtcataaacgatctcttgagtctctttcttgtcctcccagctgagctttcttattccaccctttctggtgtctataggaatgcatgagagacctggacgtttttctgctctcttctggcctccatggagccatgggctcggctcggcggctcctcacctcacaatttatttcctcctcccgtgccagcccttcttttgtgtctgaaaccggttttaaaatgtgactctcccagagaagaagccgctggctgtatgaaacttgacggcgcttttgtaaggtgccacccccaaactttaaggtagctaaaccaatttttaaaagattcaatggcttgttcatcctccagatgtagctattgatgtacacttcgcaacggagtgtctgaaattgtggtggtcctgatttataggatttcataattaaaatgtctgctgaataaaaaaaaaaaaaaaaaa

SEQ ID NO: 91 - DNA, 1410 bp, Homo sapiens
agggaaaaataacacagctactcctcactgcaaaaacatatccatgcgtagaatcaacaactccagtcatgggaccaggaggagctctgggacgcagacacattccttggatgttgattttttttatgatctagtaaaggaataggtaaagtctttgatgtcagtgaagtggcaacatagccaaaaagttgggtaccttttaggaaatgatgttgtaagtctccttaatgtatcctgaggtaagtttcctactggcagcagattttgtaagaattacttttaagaatttcattctttttgtatggtcatggagctccaaccatttttaataggaaagtcttttgtaaattgttgtcgttttaatgtcatttctgtctttataacttgatcaagaatgattggaaggcaaacaggtttacaaatcaattctgtgacttttaaaaagttgacaatgttgtcagatttaaaccagtgtggctagtaaaaagcagctcactcaatgtgggtggctccctattcctttacgctccccctatccctaccccacaagcctttcgattataaaatactaccaatcttgttataagattactgtggagtagtcaagtactccccgggccttctgagctggtggaatattttatttcagactgaaaacagagagcactctccttgggaagggaaagcggagcttgctgagtgagagatggagcctcatggtgtacaactgagggtagttaactcatcacttctcccaagcactcgatcccagcttcacccactggtgttgctttgcttgaactgttcaagccttttatagccttaccataagtatttagatatggtgtccttttctgtttttggggggggagttttgttgtgtttttttaaagtaagtgcttaagtattaactttgggttgtcccctctgtatgtttcgaaggggttttggttctttttgcttctgttttcttaaacatgttttccactcccacttgggcattttggaagctggtcagctagcaggttttctgggatgtcgggagacctagatgaccttatcgggtgcaatactagctaaggtaaagctagaaacctacactgtcactttactgagatttctgagtatacttttcatattgccttaatgtagcagtaatgtgtttatgcatttgtttctttgcacagacattttgtcaaatattaaaactctacttttttatggcacatattagcatataagcctttattccaagaggtatttattttttcacttgtaaaaaaataatgtttccacgtaaagaactctgttatatcctagaggactctgtcttttatattcgggataataaagactttaaagcaaaaaaaaaaaaaaaaaaaaaaaaaaaaaaaaaaaaaaaaaaaaagg

SEQ ID NO: 92 - DNA, 1759 bp, Homo sapiens
ggcacgagcacaagccctgtgagaggtgtgtttggaatcacttggtatccaaatcacatgtcatccctaggagcaaggagaccggttggatttggggctggtctggaatgaagaagcatctctcagcttccgaaggctgcatggctcacggcagtatctcaatcatgccctgcccgtttgcacatttggtcctgttggtagttacctctctggtgactggcaaagtcagcaaggatattggggtggagcaccctggctaagcaccctcttgattatagagctatggagtagaagacagatggagaatgagaggcctgtgagaacaatcagtcagttgccatctttcagagctgctcgagttcaaaagtgtgtcatacagggtattttaccattgctacctttaagggattcaggtgggaacctaggctgtggcttcacataatggaacttgggtgccatcctaccctgtgatgttgagctggccagcactggtgtaggaacctcaaggactctgtgcttctctggtttggggcctaggataaacacaggccctgcttgccccttggttctaggacacatcttcccatgccagcaaagttaatgaaccagtctacaagataactgttgaaagaattcttagagaaacaacccacaggaggggagccatgtcagagcccaagaaaaccatcccatcctgagctctgccttctgtgctgctctctgcatcctattctctgtcggaacaggaccccactgtgtccttgctcttctaggcagagttgtgggagagtgctaaatgcttttgagtggggcagcctgtggaatgggatctcatactggctccttagaccttgggcccatgaactcagtatggagcaggacctgcgatgttctgatggattatacccacagtgtattttggcacatctgccaaaagctacaaacaacccccaacaactacacactatatcttgtgagaagtgtcctacccaggagtcctgaatgtgatctgagtatgctctaaggcagccccaggaaaagcaattcagtccctctctctttgcctttagacctgcaggctgggacaatgaaaagaaaatagctattttacatgaaaattttacaaccgtgaagccggaagatgcatatgaagactttattgtgaaacctcccgtgagaaagctggtccacgacaaagagttggcagcagaagatgagcaggtgttcctaatgaagcaacagtcactccttgccaagcaaccagccactcccacgagagtttttgaatttcctgcaagaggaccttctggttctccaaggacccagggtcggggagggccagccagtgtgcctagttcttccccaggcacgtcagtaaaaaacccggacccaaacatcaaaaataatgcagcaagtgaaggggtgttgcccagcttcttcaacagtctgttgagtaaaaagacagtctctcctggaagtcctggtgctggtggggtgcagagcacagccaagaagtcaggacaaaagactgtgttgtcaaatgttcaggaagaactggatagaatgactcgaaagccagactctatggtaacaaactcttcaacagaaaatgaagcctgaacctccttaaaaagtgcatatgtcgaatgaccaaataactatgtatattgatctgctaagaccaggatttttctgatatggcacatgctatcagttttttggggcaggggagatgaactttaaaaaaaaaaaaaaaaaa

SEQ ID NO: 93 - DNA, 810 bp, Homo sapiens
gattactaacatttttaatatgacacaaattctgttttctgttttgaagattagcaccacagacaggtgatcattaatgaaatatggcccttaaaatacacattacaaaagagaaactgatggtaaaattgctggtgaagttaacttttatcatttctccactaattaaaagttcagattctgggatcacatctctaagctgttcatatcaaagagctattttttaaagatcctgattataggcaacaaaagcaaaaataaacaaataggattacatcaaaactgaaaagcctctgcacagcaaaggaaacaacagaatgaagagccaacctacataatgggagaaaatatttgtaaattatacatctgataaggggttaataatcaaaatatataaggaactcaaagaatgcaatagtaagaaaacaacccaattaaaaaacaggcaattccagcctgggcaacatggtgaaaccctgtctctacaaaaaatagataaaattggccgggcacggtgctcacgcctgtaaccccagcactttggttggccgaggtgggtggatcgcctgaggtcaggagatcgagaccagcctggccaacatggcaaaaccccacctgtactgraaatacaaaaaattagccgggtgcagtggtgggcgcctgtaatcccagctactcgggaggctaaggcaggagaattgcttgaacccgggaggcggaggttgccatgagccgagtttgcaccattgcactccagcctgggcaacaagagcaaaattctgtttcaaaaaaaaaaaaaaaaaactcgag

SEQ ID NO: 94 - DNA, 1675 bp, Homo sapiens
  SITE (465): n equals a,t,g, or c
caccgcggtgcggcgcgcctctagaactagtggatcccccgggctgcaggaattcggcacgagctgaaataagtattaatacctaacatttaatattaattctgtcctatgtgcacttacaaatacgtcatataagtatataaattgactttacctattatatgcagaaattgaaggggggaatttctgtgtttctagctttcttgttaatgtgaagggtggggcattttatgttttttcaggattgccttattcaatgaagcaagctgggtttcctttgggaatattgcttttattctgggtttcatatgttacaggtaaaatactatataatttcttatttctgcaacttcaactgtgcaataactacacacatacacacacacacacacacacacatgctgcaactgaatttcctagttaattaaaaagtgcatcaaagaatcctaaagaatttaagcatynatgcctgaggasatycacttttcttactaatcctttaaacagattwgaaaaagtagaaaagcattatatattaccaagcctaaatccttttcatgtgcctttttcactttttgcagaaagtagtagatggggaagtcattttaaagcttcattaaggctaagagacgactgtgctctgaaagtgcagatagcagggcttcgtgggcaggtgcgtgtgaatgagcaaccttattcagctgttgwttgtggaggtagaaatgaagctctggtgatcaaccagcagggctcatcaagcctctccgcctggcttatgcctgcccaaactcgctgcctgctactgtctttaaatgcagcaataagttgcttctgtatcacatcttctcttctgcttccccttcttcatgtaaatagttcattcacacccacgttttgtcactctcccatttaaatgcaggctttacaamtcataatcatctcctctttttgttgtcctcgtccccgccttgtcatcccaccatctcaccttatgacaaacatggcgtctcctctaccttaggatcactgtgaaagaggtggcaatgatcaaaaacagacaccactcacaggagttgctgctgtggtggattagatgcccttttaccagctagtgcaaaacacctcagctgccctttgctctggagtgttgccctgggcctccagggggtctccttgcytccacgggaccaatgtgtggtacagttggagctccagggctccaccactgcagtacttgctgaactctttcccctgccctgtcctctcattccccttcttctggagcatttcatccacagaccccttgcccaagaatgtctgtctcagctctgcttctagagatcctccaagatgccatccctcgtaaaacctcaggcttccaagacctgcccaacactcagctattttttctcaggctgacgaagacagagtaaagcatgaaatagttttcaaattcaaagctagagaggcattgagctccctgccttcttcctaccacctccacccttaagacctaaactgcttctagttattacagctcttaatttgtaacttaggacccataaattagcagcatgagacctaagtgtgcttattaagagttgctggtgtttaaaaattgcagtctacttattggggcatttattacactaaaaaaaaaaaaaaaaaactcgag

SEQ ID NO: 95 - DNA, 1205 bp, Homo sapiens
tgcaggaattcggcacgagcccgagtggtcgccaacagtggctttgatgtgctttgccatgccctggagtcatacaccaccctgccctaccacctgcggacccctgcccttcaaatcccatcacacggcctgcgtaccagggcagcaacccaatcagtgacatttgggctatccacgcgctgcggatcgtggctaagtatctgaagagggctgtcagaaatcccgatgatcttgaagcaaggtctcatatgcacttggcaagtgcttttgctggcatcggctttggaaatgctggtgttcatctgtgccatggaatgtcttacccaatttcaggtttagtgaagatgtataaagcaaaggattacaatgtggatcacccactggtgccccatggcctttctgtggtgctcacgtccccagcggtgttcactttctcggcccagatgtttccagagcgacacctggagatggcagaaatactgggagccgacacccgcactgccaggatccaagatgcagggctggtgttggcagacacgctccggaaattcttattcgatctggatgttgatgatggcctagcagctgttggttactccaaagctgatatccccgcactagtgaaaggaacgctgccccaggaaagggtcaccaagcttgcaccccgtccccagtcagaagaggatctggctgctctgtttgaagcttcaatgaaactgtattaattgtcattttaactgaaagaattaccgctggccattgtagtgctgagagcaagagctgatctagctagggctttgtcttttcatctttgtgcataacttacctgttaccagtataggtgggatatacatttatcttgcaggaaattccccaaagctcagagtccagttccttccataaaacaggctggacaaatgaccactatgttagacccccaggctcgacttcaggggtcagtgttcctgtcccaaaccccacacagaatactctgcctctgcttcatgtagcaaatgagcaaaaactcagtatctatcaaaagtgtaaattatatttcctatgcctagtaattcacttcatgtctaaaaatttatctgatagaaacactagcaccagtacatacagaagcatggcaaggatgtttctggcagcacttttctaataataaaagatttgaaacaaaaaaaaaaaaaaaaaaactcgag

SEQ ID NO: 96 - DNA, 484 bp, Homo sapiens
ggcacgaggggagacaataatgagggactttcagttttactttacataattttcttttaagtattggaatttaggtgatttttcctttggggttttctgtattttccaatcacaataaataaaataagttataaatatttgttgcatgaatgaaatgtataaacccatttatgtatgtatttttttaaaattagtatattattaagtctatacaatattagtatattgttatgtatgtataagctttttaacatgaagtttgcagaatatagtacttcttccaaactctatgacatggggggaactgaagtatggggatatcttgtaccagtgtaagaattcaagaagagaccgtgtgtggtggctcatgcctatagtcccagcactttgggatgccaaagcaggatgatctcttggagctaggcgttcaagaccagcctgggcaacatatcaagaccccatctctaaaaaaaaaaaaaaaaaa

SEQ ID NO: 97 - DNA, 1069 bp, Homo sapiens
gtttaaaagttaccttgatgacagagtcattgctatacttgcaacttattttattgtgggggatcagtgaaataccctctagtaatactgagatgtatagaaaatgcccctaaactaaatgcccccactgttttaagttaaactgtattgttggcctgggagcaagggtaatgggtagtttttccttgtagttaagctttgagctgtcatttcttattttagttattgtactgcctatgaaggctcttctaatttttaaattcttaactcgttttggtgaagtagatgaacaaccaagtttattgaagctttaatcatagttgaacatgtaattgagtcactgggatctgcataaaagtttgcagatyctgatatacagtctttataggagttagaatatgaagattgtagtagctattttcatcacccatcagacttatatgtttattcagtagagctgaaattattaaatgtatgaatattactggctttttcctgaccattcacacttcatggtgatttcacaagagaaggtatatgattctggtttccttgcagacttgttttttataatcacrtttattgaggcttaattttcatacaataaattttatatatattttaagtttacaatttgccactcagatcaagatacggaaaattctcatctattggagaaagtttcctcatacttctttgcagccatcctcccsracctgccacttggcccaggcaatcactaatctaatttttaacactacagattagtttgccacttcatctaaatagaaacatattttatgtagttgtttgtctggcttttttccttcaacaatgtctgccaataatattgcatttattgaaagttacttcatttttattgctgagtagtaagtagtctattgtgtaatggataccacagtttatccattcgtctgtggatggacatttggggtttttacgcttttaagttgcaatgaacatgcatacaagtattgctgtgatcattgtttttccttctcttgaataaataactagaagtggaaaaaaaaaaaaaaaaaaactcgag

SEQ ID NO: 98 - DNA, 1475 bp, Homo sapiens
cacaggccaggctccaccctctagtaaaggggaagaggctgctggttatgcccagragtctcaaagggaggaggccagctgagtaggcagcctggtgagggggggcaggggatgggcaggagggtgggagagtggatgaggggcttctcactgtacatagagtcactggcatgatgccctcgctcccccatgcccccacatcccagtggggcataactaggggtcacgggagagcagtctcgtctcctgtgtgtatgtgtgtgagtggtgggcaggccagtggcagggccggccccagcccctgcatggattccttgtggcttttctgtcttttgctagcttcaccagtttctgttccttgtgggatgctgctctagggatactcagggggctcctgctctccttccccttcccttcttgcctcaccattcccctaggcaggccctgcaggtcccacactctcccaggccctaaacttgggcggccttgccctgagagctggtcctccagcgaggccctgtcagcggtcttaggctcctgcacatgaaggtgtgtgcctgtggtgtgtgggctgctctaggagcagatacaggctggtatagaggatgcagaaaggtagggcagtatgtttaagtccagacttggcacatggctagggatactgctcactagctgtggaggtcctcaggagtggagagaatgagtaggagggcagaagcttccatttttgtccttcctaagaccctgttatttgtgttatttcctgcctttccgagtcctgcagtgggctgccctgtaccctgaacctcatgagcctctaagggaaaggaggaacaattaggacgtggcaatgagacctggcagggcagagtacaagcccagcacccagtgtcccagccttactgggtccttaccctgggccaaacagggagggctgatacctccttgctcttcctagatgcccacctcctacaatctcagcccacaagtcctctccaccctagggggcttgctgcatggcaataactcataatctgatttggaggtttgccctttacaggggcagattttctgctcagttcaacaatgaaatgaagaggaactccctctttctacagctcacttctatcagaggcccaggtgcctcagagccacattgagttgctttttctgggatgaggaagtagggttaaactccccagtttcctgagggaggctcctgacaggtgccctttgtcagaccctaccacagcctggataggcagccacattggtcctcgcccttgctcggcactccgtggtggtcctgcccttctccctgcatgcctgtgggtctgctctggtgtgtgaaggtcggtgggttaactgtgtgcctactgaacctggcaaataaacatcaccctgcaaagccaaaaaaaaaaaaaaaaaaaaaaaaaaaaaaaaaaaaaaaaaaaaaaaaaaaaaaaaaaaaaaaa

SEQ ID NO: 99 - DNA, 1475 bp, Homo sapiens
  SITE (1292): n equals a,t,g, or c
cacaggccaggctccaccctctagtaaaggggaagaggctgctggttatgcccagragtctcaaagggaggaggccagctgagtaggcagcctggtgagggggggcaggggatgggcaggagggtgggagagtggatgaggggcttctcactgtacatagagtcactggcatgatgccctcgctcccccatgcccccacatcccagtggggcataactaggggtcacgggagagcagtctcgtctcctgtgtgtatgtgtgtgagtggtgggcaggccagtggcagggccggccccagcccctgcatggattccttgtggcttttctgtcttttgctagcttcaccagtttctgttccttgtgggatgctgctctagggatactcagggggctcctgctctccttccccttcccttcttgcctcaccattcccctaggcaggccctgcaggtcccacactctcccaggccctaaacttgggcggccttgccctgagagctggtcctccagcgaggccctgtcagcggtcttaggctcctgcacatgaaggtgtgtgcctgtggtgtgtgggctgctctaggagcagatacaggctggtatagaggatgcagaaaggtagggcagtatgtttaagtccagacttggcacatggctagggatactgctcactagctgtggaggtcctcaggagtggagagaatgagtaggagggcagaagcttccatttttgtccttcctaagaccctgttatttgtgttatttcctgcctttccgagtcctgcagtgggctgccctgtaccctgaacctcatgagcctctaagggaaaggaggaacaattaggacgtggcaatgagacctggcagggcagagtacaagcccagcacccagtgtcccagccttactgggtccttaccctgggccaaacagggagggctgatacctccttgctcttcctagatgcccacctcctacaatctcagcccacaagtcctctccaccctagggggcttgctgcatggcaataactcataatctgatttggaggtttgccctttacaggggcagattttctgctcagttcaacaatgaaatgaagaggaactccctctttctacagctcacttctatcagaggcccaggtgcctcagagccacattgagttgctttttctgggatgaggaagtagggttaaactccccagtttcctgagggaggctcctgacaggtgccctttgtcagaccctaccacagcctggataggcagccacattggtcctcgcccttgctcggnactccgtggtggtcctgcccttctccctgcatgcctgtgggtctgctctggtgtgtgaaggtcggtgggttaactgtgtgcctactgaacctggcaaataaacatcaccctgcaaagccaaaaaaaaaaaaaaaaaaaaaaaaaaaaaaaaaaaaaaaaaaaaaaaaaaaaaaaaaaaaaaaa

SEQ ID NO: 100 - DNA, 1067 bp, Homo sapiens
ggcacgagctgaatgagggttttgattttgaatgtttcaatgtttttgagaagccttgcttacattttatggtgtagtcattggaaatggaaaaatggcattatatatattatatatataaatatatattatacatactctccttactttatttcagttaccatccccatagaatttgacaagaattgctatgactgaaaggttttcgagtcctaattaaaactttatttatggcagtattcataattagcctgaaatgcattctgtaggtaatctctgagtttctggaatattttcttagactttttggatgtgcagcagcttacatgtctgaagttacttgaaggcatcacttttaagaaagcttacagttgggccctgtaccatcccaagtcctttgtagctcctcttgaacatgtttgccatacttttaaaagggtagttgaataaatagcatcaccattctttgctgtggcacaggttataaacttaagtggagtttaccggcagcatcaaatgtttcagctttaaaaaataaaagtagggtacaagtttaatgtttagttctagaaattttgtgcaatatgttcataacgatggctgtggttgccacaaagtgcctcgtttacctttaaatactgttaatgtgtcatgcatgcagatggaaggggtggaactgtgcactaaagtgggggctttaactgtagtatttggcagagttgccttctacctgccagttcaaaagttcaacctgttttcatatagaatatatatactaaaaaatttcagtctgttaaacagccttactctgattcagcctcttcagatactcttgtgctgtgcagcagtggctctgtgtgtaaatgctatgcactgaggatacacaaaaataccaatatgatgtgtacaggataatgcctcatcccaatcagatgtccatttgttattgtgtttgttaacaaccctttatctcttagtgttataaactccacttaaaactgattaaagtctcattcttgtcaaaaaaaaaaaaaaaaaaaaaaaaaaaaaaaaaaaaaaaaaaaaaa

SEQ ID NO: 101 - DNA, 1844 bp, Homo sapiens
gactaactgtaataaatgtatgacattattttgattgatacattaaaaaagagtttttagaacaaatatggcatttagctttattatttatttgcttttaagaaatattctttgtggaattgttgaataaactataaaatattattttgtattgcagctttaaagtggcacactccataataatctacttactagaaatagtggtgctaccacaaaaaatgttaaccatcagtaccattgtttgggagaaagaaacagatcaagaatgcatattattcagtgaccgctttcctagagttaaaatacctcctctttgtaaggtttgtaggtaaattgaggtataaactatggatgaaccaaataattagttcaaagtgttgtcatgattccaaatttgtggagtctggtgtttttaccatagaatgtggacagaagtacagtcatagctcagtagctatatgtatttccctttatgttagaagagactttcttgagtgacatttttaaatagaggaggtattcactatgtttttctgtatcacagcagcattcctagtccttaggccctcggacagagtgaaatcatgagtatttatgagttcaatattgtcaaataaggctacagtatttgcttttttgtgtgaatgtattgcatataatgttcaagtagatgattttacatttatggacatataaaatgtctgattaccccattttatcagtcctgactgtacaagattgttgcattttcagaatagcagttttataaattgatttatcttttaatctataacaatttgtgttagctgttcatttcaggattatattttctacaagttccacttgtgggactccttttgttgcccctatttttttttaaagaaggaagaaagaaaaataagtagcagtttaaaaatgagaatggagagaaaagaaaaagaatgaaaaggaaaggcagtaaagagggaaaaaaaaggaaggatggaaggaatgaaggaaggaagggaggaaggggagaaggtaggaagaaagaaaggatgagagggaaggaagaatcagagtattagggtagttaacttacacatttgcattcttagtttaactgcaagtggtgtaactatgtttttcaatgatcgcatttgaaacataagtcctattataccattaagttcctattatgcagcaattatataataaaaagtactgcccaagttatagtaatgtgggtgtttttgagacactaaaagatttgagagggagaatttcaaacttaaagccacttttggggggtttataacttaactgaaaaattaatgcttcatcataacatttaagctatatctagaaagtagactggagaactgagaaaattacccaggtaattcagggaaaaaaaaaaatatatatatatataaatacccctacatttgaagtcagaaaactctgaaaaactgaattatcaaagtcaatcatctataatgatcaaatttactgaacaattgttaatttatccattgtgcttagctttgtgacacagccaaaagttacctatttaatcttttcaataaaaattgttttttgaaatccagaaatgatttaaaaagaggtcaggtttttaactatttattgaagtatgtggatgtacagtatttcaatagatatgaatatgaataaatggtatgccttaagattctttgaatatgtatttactttaaagactggaaaaagctcttcctgtcttttagtaaaacatccatatttcataacctgatgtaaaatatgttgtactgtttacaataggtgaatataaactcagtttatcaattaaaaaaaaaaaaaaaaaa

SEQ ID NO: 102 - DNA, 2122 bp, Homo sapiens
ggcacgagggagatcagtgtgaagggcattgccaaagtggaatcagtaaggcttggcagttgaccttgtttgttggagagaagggataagattttaaagctacatgtctgaaagaatgatgctgctgattgaaataaaggaagaaaggatgcatttcgggctccaacctgtcctaggaaggcctagacctcaaacaccaacacctccatgcatttcctctttggctactatgtcttttccctgacttctgcctctccagctctctgggctgctgcttccacctgttcatctgacttagacsctccctgctgggtccttgttcacctactcatttggtgcttcgtctgccatcagtacctccattgcagctggtgggatgtcagtcaccatctcttatatttgcttcccactagaaagatcaagagaagttatttctttcccttgcgctccaatttttctctagacagttggtatccacaattttaaaaaatgttccatgttgtataaacaagcattcgctgagaggggctgttaatacacatcgtgccccttttataaaaattcatgcatggaatcctacattattatgcatcaaaatctccagaaatgtcttaggatttttgcagggagwwtwttaaatgcattgttttgctttgttttgaagagactagatgtgcagaggaagagaggtggcatggtgggagggtacatttgagttgtcaacagtctctgcagtgtcaggtcaattacatcagcacttggactggaccagggaaaggaatgattctgcttcctgggaatgtcagaaggacctgatgattatatttggcaaagccaggaggagtggctttgaatgtcattgctaagaattacactttgagtagcatttctggatgtctgagcttttcaaatgatacttcttttctgctgtggctttcctttctgttggactggttcccagagggtcctcttgtttgtccttgccctcgcttttatatcagttcatgttttctcttctgtcatcttccttcccagcgctgtttctccaccccctcctgctgcactcacaacagcttcccctctcctgtttagaggtggaagcatgtaagaatgcgtttgagggggatgcttgccaaaggacagcatattcaacatctggtatcaacaaggtaatgtttaaccttagactagccaaactagtgatgacctgcttccatgctgcatctgctgctttttgtgttgatgggactcagaaatcatgagaaaggtcttcagtgatccatgactgcaacaaattcttttcctaattgtgccgtatattatgcccctcaatacaacttactaatctctgcctcagtttctccatctgtgaaagtggtgtaatacttatctacctcccttgaatgttgtgaagattagtatatgttggtaaagcacttttaaaataaagaatgatataaagcaaaaaaaaaaaaaaaaaaaactcgagactagttctcctcgtgccgaattcggcacgagtgtcatcgggctcacagctcagagacatctgcatgtgatcatctgcatagtcctctcctctaacgggaaacacctcagatttgcatataaaaaagcaccctggtgctgaaatgaacccctttcttgaacatcaaagctgtctcccacagccttgggcagcagggtgcctcttagtggatgtgctgggtccaccctgagccctgacatgtggtggcagcattgccagttggtctgtgtgtctgtgtagcagggacgatttcccagaaagcaattttccttttgaaatacgtaattgttgagactaggcagtttcaaagtcagctgcatatagtagcaagtacaggactgtcttgtttttggtgtccttggaggtgctggggtgagggtttcagtgggatcatttactctcacatgttgtctgccttctgcttctgtggacactgctttgtacttaattcagacagactgtgaatacaccttttttataaatacctttcaaattcttggtaagatataattttgatagctgattgcagattttctgtatttgtcagattaataaagactgcatgaatccaaaaaaaaaaaaaaaaaactcgag

SEQ ID NO: 103 - DNA, 931 bp, Homo sapiens
ggcacgagctgcctcggcctcctgagtagctgggattacaggtgtgcgccactacacccagctaatttttgtatttttattagagacgtggtttcaccatgtcagccaggatgttctcaatctcttgacacgtgtctccctccagcttctgcccttatttacctgcctgttggctcttaaaggcatttttggttgagacttttgcatgtaaaataagaactttgccatctttggattcccccatgtttgtttgtttgtttttaataaataatatttaatattaaaaggagctgtggtttttttctctctaaagagcaggaaaggacagagactggtcgctctctgcagtcacacttgargtgaagaaaccatgggatagaattagcygttagttgagtcccyaggttcmgaggragaaagaagaccataccacctggtagggagtgcgaaggaggttccagggactgatccatagaagggtktcagamcaacttcmttaatwaaggaktgccttaatttycttggtcaaggggaaacttcctgtgtgcctttctatcctgatgacaccccctcactgaaatcctggtgttgtttccacagagctgtctggccttttgtccttgatccttggttaaggaaatgaccaaccaggtaagacctgtgttgaagggaaaaacatcaattggtctctttgccaagttcaagtccagtaggttttctggatgtgtagtcaagaaactagcatctcattcttgcccggctcctaaagagctgggtgaccctgggtacctagtcaccacagtgttaggtgggactagtgaaatgcaaatactgagaggaggattggttcatccaagtctttaccacaatttagtgagtaatagaagaagcttaaaagatgttgtacaaaaaaaaaaaaaaaaaactcgag

SEQ ID NO: 104 - DNA, 1683 bp, Homo sapiens
  SITE (1680): n equals a,t,g, or c
cctagctcatctgggcggcggcggcaastggggacagggcgggtggcgcatcaccggcgcggaggcaggaggagcagtctcattgttccgggagccgtcaccacagtaggtccctcggctcagtcggcccagcccctctcagtcctccccaacccccacaaccgcccgcggctctgagacgcggccccggcggcggcggcagcagctgcagcatcatctccaccctccagccatggaagacctggaccagtctcctctggtctcgtcctcggacagcccaccccggccgcagcccgcgttcaagtaccagttcgtgagggagcccgaggacgaggaggaagaagaggaggaggaagaggaggacgaggacgaagacctggaggagctggargtgctggagaggaagcccgccgccgggctgtccgcggccccagtgcccaccgcccctgccgccggcgcgcccctgatggacttcggaaatgacttcgtgccgccggcgccccggggacccctgccggccgctccccccgtcgccccggagcggcagccgtcttgggacccgagcccggtgtcgtcgaccgtgcccgcgccatccccgctgtctgctgccgcagtctcgccctccaagctccctgaggacgacgagcctccggcccggcctccccctcctcccccggccagcgtgagcccccaggcagagcccgtgtggaccccgccagccccggctcccgccgcgcccccctccaccccggccgcgcccaagcgcaggggctcctcgggctcagtggttgttgacctcctgtactggagagacattaagaagactggagtggtgtttggtgccagcctattcctgctgctttcattgacagtattcagcattgtgagcgtaacagcctacattgccttggccctgctctctgtgaccatcagctttaggatatacaagggtgtgatccaagctatccagaaatcagatgaaggccacccattcagggcatatctggaatctgaagttgctatatctgaggagttggttcagaagtacagtaattctgctcttggtcatgtgaactgcacgataaaggaactcaggcgcctcttcttagttgatgatttagttgattctctgaagctctcatttcactcttcagtgttcctgttatttatgaacggcatcaggcacagatagatcattatctaggacttgcaaataagaatgttaaagatgctatggctaaaatccaagcaaaaatccctggattgaagcgcaaagctgaatgaaaacgcccaaaataattagtaggagttcatctttaaaggggatattcatttgattatacgggggagggtcagggaagaacgaaccttgacgttgcagtgcagtttcacagatcgttgttagatctttatttttagccatgcactgttgtgaggaaaaattacctgtcttgactgccatgtgttcatcatcttaagtattgtaagctgctatgtatggatttaaaccgtaatcatatctttttcctatctgaggcactggtggaataaaaaacctgtatattttactttgttgcagatagtcttgccgcatcttggcaagttgcagagatggtggagctagaaaaaaaaaaaaaaaaaactcgagactagcggcacgagggggggcccgtacccaanacg

SEQ ID NO: 105 - DNA, 1270 bp, Homo sapiens
aggaattcggcacgagcagaattcctttctcatatttcaagtgtccctgtgaattatgaggggaaaaaaatctttattaaagaaaaaagtgaaaataaatatgcatggatacttggatttttcttttagtaacaaagatatttaaattatttgtatacacacacacacacacacacacacacacacacgtatctgtacctagaaatgtttataggggaggtcagttttctgaagattaaatgcagccctaatgtcagattaatgttataaacacatcgtttaatcacaagttttcagagagcaggctccacagatagtctctaactttctatcattacaaatcgctatttttatatcattgctaatttaaataataaagtaaattatgaagaggaatcattggttgcaagtcaccatgggagtttagtccctgtgaaaatataaagcatttaaataatttgtattcttttaccattttttattacatctctttaatttttgtcacttgaatatattaggatgatgatgatactataatcactggaacaaagacatttgcttggacatcttttcttttttcccccatttttgttctgttaataatttttaactatagcttttcctttcttgtccttatctgtcccttatcgatcatagatagtttcactactatttttaagtttttattgttaaattgaagatgaatctgtacagttacttgtgaattaagatgcagctaagttaaaatcaagtataattttgaagctgattttacatttaactagatgattaaatatattttttcaggtgcttcttcaatttaaatcaagttttatggtttcagcaaaatttagaaaatatgtactttacctaaaaacttttcttttagtgctttggatatatacagaagcttaaatgagtagagtatcccaaacatccagatgcttctcaaaatagcatttccggccgggcgcggtggctcacgcctgtaatcccagcactttgggaggccgaggcgggcggatcacgaggtcaggagatcgagaccatcccggctaaaacggtgaaaccccgtctctactaaaaatacaaaaaattagccgggcgtagtggcgggcgcctgtagtcccagctacttgggaggctgaggcaggagaatagcgtgaacccgggaggcggagcttgcagtgagccgagatcccgccactgcactccagcctgggcgacagagcgagactccgtctcaaaaaaaaaaaaaaaaaaactcgag

SEQ ID NO: 106 - DNA, 911 bp, Homo sapiens
  SITE (265): n equals a,t,g, or c
  SITE (327): n equals a,t,g, or c
ggcacgagccacgcccggctaattttttgtatttttggtggagactgggtttcaccgtgttggccgggatggtcacgatctcctgatctcatgatccgcccgcctcagcctcccaaagtgctgggattacaggcttgagccaccgcgcccggcctgtcagatgcttttttgcatctgttgtgatgatcatatggtttttgcccttcactttgcttgtatggtttatcacatttatagatttgtttatgttgaaccacccttgtantcctgggataaatctcacttgatcatggtgaatgcttcttttatgggctgttgaattggttngttagtattttgktgaggattttkgcatattkgttcatcagggatattgacctgtaattttcttgtagtgtccttgtctcgctttggtatcagggtaatgccgacgtcgtaaaatgagtttggaagtgtatctggaagtattcgtcgtctttgatttttgggaagagtttgagaagaattggtactagttttaccttaagtgtttggcagaattcttctggtctcttgatgttttcattgccttgctgagcatagatccaggtacttatgagcaaaattctactcagtctgacaactctgcttagaattatgaatgtgattaaatgcagtggtcactctacctttctaaggtagttcagctcaagttacagcgatccagtcctgatagagctttgaaacctcaagtctattatataacgtaatgaaaaattggcttggtgaggtggttcacacctataatcccagcactttgggaggctgaggtgggtggatcacttgagttcggagttcaggaccaggctgggcaacatggcaaaaccccacttctaccaaaaaaaaaaaaaaaaaaaaaaactcgtgccgaa

SEQ ID NO: 107 - DNA, 1697 bp, Homo sapiens
ggaagaaaacaatgctggccccttcatctaaattctgagaattatttaacacttagtacccaactctcaagttgttatgaagattaaatcacataatgtgatgttcccggcacagtgctctgtaacatactccggagcacatagtacctgcttaataagcattgcataagtatatgtgtacatgttgtttttcagtgcagacttactcagacgttgttgccttctcctgtctctgaagttaaagagctagcaaagaatgtggtttttcaggatagagatcgattttttatttgatcagaagtatttgtgttgtgatgagtgatgagtgtaagagtttgttccatgcctgctttctctagctaaatgctactaatgatgggtctggggaagctacatcagcattgacaggagatgtgtttaaaatgcactttcatggatgcttttaaaacctgcagawtcacattmcatagtgtaggsccagggttaccaaatgatttatatgcacactgaagtttgagagscaatgtttagctaagtggttcttggcccaggcttctaattaagattccatggccaggttgcagaaatcttttcacttgtgcccttcccgcaggctctgtatattggtgtgggtgggagcatccttgttgatataattaagtgcctcatgtgactccaggttgaggccagggtcaaacatgaggaattcaaaatacattcatgagagttgagttcaaactttattccaaagggaggtccattccaatggttggatttggtagggacaagttagtgtggcccatatccccattgctgtagcagaaattgtggcatctgtggcaggaaaagagaaagataaattttgatctttgtggaggagctcactgtccttgaatctcacctgttataaagaacataaatgagtggacattttctgcatgcctggatctttctacctgtgtttgtggtggtagcaggtgaagagattgtgctgattcctttaaaggcatattcccaagatgcaggtgtgacttgtccagagaatatcacctgagaataaatcctagagaaggacgatgaagagaaaaatggctttttctcaggtgactgtgtctcagaccaggaacagtgttcactctgcctyctggaatgccatatgtttagaacttacaaacctgtacttcttgactttatgctgkttctccctataagtttgkttaaacactttttcttctcatgatagtcaaacaactctgaaaaaatattattttctatacactagagtcttctcgacattctcttcatcttggcttcttctctgctatgcagaattctcatcattaatttatgactcataatattaaaaatattccctttggctgggcgcggtggctcatgcttattatcccagcattttgagaggccgatgtgtgtggatgacctgaggtcaggagttcgagaccagcctggccaacatggtgaaaccctgtcactactaaaaatagaaaaaatagctgggcatggtggtgggtgcctgtaatcccagctacttgggaggctgaggcaagagaatcacttgaacccaggaggtggaggttctggaggttgcagtgagcctacatcgtgccgctgcactccagcctgggcaacagagagagactccatctccaaagaaaaaaaaaaaaaaaaaaactcga

SEQ ID NO: 108 - DNA, 1142 bp, Homo sapiens
gaggcaataggtcggggaaggtgatgaatgttctgtggggcatgtcaaattgggtggaacctctggggccttctgtgggaratgcccagggagcacagatttaggagatgggagcaactagtgtgatggtggtgagggctggttgaaaccctggggagtatgtggagctcatctgtgtttccacagagcttatctcccaggagatagccatcgggagtgccttgcctggcatgttcccctgctgaggtctgttacccaggagcctgcagacacaaagagcaggctggtaatgctgagaagcgaacattcagtacctgtcaccagaacccagcatgggtgttcaacactatctggtgactctgtgagaagaccctatgctcaggggatgaagtgtgttgcttgtgcaagagggatggagagagagtgttttccaagtatatgtgtgtgtgcatgtgtgtgtacccaggtggaaccctcctgcatgctcacatatgcctttatgaatactggaatctctaaacctaccatcatgcatctcgtcttagcttcctacctctctctttctacccctgcaacagccatgttattgccagtaacacatgagaagagtgagggagacctgtctgtagacaagctcagtgtgctgctaaggaagcaggcagcagttctgtcctcatgcgttcccattgtgccctgtcctgggatggcaaatgcaaggccagacaggctctgggstctctggtctgaccactaatagcatcttctcctcccgctaggctgaccagcctccaaggcaggactctgacaccagggttataaatgcatctgtctgggcacattatctaaattgttatgtatcaccctgggtaatggcaaaagtaaaaaccgctgttagctcagtgaataaatccttggtgctgatcaatcattgcacgacatagactcttttaataggcacaatttacacagaggcttggcagactgcttcgtcttctaattgctgatggaaaatggatgccgagctctgctgtgccgtaaaaatgtaaactataaatgacttaaaaacttgtgtgctcccttctccacccagcactcattttaaccttttatttagaaacaaaaaaaaaaaaaaaaaactcgag

SEQ ID NO: 109 - DNA, 976 bp, Homo sapiens
caaaaggtgagaaagacgtcatccgcctttttttaatccatttcttttgccaccctatatgtctgttcagagatgggctctcaagctgactttgattcttttagttgagaagtctcttaaagccatctagcccacctccctcaattccctatgtgaggaagcaaaaccccagggaagccaaagggctcctgtccaccctgacaccacaggccgggggagagtagggactctacccccctctccccttgtaggtgacacatgctctgccctctgaggcagtcagcgaaggcaaatggtctgacttctttatgtggtcaacattttgatagaatttctttataatttgatagagattatattatttttattttattttgagtgggaagaattttaaaacctttttatgtcaattaccatcttgtttctttcacctttgaaacaatgatttgtagcagagatgacattgtagcaacccagaattatgcttttggaatgtggtcctcactgtacaggagaatgtgtaatcttttgttaaaattcccagtgtgcatacattttctggttcctcggtccagttgctaaagttcttagtattttagcctaacatatttatcaccaacttttctttaaaagtgttccttttgtcacttagttactgattttcctgggtttgacataagtattctatgagatgatatatatgctttttttgaaagctgattctcatgaattcaagtagctgagttcctttatgtttcgtttattcactaaagtagctgacacaaaacacaccaaaacctagagcggtagttttatgtaaatgctcatgagtttgtatcaataatataattgttgatccacttataattcgtgcaatactgtatgtatgtagagattgagttgtcaattaaaaaaaatgtggcctctttgtgatcataaaaaaaaaaaaaaaaaaaaaaaaaaaaaaaaaaaaaaa

SEQ ID NO: 110 - DNA, 658 bp, Homo sapiens
  SITE (565): n equals a,t,g, or c
  SITE (571): n equals a,t,g, or c
  SITE (589): n equals a,t,g, or c
  SITE (596): n equals a,t,g, or c
  SITE (621): n equals a,t,g, or c
  SITE (643): n equals a,t,g, or c
ttcggcacgagtatacacaacattttgttttttttttgcaaatactctactgaatatttccccattctatttaatatattatgatctttcatactttatgaaactctaaaactgtaaaataatttttgggagggagagaagagttctattgcaaaaaaaaatgctttatgcacataatttttttatgctaaacaatttccttggaataaacttgcaggcatggacatctagattaagtwtgcaatttcttttgacatttgctacatattgctatgctaatttccaaaagaactgtactcagtaagacaattacacatttcagcctccgcactgtaactctgtcagcatttgtgtgtgcacacataattacacatagagttgacacagacattttgccaagataaaaaaaaaaaaaaaaaaaactcgagggggggcccggtacccaattcgccctatagtgagtcgtattacaattcactggccgtcgttttacaacgtcgtgactgggaaaaccctggcgttacccaacttaatcgccttgcagcacatccccctttcgccagcnggcgtnaatagcgaagaggcccgnaccgatngcccttcccaacagttgcgcacctngaaatggcgaatggcaaattgnaagcgttaaaaattt

SEQ ID NO: 111 - DNA, 1588 bp, Homo sapiens
  SITE (380): n equals a,t,g, or c
cttattttcaaatttgacattatcatccttgcctcttaaaaagatagattttaattgttttcatacttcatagaaatcaaagtctgtgtttgctacaaattgaatgctcacgttacctgaaataatactttggactgcaggacaggacagtattgattcctaagtagattgactataatctcatgataagtatgtatatgtgcatgggaaaacaacattcaataatagtctttgtgtttaaaactatcatggtatacattttcttatgtggtgcttgaggagtttcattctacagtttacaaggtgtagktttgcaccccaaattctcarggtatgctatttcacccaaatacttgaaagaaaaaggtgccctgtatttnatcagtactgttgagggggaaattttttgtgtaagtttgtttgataaaactgcttataaaaatcaaattcacaaaatatgttaggctttcacataatttctaaggagatatatgtagaaataagatatatattatcaagagactgcttatatattcttaactagcttctgggtcctaagtagacctcacaggtgcataaaatcattaataaagcatgtagcacttgctaattggtgccttaagcttgaatctaatcagaattgcagactcgggtcctctgggaaaaaaacatgtccgtctgtggcacgtgtgagtactaggcccaggggaagagtctgaaaattgaattcttttgtgtgtcctgtgtctcagaagagaactgaatgttcagagcagcgtttgtaagctattaacattcagtatttcgtgttgcaactagaacacattattagatttattcctgtttaattcataatggtgcmgawtaaamcacacacatctgatttgattycttttyctttttttaagtttcataattgcttttwatggctagtgttaatggcaaaaagtcctttccagggctccctgaataatctaccatacctgtatccatagcaggtgatgcttttttttatccccactttgaagacgtgtgtttctgtatttacacataaatcatactattgtatattaargmcagcagtggttgaaargaakgtgaacactgtagaagttatgttggaaaaaaggagagtaaattgtgtgattaatggggaaggatattggataatgttataccccggactatgaaaaaagctggtggtaaatgggaagaatgtgaaattttaaactgctctcaacgtaggaatcttggtggaaaagttcctacctgaggtctgatatgattcaattatagaatgcaatgagcttggccaaggggactttgaatccagccaaggaaactttgaatctcgacagctctgagaatcacattttcagtgcattgaatatggagtaaactatttagacaaggattctgtgagactaggctacttacctttaattgccagcatttgtaaatgattgtgcaatcttgtgtaatggtcttttattttgactgttttggaaaaaaaatgttttattgtttttttttcccagtaaaaattacttcaaagaaaacgtaaaaaaaaaaaaaaaaaaaactcgag

SEQ ID NO: 112 - DNA, 593 bp, Homo sapiens
ggcacgagcgcgatagccagccgcggctgcccttgcgcttcccgagctggcggggtccgtggtgcgggatcgagattgcgggctatggcgccgaagtttttcgtcagtactgggatatccccgatggcaccgattgccaccgcaaagcctacagcaccaccagtattgccagcgtcgctgcctgaccgccgctgcctacagagtcacactcaatcctccgggcaccttccttgaaggagtggctaaggttggacaatacacgttcactgcagctgctgtcggggccgtgtttggcctcaccacctgcatcagcgcccatgtccgcgagaagcccgacgaccccctgaactacttcctcggtggctgcgccggaggcctgactctgggagcacgcacgcacaactacgggattggcgccgccgcctgcgtgtactttggcatagcggcctccctggtcaagatgggccggctggagggctgggaggtgtttgcaaaacccaaggtgtgagccctgtgcctgccgggacctccagcctgcagaatgcgtccagaaataaattctgtgtctgtgtgtgaaaaaaaaaaaaaaaaaa

SEQ ID NO: 113 - DNA, 2355 bp, Homo sapiens
  SITE (766): n equals a,t,g, or c
ggcacgagcccctctctaaatattggtatttttatattccagagatgtacccaatagaaaaaattaaaaattaatcagtatctaatttaatatccataagtatttttccttagattttagtcacgtacagtgggctatgtggatgtcacttgtgcttcaccatagtttaccactaggtgtcactgtggctctgcactgcgcttgttttgtagcaaagaacagcggcatcccctcgggagagaggagctgcttccagggcaacaggcaagcgggctcagaggttcaggagaaggcaacagaggcctggaaggggtcttcgtgcatctgtgccagttgtgcaagacgaactctttgaacactacatgctttggacttcagccaggcagaggctggaagaaggttgaccagagctcccttgctctggtagagggatgggtacatggagaagccccttcttccccatgagcctccctcctgtcagttcctctcagcctccagcttttataactccagaagcgtcacagttgggtggtttgattcagagagagttatttttctactgcagaaatgccttggacaaaaccagtgctcactgaatctttgccacaaaatggaataggctatcccagggggcaagaggtgcccgcccctgtgcccagcctcctcttgatgctcccagtgcccagcagcctcgcacaccctgcctgtctgttcctgggctgcccatttctcaagaaaccgacctgcaaaggcagccggctgctgnctccacaccgagggctgtgcggtcctgctgctcgctcactgggaggtgcagctctttctcctcttcctctaggaattccagaccgaccatctaccatgactaacaacaatgaacaaagggcttaggggcaagagctacctgcaaagacgtgtcatggaacccttcaccatgcaatgccttgaactcagctctggctgctcccaagaaaaggtggctggctgggggcctggacacaagcacaatggggctggtggagccactgtgcagagctacttgaataatcactgggttttcatcaactccttttgtcatacagaccactcaagggctgaagtgttggtaaccttcatttcggtgtccaaagcctcacagcaggtgagccaccctgagatgcttgtggccacatggtggccacagtcagagctttgaaagtcagtaccaaatgaacgcataattggacaccaaaaatcaagtgttactttcatgtttcctcaccccatcatctcattgcctcctgctgactctgataccgacgctgagctgacttgccaggctgccgctggacgcgtagagatcaggccagcgccgcgctcatttttccaggtagacctactctgtggaacggaagtgccctagctgctttgtttttgtagcacttgctggctgaatttttcttttgctaatcgctaaccagaaagtctggttagagggggctcaactcaatccctttggtccccagcgccagacaagagttaattctggaaaattcagtacttgaatgtacctgccttattgcataccaatttactggggggaaaaaaaaagttaagagatgccggctccagatctccacttcattcacaggtgattttggaaatcctgtaagttacacttcctgttctggttttgttttgttttttgtttcctttggctgattcctgctgagtgaggccagttcctcatcaggctcagggcaggtgccttttcaggcgtggcctcctttccatctagcacagcatctttgtctctgttctgtctcctccaaatccaagatgattttaattagtacagacatgtacagtctacaattaaagagtgatttgtactaatatgattttgattcttcctcctctttgctgtcctttcaagacacttgctggaaaaagctttaatgcacttagttttcctttaggttttctatgactcagatgtaaaggactttctctgtacagtatattatccaatgcatgtttgttctctctcctgatatattgaacaccacacagttgtgaagccgtgcagtggggatgccccacaccccacagaggcatctacccctgtgtataaggaaagacattttcctttgctgtacttgcttgagcagttttattgtctgtacatgtgagctgtgtgagatagatgtgaaaagttcaaatgaatgcattttcctgccccatgtatacagattgtcatctgtacaaggaactgtatgtatgaaagcaaatgtacttatttataaatggctaacacttggaaaaaaaaaaaaaaaaaaccccggggggggggccccggtaccccatttcggccct

SEQ ID NO: 114 - DNA, 1437 bp, Homo sapiens
ggcacgagaaatattcttcctgaggttaatggaacataattttccacagccaatagcattcaatagtcaagactgcttttaatgattttccagtgcgtgccgcttcttaatttgcaaatatggtggatgttataattatataaccaatatgtatgtattagttaaacagatattggagggataactagggaatctaaccttaacctctaataccatgagaaaatcaattgcaaattaagttctgagatagaagctgtttgcaaatctgtatatggagagagcaacatgaaaacacaaaatcactgtattttttgcattgttattttattttctacttcagtgccacctttaatttggtcgtggcagtgtgtttccgtccattctttattttaaatagagaagtcatttatttggctcatggttctggaggctgagcagtccaagatgtagtggctgcatctggtgagggcctttgtgctgcaccatagcatggcagaagggccagcaagcccacgagacagagaaaatgggagccaaacttacccttttgtcaggaacccactcccttgataactaacacgctcctatgatagtggtattaatccagtcataagggctctgctctcaagatctaatcacctcttaaaggcccaacctcccaacctcctttttggcctgtcttttgtgtgtgcaggcgcatgtgtgcaaataaaatcacatcaggttaagcttgtcaaagtagggagcagctggctttaagataaactctctcatccacacatattttccccaccccaagcacagctgcctcttaactgctgttggaccataactccaagtgaagtggtcctccctcccccatctccacaaatagcaggaaaagtaatgttgtaatttacaaagttacttactccctgccatttcagagagaagatggagtataggaaagccctcccacccactgtccttgtgtgatgtgacacaacttgctccctcagtcttggaatacagcctcatgtggtccttggccagaggcagagaaagggccttcatctctctcacagctgaagggtgggaaacatggtcttcattccgtgtaaccacgtgctcagctagagatcagaggttctgctcataaattataaaggagaagagagatttggggatgattagcagcctctgacataggggcatctcccccagtgaggcgtgggcagattattaaaggaatggtactgggaataaaagtggctgaggataaattttaaattctcatattacttcttacaaaaattctaagttttaaatcaagtcgtataatttttaagaataggtcttcaattgatttctagatggcaaataatttatataaacaaaaacaatggagccttctccaaaaatgaatactcaattaaaaaaaaaaaaaaaaaactcgag

SEQ ID NO: 115 - DNA, 2050 bp, Homo sapiens
  SITE (1156): n equals a,t,g, or c
ggcacgagggaatttgactggggagggatgtacagtgagcatcagttgttacctatgatcagggaaggatccaggttttgtggggcctgatgcttaaggtgtgtgtgtgtgtgtgtgtgtgtgtgtgtgtgtgtgtgagttaccctctaaaaaaaggactttacaataaatctgcctctcactggttattgtaagagtgtatgtgatgcactgagaagtcatttctgaagatacgtggggcgctctttgtagagaagtgaaaataacattcactatgacaatagctaacatttatcgagcccttaccatatgccaggcactcgggcaagcatttgcaggcttttctcattgattcctcacaatcagcctaggatacagatgctgcctattagtctcattttatggctgaggaagcagaggctcagaggggttaagtcatttgcccaaggccacacagctagtatatgatagagtcagggttcaagcatatggagcaaaacaggacttgtttcctatggtttaagcattccctacatagtgatctctcactgtcataattacatgcctactatgttctcttcagtaaagatctcttatttttagttgactagaggaagggcaatatgagcagaaaatttttcttgttttggggatgaggtctcactctttttccaaggctggagtgtagttgtgcgatcatagctcagtgtagcctggaattcttggactcaagcaatcctgctgcttcatcctcccaagtagctggaactacaagtgtgcaccatcacatctaactaatttttsymgagatggggtctggctatgttgcccaagctgatctggagctcctggcttcaagcaatcctcctgccttggcctcccaaactgttgggattacagtgtgagcctggaaaatatttgctaaaatattaaaaaataaagttttatttcttcccacttcacgaaggktatatttggaattaagacagtgtgttctttaatagtatttttcatagtaattgatttgatgagtaggcaagaatgatttgkgataagttaaaatgtcttagataagtgtatgattaaaaaatagctcatccgggtgtggtggctcatgcttgtaatctcagaactttgggaggccgaggtgggcggnattcacttgaggtaagtagttcgagaccagtctggccaacgtggtgaaacccatctctactaagaagataaaaattagctgggcatggcacctgtagtcccagctactcaggaggctgaggcaggagaggcaagagaatcacttgaacccgggaggcagaggttgcagtgagccgagatcgcaccactgcactccagcgtgagcgacagagcaagactctatctcaaaacarcaacaacaacaaaaacctcttgaaaattcttactactttatctgttggctgaactaatgccaagctcccatcatgaataatcaagaatttcaacctgatgacttcttggtaataataaagttcaatggggttcttctcatatggagtgtacataaaacactgtgagggcccagaacagcaaaacgtgcttaaaggtggacatgggatctgcttcagggtatctgctgaggktaggactctgtgtgcctgtgggcataaacatgtggacataccttcctttggatcctgaaatggccaattccacagtagggggaaaggaggaaggacagctgtgtttgaatctatcatttcttgagacagcttgcattaaaagtcaaaccaagaaaacccaaatggccacttggctttctgtggtgtttgggaaggcagtttgaggagtggtctgtgaagtccctgggcaggagggctcgggctgagggctcagctgtggcacccccagatgactgctgaggtcatgaaggagctcatagcaccattcatgtttctggactcagtcattgtgcctggggtccccatagcaaggaaagtagggaagtgaaccaaggtccagccagtgttgctcttggctgcagggaaggaaaaaaaaaaaaaaaaaactcgag

SEQ ID NO: 116 - DNA, 1968 bp, Homo sapiens
gcgggtctgcgaggtggggtaggcgggcaaggcgggcgccgaggtttgcaaaggctcgcagcggccagaaacccggctccgagcggcggcggcccggcttccgctgcccgtgagctaaggacggtccgctccctctagccagctccgaatcctgatccaggcgggggccaggggcccytcgcctcccctctgaggaccgaagatgagcttcctcttcagcagccgctcttctaaaacattcaaaccaaagaagaatatccctgaaggatctcatcagtatgaactcttaaaacatgcagaagcaactctaggaagtgggaatctgagacaagctgttatgttgcctgagggagaggatctcaatgaatggattgctgtgaacactgtggatttctttaaccagatcaacatgttatatggaactattacagaattctgcactgaagcaagctgtccagtcatgtctgcaggtccgagatatgaatatcactgggcagatggtactaatattaaaaagccaatcaaatgttctgcaccaaaatacattgactatttgatgacttgggttcaagatcagcttgatgatgaaactctttttccttctaagattggtgtcccatttcccaaaaactttatgtctgtggcaaagactattctaaagcgtctgttcagggtttatgcccatatttatcaccagcactttgattctgtgatgcagctgcaagaggaggcccacctcaacacctcctttaagcactttattttctttgttcaggagtttaatctgattgataggcgtgagctggcacctcttcaagaattaatagagaaacttggatcaaaagacagataaatgtttcttctagaacacagttacccccttgcttcatctattgctagaactatctcattgctatctgttatagactagtgatacaaactttaagaaaacaggataaaaagatacccattgcctgtgtctactgataaaattatcccaaaggtaggttggtgtgatagtttccgagtaagaccttaaggacacagccaaatcttaagtactgtgtgaccactcttgttgttatcacatagtcatacttggttgtaatatgtgatggttaacctgtagcttataaatttacttattattcttttactcatttactcagtcatttctttacaagaaaatgattgaatctgttttaggtgacagcacaatggacattaagaatttccatcaataatttatgaataagtttccagaacaaatttcctaataacacaatcagattggttttattcttttattttacgaataaaaaatgtatttttcagtatccttgagatttagaacatctgtgtcacttcagataacattttagtttcaagtttgtatggtagtgtttttatagataagatacgtctattttttcaaaattcatgattgcagtttaaatcatcatatgacgtgtgggtgggagcaaccaaagttatttttacagggactttattttttgatctttatttgagattgttttcatatctatctaaattattaggagtgtgtgtatcagaagtaattttttaatgtcttctaaggatggtcttccaggcttttaaactgaaaagcttaattcagatagtagcttttggctgagaaaaggaatccaaaatattaataaatttagatctcaaaaccactatttttattatttcattatttttcagaggccttaaaattctggataagagaatggaggraaatactcagagtacttgattawtttawttccttttattaaaaaattacttctatgtttttattgtctcttgagccttagttaagagtagtgtagaaatgcatgaacttmatcctaataaggataaaacttaaggaaaaccacaataaaccatgaaggtgtacacatcttaaaaaaaaaaaaaaaaaaaaaaaaaaaaaaaaaaaaa

SEQ ID NO: 117 - DNA, 754 bp, Homo sapiens
ggcacgaggaaatttgggggaacggtgttccaggcatagggaatagcagatgtaaaggccgtgatttgggaataaacttggtgtgatggaggaatggcagagagggcagaacagagcaagagggcaagatttgtaggagatgaggtcatcaggggcctggcaggccatggtgggggtgtggattctatttttaagtgctgtggaaagtcaaggcagggttttagcagagcaaagatgcaacctggcttgggctttataaagctccccctggctgcatggagagaaataaaatgtaggcagcaaaagtggaagaggagaggcagctggtgcactaatccaggtgagaggtaaagatggatgggtagggctgaaggatggtggggcaggtggtgagaagtgacttggttctggagacatatgaaggaagatggtcaggcaggccgggcacagtggctcatgcctgtaatcccagcaattttagaggctgaggtgggaggattgcttgagctcaggagcttgagaccagcctgggctacatagcaaaacctcctctctacaaataaaaaaaagtagtcgattgtggtggcatatgcctgtagtcccagctactgggaggcagagataggaggattgcttgaccccaggaggtcgaggctgcagtgagccaagattgcaccactgcactccagcctgggtgacagagccagaccctgtcttaaaaagctaaagcaaaaaaaaaaaaaaaaaaaaaaaa

SEQ ID NO: 118 - DNA, 1324 bp, Homo sapiens
cccccgggctgcaggaattcggcacgagctttgctatgaagtggcaaattacatgtagagtgtctccttccttttcagagaacagttaatcaaggcaaatcagcaagcccccaaagtgctgtaatttaacatcatgattaccaccttcgaagctatatattttgcatactttaaaatcacctaacttggactgcttgaattacattggcttttagaaccgaaattgtaactatgtattgtatttcatgggaggtatattttatgagctttttggctttcttttttcccacagcaactgccaatgaaggatgaatcccctttttaaaaagttgttgttgttgttgttatttgattttgagttaggagggataatagagaagtccatttaaaaattatttttagaagctaaagaaagtaattatgcttcctgtgaattgtcttttactggcatctttgttttcctctttgatgttagtaaatttggtgtaatacgtggggcttccatatttcaaagtggaagctttcttctctgaagtcgatatatggttttgaattactagagctttggtcagtatttccttccctatatgtcacagagggcaccactgagaactgcgtgcataggacctcaaaatacaaaattagcagggcctcacagtcagcttcctcatggctagtttttcccccttatattacaatttttgttttataagtcatttttttcctgatatttccaccacttttcagagtcatctacaaaatttttctttcctcaagaaaagagttccttttgccttattccttatgccttccccactggtattgaggttttgataataaattggtaggaaaaaaaagtacctcctagaaggaagccttccccaccatttccaggtgccaactgctaagcagatatattccaaaaatggtaactgtcatgtgcacactgttggttatttttaataagcctcttcctactagaacattttattttccttgttcaccatacaatcatgtactctttaacagaaattgcttttaaaaaatatctggaactatctttaaaaaaactttattaataatcatgtatttttactgatcacattttgaaatgcctaaaagactttattgttctaattatccagatgtacctttgtaaaatagctcttttatgaattagctgataaggctgtatgtttctggaacaaaatattggtcatctaaaaactttctgttttctggggtctgggaaaatagaaaataagatttcaaatattaaataagcttaaaggaaaaaaaaaaaaaaaaaaaaaaaaaaaaaaac

SEQ ID NO: 119 - DNA, 1182 bp, Homo sapiens
ggcacgagctttgactcagtttcttcatccattaaaatgccagcttcatgatgtggctgtgaagattaaatgcaatcatgtatgtaaggagctttgcatactgcctgatatgagataggcattcaagaaatcattacattgaagaaattttcaattttccttctcctataaatccttgtatgaaatcgaaatgagtgttgagatgaacaaaagacagctagttcaaggtgaaaggttggtaatttgcttacaagatgagtctcttcttcatttggcagctgactaaattgttaaaagctcagcctaattgtacctttgccaggacattttaatgacaccatttgtctcttcagttcttaagcactttggggaaccagtagaatacaaagtagaatgtctgtgctttttaccttactcctacatcatctttctaaaatttaaatgtactatcactaaccctgttttgatttagttgaggggagaaaaaaagcttaaactttactttcagggtctaattggctaaagccatttttccttttctgtttccaatacttttttaaaaaaattataagttagtaatatctttctctctgtctacatatttgaacttggatttaaagctttctatttttttctcttatatatgtctgtagtaatcaggttttctcattacgaagtgctaatgaaaccttcagcttcacactggaagcttctcaattattggcattctgggtgtttttctagacatttgttgtttcgaacgagttggccagtgtttgttgacagaattttaactgcctgaaaaatctgtttcagtaaccagatactcagtcatctgttgggaaaatcccagtcgtatggagtaatccttccttctattctatgttttataggtcaggcctaggtgaaagggctgggagttacaaaggcctgcctgtttactaagggaatatcagcctgtcttcatttcactgtttcctttcaggatttcaatgatgaattctcagatctggatggagtggttcaacaaagaaggcaagacatggaaggatatagcagttctggttctcaaactcctgaatctgagaactctcgaggtttgggaaattgttgtattttgactaaaatttaattcccctcaaaacatcctcaccccacccccttaaaaaaaaaaaaaaaaaa

SEQ ID NO: 120 - DNA, 911 bp, Homo sapiens
  SITE (353): n equals a,t,g, or c
  SITE (418): n equals a,t,g, or c
  SITE (891): n equals a,t,g, or c
  SITE (901): n equals a,t,g, or c
ctagggcctggagatgggaccagctgcctgcctgccccctaccccaggttgggcgccgctaagggctggagcggctctgggctccggaatcgcccgcagccggtactgcgggacccactgcggatatggctgtcttggctggatccctgttgggccccacgagtaggtcggcagcgttgctgggtggcaggtggctccagccccgggcctggctggggttcccagacgcctggggcctccccaccccgcagcaggcccggggcaaggctcgcgggaatgagtatcagccgagcaacatcaaacgcaagaacaagcacggctgggtccggcgcctgagcacgccggccggcgtnmaggtcatccttcgccgaatgctcaagggccgcaagtcgctgagccattgaggatcgcgacgcantggcggggaccctcatggaagcatcgccctcgcctcggaccttgcctggcgctatttttgcagggagctggggagcaggaacgcctcggacctgagtgctctccatattgtggggttgaagtctggatgggagcttgccaagtccctttttaggctttttaattaggaagcatttcgaacctgcgcaacagaccaaagaacagtacaaagaacatccgtgtacccagtaccctgactaccgactacctacaacccgtccctgccccatcctgagttcttttgaagctgatctcaggcatcggattatttcttctgtaaatatttcagaatgtatctctccaagatgagagctcattaaaagayaattacaaagcttatcacatccaaaagaattatcaataattttgaaatattattaaacgtgtaataaatgttcaaaraaaaaaaaaaaaaaaaaaaaaaaaaaaaaaaanaaaaaaaaanaaaaaaaaaa

SEQ ID NO: 121 - DNA, 1099 bp, Homo sapiens
  SITE (1051): n equals a,t,g, or c
  SITE (1073): n equals a,t,g, or c
  SITE (1076): n equals a,t,g, or c
  SITE (1087): n equals a,t,g, or c
  SITE (1093): n equals a,t,g, or c
ggagtatatttcctgaataatatctgttttggagacttggacaaagttaacttttttgcttttttaaaagttgctgtttaaattaacttcctgcatttctaatgtagaaaaaatatggcacagtgatttgaattttgtttatggtttattatcttcctaaattatcagctctttaaaatatgggtctctggcctgtataccatctgataaattaggttgggtaaatttttcacctgaaaaaattcattcttttgacccaggttgtttggcttggaaaaaaaaaatcacatactcattgcatgattaaacttgtccatcagattgtgattttgtgcgttatgaggattgtagctggggtaattttaaaatgttggtatttggatagaactgccagcccaggattttgataaagatcaaaatatatactgtatctaaagtttcttttttaaaagttatttcacttataatcaaaaggtttaaataagtttagtgtatattttatgattagtattattttgtatcgattcagagagaggaaaactgcattcccatagacagggagacttggtgcattaatatccaaagcttagtttaagctggtgatgattagaaaagtggctttcatttgtgttctctggaagattctcagtagtcctgtgggcatgtgaacaagagcatgtgtaatcttcataatgtatgtcttgttagcagaaatgtctgaggcattgctgagatgtaggatgagctgaggtactggttttgtctttcatggttccctattatgttttttgagaaactgagcttttcctgacagtgtttagtttttcttggctatttactaatgctattaatagtaacagtttccattatggagcctcagtaggttcttgacatacattaacccattgctattatgtaattttctaataaaatgatgtgataaaacatattttctgtaatatactcatagaatatgtgattataagtaaataaatagatgttggggtaaaaaaaaaaaaaaaaaaaaaaaaagggcggccgcccaaagganccccgaggggccagctaagcgncancgaagcaagcncccccnaaaggg

SEQ ID NO: 122 - DNA, 1379 bp, Homo sapiens
cccgggtcgacccacgcgtccgcttcctcaggtccaagagaatgggaggagggtcatgttgaagtgtagccactggaactttcttgcatttatggagttgctttttctttcccaaggaaactgatgtttgcctgtccgctttatctttgtagtacatgaacagttcagccttagactatgtaactgttttctcatccttagctgaaaatgaggggcctactgtattgcgagactgttcaggggtaggggtggagggggtggtcccttaatggcccctgaagatgttggatgtgtttctcaaaagctgctttgtctctttcctgagtttaatagtgaaactactaaacattaatagatttgcacagccacaaagaatgagagttgataataccgaagaagtgatgcaaaaacaaaaaatcacattactgatcattgatagtattacaaataaatgtctcttcctttctcttcctcccttcctccccctgccttcctcttaacctatgtgctcatccttgctacttgaggctgttatttccctccgagtatttaaggagcccaaacaccttggtcttcctgggtgggggcataattaagggaagggagtgtataaggaaggaaacctcataccctccattcccatccctggatatattgccttttcagcagcctcgggttcagtgtgcttggggtcaggagtgccaggttcccaagagcagcgtaaaacatccctgtaccccttgacagttataagcatttctgcgttaaacttgaagattccagagattccccacgacctaatgatctaagaatgcagattggattctttgatgttcaaatttctcatttacttatgaaaatccctaattatatagttttatataatgtgtatacagagtaggattgttgatgaaattgagcggttggaacaccctcatggaacactggcaacatggaatgtagagagctgatgtcttccccctcatagaggccattggcttcctttgtataaggagagggagaagtgattctggaaggagaagttggtatgtctagcttcattgcggcccctcgggctacccagcaagaggattctgcatcaaggaactggacgagccgctacccaaactgccaccatctttactctttacaaaatggacccatcgagaatgttgaaaagcttggaagtatcacttttgaaaaaaaaaaaaattattttgcattcagcatggactcgaccaggcatctatggagattatttttttgcttcattttataaagttgtatttagaaaagtcttaagtattgtgctttgtaaagaagatgattaaaatgaaattttgtgagaataaaaaaaaaaaaaaaaaaaaaaaaaaaaa

SEQ ID NO: 123 - DNA, 581 bp, Homo sapiens
gaaggatatggactattgcaatacatttcttccttcaaatcctgccactgttttgttggcccacaactaataggacctcaaaataagccatgctgctttgcacacacactagccttcttttgtacttttcattctggatgggcttggccaaaacaggctcaggccaaagacctcccaagctgtatgtacttccagtatcctgaaacagtgtttggtgacataatgccaagggtaaacaagcctgatttaggcactgctttatccaggggcttcacccatgaaattaataaaacttatctgagtcacttgaaacttggttcccagaaaacacatttctggtttataatctccttttatgctcacctgacattaattatctatccttgatgatgtgtttaaactgagtagcagaaaacagaggccacactttctgggaaattttaaaggaagaaaccatttttaatgagatgaaaatatttaacgaatttaaaaagctaatgacaattttgagaaaaggtttgggatgtatattgctatgtaatttaataaactgattttatggatataaaaaaaaaaaaaaa

SEQ ID NO: 124 - DNA, 1284 bp, Homo sapiens
cccacgcgtccgcggagacaggacactcttcctgaagcggggcgcagatcagaggcagaagaggaggaggccaggaccatcagagtgacacctgtcaggggccgagagaggctcaatgaggaggagcctccaggtgggcaagacccttggaaattgctgaaggagcaagaggagcggaagaagtgtgtcatctgccaggaccagagcaagacagtgttgctcctgccctgccggcatctgtgcctgtgccaggcctgcactgaaatcctgatgcgccaccccgtctaccaccgcaattgcccgctctgccgccggggcatcctgcagaccctcaatgtctacctctgaagcctccttccctgcctgcccacccctccatgctccacgcaggcactcacgctaggacagcattaacacctcatctccgggtcctggtctgaatcccctcctacccctgtggccatcctgccatacatccaggacattgagttggaagactatgatctgggtgggggcaggataacatggcttctctttacccagtgggtcccttcgatgctgagggtggtgagtatgtcactatgcaagggccctgagactatttgctgtgggctctcctccagcctgcccagggcccacccagatgcctctggggttacccctgtctgcttctggtttttctgttggagatctataggtccttttcctgcctccttcacatttcctccccagcttttgcggccacaacacatcagtgtcatttgggtgttttggcaactcaggggccttcggatgatcttaaacctttgtgttcagccagagcccctgtgccctggtaggcgttggggttagtatctctcgggtgccctcagagccacctctgcctgtgatcgtctgatgaggctccctcccaacctgatccaaaagccagtctcaggagtttacccctgggatgggggatgcatctgcacctgactttggggccacgtgccctgtggcaccccagctcactgggagtctcaggagggataaccggatttctgctctttcccctgtcactcccacatcacacagaaaaatggcattcctctctgtctctccctggcatggagagggcagactgtgcacatttcactagggtccaaatacagaagggcccagggcccaggggcttgcagcttcgtgaggggtctctggcccagtttccaatgaataaagttctcttgacagctmaaaaaaaaaaaaaaaaaaaaaaaaaaaaaaaaaaaaaaaaaaaaaactcga

SEQ ID NO: 125 - DNA, 431 bp, Homo sapiens
ggacgctgggttcattaattacctttaaaccgttccttattttttttaagattttaaattgtattttggcttttgcctccagtatcctttctggttgctctggtttgaattaagttcctattatgctgcagcacatatcaaccttccctaagtaaccatttcctggaatgtgaagcatcggtgccattagcagaccatatgcagaaatgtcgtgtacttgcatttcttttttgtgcactctataaggctggttgtgactcagatcagcttaactttttatattatgttatttcactaactgctacagtcaaaatgatcaaatctttgtacaatagaaaattatttaaattttatttttctactgacatttctaattctagtgtaaatgtttatcaataaaaaattactttcaaaaaaaaaaaaaaaaaaaa

SEQ ID NO: 126 - DNA, 876 bp, Homo sapiens
ccacgcgtccggaaaaaaagtatggaaaaggaatgttgaccgagcttttatgcttaagcagcagatgaagatagaaccaagatcactgaaagcaagtgtttagaacagcaaaaagagtatcccaacatttcagcattggaactacagaaagttttcagacagaggggaagttaccaattttaaatgctaagtaaagcatgagattttgctgcttgatcttgcagatactgaccagattagttctaacaaaatatggaaggagtggcatacggtggaagaaagaaggcagtagctgctgttgtagttattcatgttagcctcagaggatggtgagacatccagatgaagaggttggtacgcaattctagaattgaggaggtgtctagatagagatataaattgtagtgacatcagtaaagagacaataacaggctttggaaggtgagtaagaatgaaaagggaaggtctgccacctaccctgaagacatacatttaaaggaactatagtagagagataagaggaaaacaagaagagtggagtttcactgaaccaagacaaacaagtttcaaaaaggaaggtgaagttggccaggtgtggtggttcacgcctgtagtcctggcactttgggaggctgaggcaggcggatcacaaggtcagatcgggaccatcctggccagcatggtgaagccctggttctactggaatgcaaaaattggccgggtgtggtggcgcgtgcctgtggtcccagctgctcgggggctgaggcgggggagtcgcttgggcccgggaggcggaggttgcggtggggtgggctctcgccactgcactccagcctggtgacggagcaggacttcatctcaaaaaaaaaaaaaaaa

SEQ ID NO: 127 - DNA, 2157 bp, Homo sapiens
  SITE (1334): n equals a,t,g, or c
  SITE (1348): n equals a,t,g, or c
ggcacgagcatgcctatcactgtccccgaaggccttccagtgggatgaaatgtggagatggaaggcagtgacactgatgatcctgaccctgtctaggtccaggctaatgtgtgcgtttgtgtcttggtttttaacaaagaagtttaaaaggtaaaaagaaagttaaaaaatttaaagtagaaaacagcttacagaataaaaatatacagaaaatatttttgtacagcagtacaatgtgcttgtgttttaaactgttattacaaaagggtcaaaaagctgtaaaaaaattttttaagttcatgaagtaaataatttacagtaagctaggtttaatttattattgaaagaaaaaagcgtatgaataaatttagtgtagcttaagcataccgtgtttatttttatttttcataatgtctgctcagtaacaagtgtacagtgtttataaagtctacagtagtgtacactcatatcctagggcttcacattcattcaccactcattcactcactcacccagagcaacttccaggcccacaagctccattcatgctaagttccctagataggtctatcattttttatcttttataacatatttttactttaccttttctatatttacatatgtttagatacaaaaatatttaccattgtgttccaattgcctgcagtatttagtacagtaacatactgtgtaggtttgtagcctgtagcctaggagcaacaagctataccatatagcctaggtgtgtagtaggctatgccatctacatttgtgttaagtacactctatgatgttcacatgacaaggaaatttcctactgacaatgtatttctactgttaagtgatacataactatatgtatattagtttgtattgttcagtaatggagagattgtgttagactcttggggccagggatcaagtaactgtactagggtccccaacacttaggtgccatggcaataaataaatgaagagctaaccaaatgcctgcattctggacagctctgtttaaaaggtatttcatggagtttttcatttaatcaatagaaatccaatcactaggccaggcatggaacctcacgcctgtaatcccagcactttgggaggtggaagcgggtggatcatttgaggtcaggagtttgagaccagcctggtcaacatggtaaaaccccacctttactaaaattcaaaaattagccgggtgtggtagcacatgcctgtaatcccaggtactttgggagcctgaggcaggagaatcgcttgaacccaggaggcggaggttacggtgagtggagatcgcaccactgcactccagcctgggcgacaanagcgaaactctgtntcaaaaaaaataaaaataaaaaaagaaaaaaaaaaagaaatccaatcaataaaagcagagaatagtttccattcagtaagtggtaaacaacaactaatgcatttggcactttctctttcacagcttctatctaaagccaatctcatgaggcaccaactttcataccaggcactatcacttctctgcttcctatatctccctcctctcccagagacagaatgtttcagaaagtagatttgctgcctaagattcatgtcattgaagctgcagtagaagagtcatttaatatatgaaatataaggcaagacttttcaaaaaaaattctctctcagaaaatacaagtcactttatattcaaatacttacaaagtacctcttgctgtaggaagttttgcaatttccttattttgaatacaaagtaccagctggggatgacacaataccctaaaacaacctcagttaaggctgctttggctaatggtaatcagtgaaacaagataaattaaacacaaatttagtaattatccctggagatataaactcacacttccatgtgtaaactgccattgtaaggccagctttttattttgtttattcattttttactttttttagagatggagtctcaccctgttgcccaggctgtctcgaatttgtgggctcaagctatccacccacttggccttccaaagtgccaggattacaggcatcagtcaccatgcctggccagtagaccaacgttttaaagatcattttagctgggcgcggtggctcatgcctgtactttgggagtccaaggtgggcggatag

SEQ ID NO: 128 - DNA, 1585 bp, Homo sapiens
ggcacgagggtgggcgctctttctttttctcttagaagagggtttagcacaggttttttcgttctcacttccacaccaccttaccgcctcccgaccccccctctccccctccccacctatcgtcatgacggcctctccggattacttggtggtgctttttgggatcactgctggggccaccggggccaagctaggctcggatgagaaggagttgatcctgctgttctggaaagtcgtggatctggccaacaagaaggtgggacagttgcacgaatctagttagaccggatcagttggaactgacggaggactgcaaagaagaaactaaaatagacgtcgaaagcctgtcctcggcgtcgcagctggaccaagccctccgacagtttaaccagtcagtgagcaatgaactgaatattggagtagggacttccttctgtctctgtactgatggggcagcttcatgtcaggcaaatcctgcatcctgaggcttccaagaagaatgtactattacctgaatgcttctattccttttttgatcttcgaaaagaattcaagaaatgttgccctggttcacctgatattgacaaactggacgttgccacaatgacagagtatttaaattttgagaagagtagttcagtctctcgatatggagcctctcaagttgaagatatggggaatataattttagcaatgatttcagagccttataatcacaggttttcagatccagagagagtgaattacaagtttgaaagtggaacttggtaagtgcttgagtactatttatttgagctttttaacttgttttttttttttttgtctgtttgtttgtttttgagacagaatcttgctctgtcgcccaggctggagtgcagtggcacgatctcagctcactgcaagctccgcctcccgggttcatgccattctcctgcctcagcctcccgagtagctgggactacaggctcccgctaccatacctggctaatttttttgtagttttagtagagatggggtttcaccatattagccaggatggtctcaatctcctgacctcgtgatctgcccgcctcgcctcccaaagtgctgggattacaggcgtgagccacctcgcccggcctttaacttgtttttgttccataattgtgcctcttaattcttgttatatttgagaaactttactaatccttttagctatcctttcttgctgttcggtcatctgtaaaagaaggttgtattacttagagcttgatattgggaataaaatgtaatgacttactggcatctttagtcaccctgaccttaagtatattatatgctcatatctgtgattgttattttggtctccccaaactatccaatctttcatttagaaaatttccaaaggagaaattgtaggctttaatagagttcacaatttttactgagataaaattttacgtacattctataagtacatttatttatttatttattttagttttgagacacttgctctgttgcccagctggaatatcgcagtgagctgagatcgcgccactgcactccagcctggtgagagagcaagactccatcttaaaaaaaa

SEQ ID NO: 129 - DNA, 792 bp, Homo sapiens
cagacatggctgaaatccagtcccgcctggcctacgtgtcctgtgtgcggcagctagaggttgtcaagtccagctcctactgcgagtacctgcgcccgcccatcgactgcttcaagaccatggactttgggaagttcgaccagatctatgatgtgggctaccagtacgggaaggcggtgtttggaggctggagccgtggcaacgtcattgagaaaatgctcacagaccggcggtctacagaccttaatgagagccgccgtgcagacgtgcttgccttcccaagctctggcttcactgacttggcagagattgtgtcccggattgagccccccacgagctatgtctctgatggctgtgctgacggagaggagtcagattgtctgacagagtatgaggaggacgccggacccgactgctcgagggatgaaggggggtcccccgagggcgcaagccccagcactgcctccgagatggaggaggagaagtcgattctccggcaacgacgctgtctgccccaggagccgcccggctcagccacagatgcctgaggacctcgacaggggtcaccccctccctcccacccctggactgggctgggggtggccccgtgggggtagctcactccccctcctgctgctatgcctgtgacccccgcggcccacacactggactgacctgccctgagcggggatgcagtgttgcactgatgacttgaccagcccctcccccaataaactcgcctcttggaaaaaaaaaaaaaaaaaaaaaaaaaaaaaaaaaaaaaaaaaaaaa

SEQ ID NO: 130 - DNA, 1351 bp, Homo sapiens
  SITE (864): n equals a,t,g, or c
  SITE (876): n equals a,t,g, or c
  SITE (883): n equals a,t,g, or c
ctttgagcccctctcattccactttagcaatctttttggtaagaactcttaaagccaaaagtctgctgaaaagatttgctgattattagtttaaaaatcttgtaacactcagcagtgctattttgagtcatcccagtttcctgaaagtaatgcccagtcttcctgaatcctccttaatagcagaaccttggtgattttgttggctcatatgaatgcttgtcatggatatgttaacaatttagtgtttgacattgcttcctctgccacaaagacaatactctggtgacacatgtctagacccagcacaggctgtaggcccaggagtgactcaaaggagtttttccctctttcttacggttcaaaggtgaccctggtggtggccagagcagtaatgcttgtttgatgctcttcatggctcatctgcttctcagaacccacccgttgagtttgtgggtaaccagcaggcaggccaaagactggtgcttttcatttcatcctttagagggatgaaacagttatttccgtctgatgagcattcggtagaatttttgaagtgagattttatgaagtcaaaggggactttacacagatctcgacctgctttgaaacctagaggtggccctttgatttgtgcgtgtccttgccctctggacaacttaatatttcaagtaatcgaataccaacttccctgccagcccacctgccttccgccccgcttgtgtaacagtcctgttttgttgagttgctgctattgcactgccagtgcagcccacaccaaatcacaacccaagatactcagataggaagactccttcctctcccagtactttaccaaaggaacccccgccaggacccacatggggnccacgtgttggncagtggnaatcagcctgtgcaggctggggatctcaggctgatcagtaggggccagctttggagccagccaagctgaatcccacactccaggtctgtgctcaagagaccagatggtgtatttccaaatggscctctctggtatgggcaataggcaagctcctggggtctggttatgtggaagattcttagtggatgttccgcctggttagctggttctcttcagagaatataaagtgaatgcctttaggggtagctctgaaagagaaacccaacaacttcattcctagccatgaaagtagcacgatcatattgtactgtattgttattgtaaaatgaytatttgccatgtcatgagtaggtagatgttttgccacaaatatgaatgtgtttgttgttcctgactttaagcaatgaagattgagacaataaatagcactcagagaatgaaaaaaaaaaaaaaaaaatgaccctcgag

SEQ ID NO: 131 - DNA, 1371 bp, Homo sapiens
  SITE (1351): n equals a,t,g, or c
ctttgagcccctctcattccactttagcaatctttttggtaagaactcttaaagccaaaagtctgctgaaaagatttgctgattattagtttaaaaatcttgtaacactcagcagtgctattttgagtcatcccagtttcctgaaagtaatgcccagtcttcctgaatcctccttaatagcagaaccttggtgattttgttggctcatatgaatgcttgtcatggatatgttaacaatttagtgtttgacattgcttcctctgccacaaagacaatactctggtgacacatgtctagacccagcacaggctgtaggcccaggagtgactcaaaggagtttttccctctttcttacggttcaaaggtgaccctggtggtggccagagcagtaatgcttgtttgatgctcttcatggctcatctgcttctcagaacccacccgttgagtttgtgggtaaccagcaggcaggccaaagactggtgcttttcatttcatcctttagagggatgaaacagttatttccgtctgatgagcattcggtagaatttttgaagtgagattttatgaagtcaaaggggactttacacagatctcgacctgctttgaaacctagaggtggccctttgatttgtgcgtgtccttgccctctggacaacttaatatttcaagtaatcgaataccaacttccctgccagcccacctgccttccgccccgcttgtgtaacagtcctgttttgttgagttgctgctattgcactgccagtgcagcccacaccaaatcacaacccaagatactcagataggaagactccttcctctcccagtactttaccaaaggaacccccgccaggacccacatggggccacgtgttggcagtggaatcagcctgtgcaggctggggatctcaggctgatcagtaggggccagctttggagccagccaagctgaatcccacactccaggtctgtgctcaagagaccagatggtgtatttccaaatgggcctctctggtatgggcaataggcaagctcctggggtctggttatgtggaagattcttagtggatgttccgcctggttagctggttctcttcagagaatataaagtgaatgcctttaggggtagctctgaaagagaaacccaacaacttcattcctagccatgaaagtagcacgatcatattgtactgtattgttattgtaaaatgaytatttgccatgtcatgagtaggtagatgttttgccacaaatatgaatgtgtttgttgttcctgactttaagcaatgaagattgagacaataaatagcactcagagaatgaaaaaaaaaaaaaaaaaaaaaattactgcggnccgacaagggaattcagtgg

SEQ ID NO: 132 - DNA, 3397 bp, Homo sapiens
  SITE (1): n equals a,t,g, or c
  SITE (15): n equals a,t,g, or c
  SITE (24): n equals a,t,g, or c
  SITE (3081): n equals a,t,g, or c
nggattcgcggccgntccgactgnccgccgggctagcactgacgtgtctctcggcggagctgctgtgcagtggaacgcgctgggccgcgggcagcgtcgcctcacgcggagcagagctgagctgaagcgggacccggagcccgagcagccgccgccatggcaatcaaatttctggaagtcatcaagcccttctgtgtcatcctgccggaaattcagaagccagagaggaagattcagtttaaggagaaagtgctgtggaccgctatcaccctctttatcttcttagtgtgctgccagattcccctgtttgggatcatgtcttcagattcagctgaccctttctattggatgagagtgattctagcctctaacagaggcacattgatggagctagggatctctcctattgtcacgtctggccttataatgcaactcttggctggcgccaagataattgaagttggtgacaccccaaaagaccgagctctcttcaacggagcccaaaagttatttggcatgatcattactatcggccagtctatcgtgtatgtgatgaccgggatgtatggggacccttctgaaatgggtgctggaatttgcctgctaatcaccattcagctctttgttgctggcttaattgtcctacttttggatgaactcctgcaaaaaggatatggccttggctctggtatttctctcttcattgcaactaacatctgtgaaaccatcgtatggaaggcattcagccccactactgtcaacactggccgaggaatggaatttgaaggtgctatcatcgcacttttccatctgctggccacacgcacagacaaggtccgagcccttcgggaggcgttctaccgccagaatcttcccaacctcatgaatctcatcgccaccatctttgtctttgcagtggtcatctatttccagggcttccgagtggacctgccaatcaagtcggcccgctaccgtggccagtacaacacctatcccatcaagctcttctatacgtccaacatccccatcatcctgcagtctgccctggtgtccaacctttatgtcatctcccaaatgctctcagctcgcttcagtggcaacttgctggtcagcctgctgggcacctggtcggacacgtcttctgggggcccagcacgtgcttatccagtkggtggcctttgctattacctgtcccctccatggtccatgaactcaaccggtacatccccacagccgcggcctttggtgggctgtgcatcggggccctctcggtcctggctgacttcctaggcgccattgggtctggaaccgggatcctgctcgcagtcacaatcatctaccagtactttgagatcttcgttaaggagcaaagcgaggttggcagcatgggggccctgctcttctgagcccgtctcccggacaggttgaggaagctgctccagaagcgcctcggaaggggagctctcatcatggcgcgtgctgctgcggcatatggacttttaataatgtttttgaatttcgtattctttcattccactgtgtaaagtgctagacattttccaatttaaaattttgctttttatcctggcactggcaaaaagaactgtgaaagtgaaattttattcagccgactgccagagaagtgggaatggtataggattgtccccaagtgtccatgtaacttttgttttaacctttgcaccttctcagtgctgtatgcggctgcagccgtctcacctgtttccccacaaagggaatttctcactctggttggaagcacaaacactgaaatgtctacgtttcattttggcagtagggtgtgaagctgggagcagatcatgtatttcccggagacgtgggaccttgctggcatgtctccttcacaatcaggcgtgggaatatctggcttaggactgtttctctctaagacaccattgttttcccttattttaaaagtgatttttttaaggacagaacttcttccaaaagagagggatggctttcccagaagacactcctggccatctgtggatttgtctgtgcacctattggctcttctagctgactcttctggttgggcttagagtctgcctgtttctgctagctccgtgtttagtccacttgggtcatcagctctgccaagctgagcctggccaagctaggtggacagacccttgcagtgatgtccgtttgtccagattctgccagtcatcactggacacgtctcctcgcagctgccctagcaaggggagacattgtggtagctatcagacatggacagaaactgacttagtgctcacaagcccctacaccttctgggctgaagatcacccagctgtgttcagaattttcttactgtgcttaggactgcacgcaagtgagcagacaccaccgacttcctttctgcgtcaccagtgtcgtcagcagagagaggacagcacaggctcaaggttggtagtgaagtcaggttcggggtgcatgggctgtggtggtgktgatcagttgctccagtgtttgaaataagaagactcatgtttatgtctggaataagttctgtttgtgctgacaggtggcctaggtcctggagatgagcaccctctctctggcctttagggagtcccctcttaggacaggcactgcccagcagcaagggcagcagagttgggtgctaagatcctgaggagctcgaggtttcgagctggctttagacattggtgggaccaaggatgttttgcaggatgccctgatcctaagaagggggcctgggggtgcgtgcagcctgtcggggagaccycactgctgrcagtgctagccaggaaacagagtgaccaagggacaagaagggacttgcctaaagccacccagcaactcagcagcagaaccaagatgggccccaggctcctccatatggcccagggcttaccaccctatcacacgtggccttgtctagacccagtcctgagcaggggagaggctcttgagacctgatgccctcctacccacatggttctcccactgccctgtctgctctgctgctacagaggggcagggcctcccccagcccacgcttaggaatgcttngcctctggcaggcaggcagctgtacccaagctggtgggcagggggctggaaggcaccaggcctcaggaggagccccatagtcccgcctgcagcctgtaaccatcggctggccctgcaaggcccacactcacgccctgtgggtgatggtcacggtgggtgggtgggggctgaccccagcttccaggggactgtcactgtggacgccaaaatggcataactgagataaggtgaataagtgacaaataaagccagttttttacaaggtaaaaaaaaaaaaaaaaaaaaaaaaaaaaaaaaaaaaaaaaaaaaaaaaaaa

SEQ ID NO: 133 - DNA, 2812 bp, Homo sapiens
aaagttcatgttgttgatctaaaggcagaatctgtagctgctcctataactgtycgtgcttacttaaatcagacagttacagaattcaaacaactgatttcaaaggccatccatttacctgctgaaacaatgagaatagtgctggaacgctgctacaatgatttgcgtcttctcagtgtctccagtaaaaccctgaaagctgaaggattttttagaagtaacaaggtgtttgttgaaagctccgagactttggattaccagatggcctttgcagactctcatttatggaaactcctggatcggcatgcaaatacaatcagattatttgttttgctacctgaacaatccccagtatcttattccaaaaggacagcataccagaaagctggaggcgattctggtaatgtggatgatgactgtgaaagagtcaaaggacctgtaggaagcctaaagtctgtggaagctattctagaagaaagcactgaaaaactcaaaagcttgtcactgcagcaacagcaggatggagataatggggacagcagcaaaagtactgagacaagtgactttgaaaacatcgaatcacctctcaatgagagggactcttcagcatcagtggataatagagaacttgaacagcatattcagacttctgatccagaaaattttcagtctgaagaacgatcagactcagatgtgaataatgacaggagtacaagttcagtggacagtgatattcttagctccagtcatagcagtgatactttgtgcaatgcagacaatgctcagatccctttggctaatggacttgactctcacagtatcacaagtagtagaagaacgaaagcaaatgaagggaaaaaagaaacatgggatacagcagaagaagactctggaactgatagtgaatatgatgwgagtggcaagagtaggggagaaatgcagtacatgtatttcaaagctgaaccttatgctgcagatgaaggttctggggaaggacataaatggttgatggtgcatgttgataaaagaattactctggcagctttcaaacaacatttagagccctttgttggagttttgtcctctcacttcaaggtctttcgagtgtatgccagcaatcaagagtttgagagcgtccggctgaatgagacactttcatcattttctgatgacaataagattacaattagactggggagagcacttaaaaaaggagaatacagagttaaagtataccagcttttggtcaatgaacaagagccatgcaagtttctgctagatgctgtgtttgctaaaggaatgactgtacggcaatcaaaagaggaattaattcctcagctcagggagcaatgtggtttagagctcagtattgacaggtttcgtctaaggaaaaaaacatggaagaatcctggcactgtctttttggattatcatatttatgaagaagatattaatatttccagcaactgggaggttttccttgaagttcttgatggggtagagaagatgaagtccatgtcacagcttgcagttttgtcaagacggtggaagccttcagagatgaagttggatcccttccaggaggttgtattggaaagcagtagtgtggacgaattgcgagagaagcttagtgaaatcagtgggattcctttggatgatattgaatttgctaagggtagaggaacatttccctgtgatatttctgtccttgatattcatcaagatttagactggaatcckaaagtttctaccctgaatgtctggcctctttatatctgtgatgatggtgcggtcatattttatagggataaaacagaagaattaatggaattgacagatgagcaaagaaatgaactgatgaaaaaagaaagcagtcgactccagaagactggacatcgtgtaacatactcacctcgtaaagagaaagcactaaaaatatatctggatggagcaccaaataaagatctgactcaagactgactctgatagtgtagcattttccctgggggagttttggttttaattagatggttcactaccactgggtagtgccattttggccggacatggttggggtaacccagtgacaccagcactgattggactgccctacaccaatcagaagctcagtgcccaatgggccactgttttgactcggaatcatgttgtgcactatagtcaaatgtactgtaaagtgaaaagggatgtgcaaaaaaawararaaaaacaacaaraaragctaaccttctattasawaaggggacaggggaatgagtaracttcttttattgcggacaaatgtgcacatagccgctagtaaaactagcctcaaacaggatgctcatagcttaataataaaagctgtgcaaaggccatgaatgaatgaatttcctgtttatttcactgatgcacacattacctcattgaacaattcagaagtaaatccaacgtgtgttgactcttggaaagcagcaaaarcaggagctgaagaaaagaaattcttggaaccagccgtaacccagtaaggaattgtgaagttgtgtttttattttgtttcattttttgcagagtattaagaacattattctggaacatcagaacgtttcccttagaccgatcccagcaggtggcagctcagattgctgcagtgttgtaattataactgattgtacttaagttatggatgtagagaatatgtttcattcatttattcagcatgtaaataaaattgatcctgttgagttatcataattgcagttcaactatctgccmtggttattcttttcacgtatcattcattctgtacatttgg

SEQ ID NO: 134 - DNA, 1145 bp, Homo sapiens
  SITE (251): n equals a,t,g, or c
  SITE (901): n equals a,t,g, or c
  SITE (1142): n equals a,t,g, or c
  SITE (1145): n equals a,t,g, or c
gccgcgctcctgcctcctgccccagcaggcaggaagaatgggggctgacctctacctcggtgctcaagagagaggccccagctggcagggacccagaagagcctggagatgttggtgctggagaccccaactctgatcagggactccctgtgctgatgactcagggaacagaggacctaaagggcccaggacaaaggtgtgagaatgagccactgctggaccctgttggccctgagcctctggggcctganagtcagtcagggaagggagacatggtggagatggccacacggtttgggtccaccctgcagctagacctggaaaagggaaggagagtctgttggagaagaggctggtggcagaggaggaagaggacgaagaggaggtggaagaggatggccccagcagctgctcggaggacgattacagtgagctgctgcaggagatcacagacaacctgacgaagaaggagattcagatagagaagatccatttggacacrtcctccttcrtggaggagctgcctggagagaaggaccttgcccacgtggtagagatctatgactttgaaccagcgctcaagacggaggacctgctggcaacgttttctgagttccaagagaaggggttcaggattcagtgggtggatgatactcacgcactcggcatctttccctgcckggcctcagctgcggaagccctgacccgggagttctcggtgctcaagatccggcccctcacrcagggaaccaagcagtcaaagctcaaagccttgcagaggccaaaactcctgcgtctggtgaaggagaggccacagacaaatgcgactgtggcccggcggctggtggcccgggccctgggactccaacacaaaaagaaagagcggcctgctgtccggggntccgctgccgccctgaggcctggagacccaactggcctggatctgcgtcccgacgtagctggcgcccccaacaccataagccttcacagacgccagagcagccccgcaccaccctcgagcttcaccatggggtgtggtgggctttagtttagtcccagaaatggagaaaaaataaaaactcacgttgttctaatgtgaaaaaaaaaaaaaaaaaaaaaaaaaaaaaaaaaaaagggggggnccn

SEQ ID NO: 135 - DNA, 1509 bp, Homo sapiens
ggcacgagtaactgcctactatccaatgtcagttaattggtgtcttcccccctcatttgctctcttccctaaaatgtgtcccagatgccttcatttgctgttttacttctatgttctgcttttcctcctctctttgttcccttcctgtctatccattgagtttatgaaatggaagagttaactgcatgcactagtgtttggagggtgttgtggtttgtctttctaattaggtgtatagcctattcactttcctagaataaatctcttaacctaaatttgagtagtctgcattttggcaactcctctagcagcttggtagcctagtacaggttgtttttttaaaaaaggaaaagcaggaaggaggagtgaattttattaacatgtttgccaaatgtattgagatttggcctctgaagaacactttttcagtgttaagtttctttaccttaagattcagaaatactttagaatattattaattttaagtcctgtctttacatccttttggaaaacttgtattaccatgagtttggaaaaaggacaacgaaaggcttttcatgtaaagataagatctttagctatctctaaccctgtccttttttcactgcattttttctagttttgcttcattgcttatcattaggatagggtaagtgaagtttgctatgctgctagcatcctaagatgatacctttgttgaaagaattgtgaatagcatgattcatttctagcagaggctgagtttaggacagcagcttccattgagaagtctttctgtgtcgtgaatagcattttaatgacctcttggctcacataagcaaacaacatagggacgtatctgctatgaaaatccacaaatttttcagatagtgccctaaaaacaattttatatgcctcactggttgttattcttaggttattcccacacttgactttatcattgtttactactagtaaaaagcagcattgccaaataatccctaattttccactaaaaatataatgaaatgatgttaagctttttgaaaagtttaggttaaacctactgttgttagattaatgtatttgttgcttccctttatctggaatgtggcattagcttttttattttaaccctctttaattcttattcaattccatgacttaaggttggagagctaaacactgggatttttggataacagactgacagttttgcataattataatcggcattgtacatagaaaggatatggctaccttttgttaaatctgcactttctaaatatcaaaaaagggaaatgaagtataaatcaatttttgtataatctgtttgaaacatgagttttatttgcttaatattagggctttgccccttttctgtaagtctcttgggatcctgtgtagaagctgttctcattaaacaccaaacagttaagtccattctctggtactagctacaaattcggtttcatattctacttaacaatttaaataaactgaaatatttctaaaaaaaaaaaaaaaaaa

SEQ ID NO: 136 - DNA, 1365 bp, Homo sapiens
  SITE (2): n equals a,t,g, or c
  SITE (7): n equals a,t,g, or c
cnctgtncggaaatctcttttgttgattyaacyaagactgaaaataaccacttgtaaacattcctatgattgttactaaaatgtattttcatgtttaaaatgtttttggatatttttgggttaataactactacattgaattgcatgttaaggtgcagaaataatacattaaaagattttcactttaaattaattagtaatattgagcgctcaccctgtgcgtggccttgtgctaaccattagcactgcatcatttcaattcttttataagggcattcaatactacaaaatcaacatgatttcataaggtgcaaataaaagttggtgacagatttaatataattttgatcacaatttacaaatgatctttgcaaatagtggtcagacggcattagtttttcccttagttaagctaaattaaagggactccatcctgttatgattatattattattattattattattatttttgaggtggagtttcactcttgttgcccaagctggagtgcaatggcgcgatctcggctcaccacaacatccgcctcctgggttcaagcgattctcctgcctcagcctcctgagtagctgggaatacaggcatgcgccactacacctggctaatttttgtatttttagttgagatggggtttttccacgttggtcaggctggtctcgaactcctgacctcaggtgatccgtccacctcagcctcccaaagagctgggattacaggtgtgagctaccgcgcctggccatgatgatattattaaacaccattattcacatttcaaataataacaatactttttgtttttcaaaaataaaatgcaatgttatataaagctataaactaagttctttatgatatttgagcaacaactcaggaatataacatataagggagatgttaatttaaaaatttccactacacttattatctattaaccaaagcttaaaattttgtattcttctgttagataagaccttttacccatttaatttgtctttaaggacagtcatttggcttctgaatgtttgaaacgattttaaaaaataagtagtgctatggttgtttctataattctaacctttgatagtaatcagaatgtattacatttcatttctgaatagcttttgaatttatgaaaaattattaacaatgaaaaattggtaattttattaagttatatgtgtttaaatattatattagcttatttctcttgcattaatagtactgctgtttttgttttgcttctttatatttatgtctagcttttatatgtaatttatctagtgtttataaaatgtgatttgtaataaatgttgttaaaatgaaaaaaaaaaaaaaaaaaaaaaaaaaaaa

SEQ ID NO: 137 - DNA, 1857 bp, Homo sapiens
ggcacgagcaaaaaataattcttttaagaaaaaatgtaaaaatgtttattctaaaaagctgcattaaagggacaacctataaaaagttttgctagctcatctttagaaggaagaaagaatattagcttgggtgatgtttaatttgggtggcgatagtttctgtaggctaaacttgatgagaaaagtgtacctactctataaaggtaataaatgtaaaacctcttgctgttattgaggaagctcttcaactaccctaaatttcacaaatgtaacttataacactatgaaaagattgaccaacaatttacgtttgctgtgtgcttagtttttgtttaagcatattctttgctgaattctgtgttcatgagagttaggtgttttatgctctgaactaatttataacatatttaatatattaccagttaagatataaaatcatttgtacatagcgaattgtaaagcagctattaaagtaggtgaaataaagtatatatttgccggttatccatatcttttagaagtcctgacagaacaaccagtttatttgcacataggtagcttctgtttgaaggaaggtaaagttataaggaaactcaaatactataagatgtgtcaaggtatttctccagaattaattgcaaagctagtgctgaaggattttaatcagcttctaaaattttcttctcaataaggcatatgttttgattacttagggaagattcctcatttttatttgccctttatgcatttaatccacatgataggacattaaaaattaatataaagaaaaatcgtgctcatactgtacatctgtttctgtgcttggaactacttgttaatagtttttatcgaagctgtcagcaataagggacataaaactgctgtattatacattgtggaattgaataaacagcctaattttttttttctagtatagggtacttaagcatttccacttttggaagaaaagtgtattagtattttatattgcatttcatttaaaaggacagtttttttttttttttttgtaaatccattcattgaaatggtttctaaactgtataatgtaatttggagcctatttagtaatagaattaaatgtcctatgtagtgctacaatttttgaattagaaagtgatcaaatgtaagaaaaaaatttaaaaattcagcccagaaaacaaaatagtgtattaaattagtttaatgtaaaaggaatttataagatttttttcctcaatatagatacctcacttgaaaagaaagcacagcatacttaaagtagttctagtaaacatgtcctagaaaacagttgctaaatgtaggacatcttttgaggaattagtttatgagaaataaaattttacttgtttttactatcctgttagaagtatttgtttatcctgataattttaagccaacatagtagtcttaaattacttttgaattcctaatctgtgaaggcagtaaatgaaatatctgttctgcaactgttgaaacaaataattggctacattgaccataattaaagttaaaattttgccaatgatgtacagttttatggttaaagttgctgtggttggttgcattacatgacacagaaaactgtcctctacctcacgtgaaataaatattttatatggttttactaaaaataagactcatgtatctggtcacctagtttacaaattttgaattatatttattgaaacatgacatactgtgctctgagcttatacctcaattgtattttgtgctgttttccattttcatgccttgtaaataacttgtatagattgtggatcaaatactaaataaaaacttttaatgccaaaaaaaaaaaaaaaaaaaaaaaaaaaa

SEQ ID NO: 138 - DNA, 1810 bp, Homo sapiens
cggcacgagctgcttctcagccaggtgtcttgcaaatgtgtggttttatccctatggggaaccccatgggaacgatggacatatggcagactgaacagacacaccccatcactggagatcctgtgcagaaatcatgagctgtgctctcacacacacagttccctcgactaggtctgctttcttgttcttactgattttgtaagcttttcagagctgatgataaaatttgtgcttataccaggaaaacagaaaaggatgttgctcttaagtcactggcaacattctaataacatgcacttaactggcttgatctttttgttcttggtttctcatcctaatcaagacccttggctgtcttgtcagaaagagagcagcagagaaaatagtgaccttgaatattaagacattgggcaagaaaaagatattcatccaggcttctcatataacaggatgtctagactaataccactttgttttattatgtccaatactaggaatctttgagggattaaaagagaaaagttcaccttggcttcttttttaaaaattcagaagattaaacataaaattttaaccagtgtttactgattccttttcaattttatattatgatcagttaaggtacaggagagaaatcctgagatccaagaggaatcaagagtagaaagagaagaaagaggcaagaggaaaggagaaatggtgctaagacagaggaggttgccctggctgagtgctgcctaaactcagcaactgctcctcatcccaccagtcatccccttcagatctgctggactgacaggactcttcctcttgctgcacctgggccccaggtcctaattcggtttacctggttccctgccaaaaattcttaaagcagtgttcaggcctcctccagcatgtgctccaggttaccaccccatcactgagaactgttgctccatgtgctcttagtggaagtcccacgtgcctttttttcttcccagtgtaaactttcctctctgcccccgagtgtcccttgttcatgttgtgttgtatttttgtgtgtggttatgagatgattaatgtttgcatcttcccacctctgtccatcgttcccaggtcttcccttgagagaggagaagagtggttcccaaataccatttaagcactagtgatagagacaaagttcttgtcagactatggcaaaatgagaaaaataaaggggaacatagaatatggaaacacatactgcattgtttataagtgcatatgtgtatgaaacctcattggtggaagcactctgaaaaaccatgaaatgttgtggaactgtgcattattgttgttgttgtttttttttttttaatctccatttaaccttagagtcttgcagctgccccagctaaccactagaatgcaaggcctgtggctgccatcgcttcccttcctctccagcgcacaaacttatttctgtcagcatttcctcctggggaagaattgcctcttgcctgggccacacctgttcagaggtatagcccatcaaacttacagacttggcctctaagaggacccaaaagaagtatgattttaggaaatttatactactctgccttcttttatcttagtgcagtagtgttatctttctaagacttacaagcatttcttgtttcttgtttgggattgtttgaatggaaggcatgatcccttccttacgttgcttacattccaaacgttttatcgtccttgtaagcaaacaagacaatttatggcattgccaaaaagtgtccgtgtaagctttaaaattacttacatgttcaaaaaaaaaaaaaaaaaa

SEQ ID NO: 139 - DNA, 1879 bp, Homo sapiens
  SITE (41): n equals a,t,g, or c
agacctttgataacataaccattagcagagaggctcagggngaggtccctgcctcggactcaaagaccgaatgcacggccttgtaggggacgccccagattgtcagggatkgggggatggtccttggagttttgcatgctctcctccctcccacttctgcaccctttcaccacctcgaggagatttgctccccattagcgaatgaaattgatgcagtcctacctaactcgattccctttggcttggtgggtaggcctgcagggcacttttattccaacccctggtcaytcagtamtstkttactccaggaaggcacaggatggtacctaaagagaattagagaatgaacctggckrgacggatgtctaatcctgcrcctagctgggttggtcagtagaacctattttcagactcaaaaaccatcttcagaaagaaaaggcccagggaaggaatgtatgagaggctctcccagatgaggaagtgtactctctatgactatcaagctcaggcctctccctttttttaaaccaaagtctggcaaccaagagcagcagctccatggcctccttgccccagatcagcctgggtcaggggacatagtgtcattgtttggaaactgcagacacaaggtgtgggtctatcccacttcctagtgctccccacattccccatcagggcttcctcacgtggamaggtktgctartccaggcagttcacttgcagtttccttgtcctcatgcytcggggatgggagccmcgmcygaactagagttcaggctggatacatgtgctcacctgctgctcttgtcttcctaagagacagagagtggggcagatggaggagaagaaagtgaggaatgagtagcatagcattctgccaaaagggccccagattcttaatttagcaaactaagaagcccaattcaaaagcattgtggctaaagtctaacgctcctctcttggtcagataacaaaagccctccctgttggatcttttgaaataaaacgtgcaagttatccaggctcgtagcctgcatgctgccaccttgaatcccagggagtatctgcacctggaatagctctccacccctctctgcctccttactttctgtgcaagatgacttcctgggttaacttccttctttccatccacccacccactggaatctctttccaaacatttttccattttcccacagatgggctttgattagctgtcctctctccatgcctgcaaagctccagatttttggggaaagctgtacccaactggactgcccagtgaactgggatcattgagtacagtcgagcacacgtgtgtgcatgggtcaaaggggtgtgttccttctcatcctagatgccttctctgtgccttccacagcctcctgcctgattacaccactgcccccgccccaccctcagccatcccaattcttcctggccagtgcgctccagccttatctaggaaaggargagtgggtgtagccgtgcagcaagattggggcctcccccatcccagcttctccaccatcccagcaagtcaggatatcagacartcctcccctgaccctcccccttgtagatatcaattcccaaacagagccaaatactctatatctatagtcacagccctgtacagcatttttcataagttatatagtaaatggtctgcatgatttgtgcttctagtgctctcatttggaaatgaggcaggcttcttctatgaaatgtaaagaaagaaaccactttgtatattttgtaataccacctctgtggccatgcctgccccgcccactctgtatatatgtaagttaaacccgggyaggggctgtggccgtctttgtactctggtgatttttaaaaattgaatctttgtact

SEQ ID NO: 140 - DNA, 1879 bp, Homo sapiens
  SITE (41): n equals a,t,g, or c
agacctttgataacataaccattagcagagaggctcagggngaggtccctgcctcggactcaaagaccgaatgcacggccttgtaggggacgccccagattgtcagggatkgggggatggtccttggagttttgcatgctctcctccctcccacttctgcaccctttcaccacctcgaggagatttgctccccattagcgaatgaaattgatgcagtcctacctaactcgattccctttggcttggtgggtaggcctgcagggcacttttattccaacccctggtcaytcagtamtstkttactccaggaaggcacaggatggtacctaaagagaattagagaatgaacctggckrgacggatgtctaatcctgcrcctagctgggttggtcagtagaacctattttcagactcaaaaaccatcttcagaaagaaaaggcccagggaaggaatgtatgagaggctctcccagatgaggaagtgtactctctatgactatcaagctcaggcctctccctttttttaaaccaaagtctggcaaccaagagcagcagctccatggcctccttgccccagatcagcctgggtcaggggacatagtgtcattgtttggaaactgcagacacaaggtgtgggtctatcccacttcctagtgctccccacattccccatcagggcttcctcacgtggamaggtktgctartccaggcagttcacttgcagtttccttgtcctcatgcytcggggatgggagccmcgmcygaactagagttcaggctggatacatgtgctcacctgctgctcttgtcttcctaagagacagagagtggggcagatggaggagaagaaagtgaggaatgagtagcatagcattctgccaaaagggccccagattcttaatttagcaaactaagaagcccaattcaaaagcattgtggctaaagtctaacgctcctctcttggtcagataacaaaagccctccctgttggatcttttgaaataaaacgtgcaagttatccaggctcgtagcctgcatgctgccaccttgaatcccagggagtatctgcacctggaatagctctccacccctctctgcctccttactttctgtgcaagatgacttcctgggttaacttccttctttccatccacccacccactggaatctctttccaaacatttttccattttcccacagatgggctttgattagctgtcctctctccatgcctgcaaagctccagatttttggggaaagctgtacccaactggactgcccagtgaactgggatcattgagtacagtcgagcacacgtgtgtgmatgggtcaaaggggtgtgttccttctcatcctagatgccttctctgtgccttccacagcctcctgcctgattacaccactgcccccgccccaccctcagccatcccaattcttcctggccagtgcgctccagccttatctaggaaaggargagtgggtgtagccgtgcagcaagattggggcctcccccatcccagcttctccaccatcccagcaagtcaggatatcagacartcctcccctgaccctcccccttgtagatatcaattcccaaacagagccaaatactctatatctatagtcacagccctgtacagcatttttcataagttatatagtaaatggtctgcatgatttgtgcttctagtgctctcatttggaaatgaggcaggcttcttctatgaaatgtaaagaaagaaaccactttgtatattttgtaataccacctctgtggccatgcctgccccgcccactctgtatatatgtaagttaaacccgggcaggggctgtggccgtctttgtactctggtgatttttaaaaattgaatctttgtact

SEQ ID NO: 141 - DNA, 556 bp, Homo sapiens
tgacctgtctgggcccagcatgttgcagatgtgtatttatgcgcaatggtatgcatatctctgtgtgactgtcagtgttgcaagctggctggatccaaccatctcttctgaaataatgcatccaaagggttgatattctgggggaggtcactgcagaaggatggaactgacctttattccccagtgggcagttactgagctttcctcctcagagccatgctggcagccctgggacagagaacggtgtggctttggctgcctctgcatggaatcttgccccggactcctgaagactgcacaaggaatgaggaagatcagggacaacctgggaactgaataactttcaaagccagtgctcagcttctctgctccgtactagcgtttacaggtcttaattcaaaccagatgcctgtactagtttttagaccccaagtcaacctttctgagccacagcttcccgctgggaataatgatgcctgccctatctacctcacagacttgttatgaggataaagtgagattaaactgcctcaaagtgaaaaaaaaaaaaaaaaaa

SEQ ID NO: 142 - DNA, 1632 bp, Homo sapiens
  SITE (244): n equals a,t,g, or c
  SITE (1116): n equals a,t,g, or c
  SITE (1300): n equals a,t,g, or c
atgtactgatatactataaactctaggagaaaacttaattgaaatagtgttattaagtgttgaaagtaccataaaaatataagggaaaataagctttcctagaatttttcagtgttctagtttataaacagtgatgttttttattaacctatttcatccattcaaagacaggcctttctccacaccacattttcctctaaaatcatgataacacttttaaattgatggtgtcttccagtgtgtntcagccagatggcagtgtgttacagttccaggaaaatcgttcacatcttccgtaagatcaagaaggctctggcatcagataagatcaaatgttgtctttctgttttaaatatgtgccgcaaagagatttgcttacaatctattgagaaagctaaaacagagcagacattgtcctgttgcggggtagatgaatagcctaagaatagtttagacaaattctgaaaacgaatttaccttagaagatgttcatgttagatctggtaaaagtaacatgttatttttctgtcaagccctttttgtacttgccgtttattacatattttagatttattttttattttcgaaacatccaaaaaggaatgctaattagtgaaatggaagaatttccatttcaacaccttaggaaaaaaaaaactgacttgacatacctaagaaaaggccaagttgatttactttgtcagtctcttcatttgtgatacgtaaagtccgttgttacctagataaatgtaggtttgatttcttggaagcaatcacttaagactttccattttcttcaaagcatcttactcaacctgcatgtgggatctgtactgagcaattagagattcaaaacaactgtcacacacgacagaggtggtaaccgcccaacaggttcacctcttccgccgcctacacagagccgatttatcaagacaggaattgcaatagaggaagagtacacagagctgcttgtgcaggagactggagtcttattagtactcaaatcgatctccctgagcattcggggatcagagtttttaaggataatttggtgggagggggaaggccagtgagtcaagggtgttgattggttgggtcggagatgaaatcatnaaggaattgaggtgtccttttgtgctaagtcagttccagggtgggggccacgagatcagatgagccagttaatcgatctgggtggtgccagctgatccgtcgagtgcaggtctgcaaaatatctcgagcaccgacataggagcagtttagggagggtcagaatcttgtagcttccagctacatngactcctgaaccataatttctaatcttgaggctaatttgttagtcctacaaaggaaatctagtccccagacaagaagggggtttgtcttgggaaagggctgttatcatctttgttttaaactataaactaaactaagtttctcccaaagttagttgagcctacacccaggaatgaacaaggacagcttggaggttagaagcaagatggagttggttaggtcagatctctttccccacctcagttacaattttgcaaaggcggtttcagaatcagagcacgaagtgttcctataaaaaaaaaaaaaaaaaacctttccttaattatgctcata

SEQ ID NO: 143 - DNA, 1380 bp, Homo sapiens
gggaaaggaagggatggtgggccaggtggctctctagatgggaggtgtccgggaacttgcaggtctcaagcctgggtgactaggaggatggtgcgcaaaacaggaaaggcaggacgcggctgctgggttcctttctcgagtgcacgcagggctgaaaggaggggagctgagatgagaacggcccttttccccactgaatgctgcctgcccatgtgtgtcgtcttagctgttttctatttgcccatcgtgtttagtagaataattgaatctgcagacagttttgactagtccattttgcctctcactccaccccgctgcctctcgtgctttctctctctcttccttacctgcctgctgccagctccttgcctcccctctgattactgcgcccccgcaataactcactgtttgatcttccacatacgggaactcgaaacccagctactgtctgcccagcaaggctgcagtgtccagggtgacccaggccatgtcctgcactgattgtaatcctcctctgcgcctaacacagagccttacgtgtataccgagtagaggagaaggaaggatgtcaaacatgtcactaccaccccccagtgcatgttggtctccctcacgctggactgtggcaggagtcttccaaaactgctctcagtgccccatcccctctgtgtgcaatcatatcgttgcttacttaaccaaccattcatctcctagggcctgagttctgttacccagcctcctcagaatcttcagcagttcctcatttccataggggaaagccagctgtttatttcctttacttatgcaacgaataagtcagtgtcagatagtatttttgttgataaagccwcagcggmgagcaaaacattttggtcctgcttcctgtgagctgactttctgcaagggagagagatgataaatgcacatataatatagttgagagtgatcagtgctgcaaggaaaagcagagctgaggaaggagcaaatggtggagagggaggagagggagtggtgctggcctagacggtcaaaggttgctgtggtaaggggacactggagttaagatctgagtgaggctgggtgcggtggctcatgcctgtaatcccagcactttgggaggatgaggtgggcggatcacttgaggtcaggagttcaagaccagctcgggcaacatggctaatccccatctctactaaaagtacaaaaattagcctggcatggtggtatgcacctgtaattccagctacttgggaggctgaggcaggagaattgcttaagcccgggaggggaaggttgcagtgagccgagatcacaccgctgcactccagcctgggcaacagagtgagactctgtcacaaaataaaatataaataaaaaaaa

SEQ ID NO: 144 - DNA, 1380 bp, Homo sapiens
ggcacgagaaacaattagccgagcgaggtggtgcacgcctgtaatcccagctactggagatgcaaaggttagccaggtgtggtggtgcatgcctgtaatcccagctacttgggaggctgaggcaggagaattgcttaaacctgggaggtggagattgtggtgagctgagatcgtgccactgcactccagcctgggagatagaacgagacttcctgttctgttgtttttccgttttgtcaaaatatctcctatgttcttggcttccttttcgtcgccaggttttcagctttcctttagctcttcttctaatatggcttctgcccacaaaagcctgctctgtcaggatctcatggttctccacttgccagaaccttcttcagcctcagttcctcggcctcaacttgtacgtttaacccattgaccaccaccccccaaattcaccttcatttctttgaccctgctcctcactccttttctgttgaggaatctgttgactaactccaggctcactcaggctcaccgtcctgctctctgcaccagcctttccagagcgtgccagttctcatggcttcactgttaactgttgatcgcttcagtcctgatttttagacctaaatggtttccttaacgccattctaactgcctgtgactcattttcacttacagtgtttattgtaacgccaaaccaacaaatcacaggtgcttgcttctctccataaatctccccagtctaactttttgtcattcaacatgactcgtttatccaacctgaaatcgcatatagccccaagtatggtgttttgtacacaggtatttaataagtgacttccagttttggctctgctatgaataaaaagagatttcagttctcttcactttgaaatctaacaactcagagaacattgaagaaattggaatttagttgggatgaaatacttgtggtttaaaatatttctgttcatattttctaatttgttgccggaggtcttgggttttctatttgagtgcttgcaaactcaatgtgatttctgtcagcatatcttaggtttgtttgttatgaaacttacgcagtgtgaggttctatctgaaaatgttatttagctatcttctgggactatttaatgaaagtggggtcatgaatccttaaaattcttgtgcgctttgagaaacatttctgttatttgggtatcagtttgtaagtgtggtaaagccaagatggaaacgagcactttgctttcttggttgttgttactggtctaacctgcttgaactagtctgctgtcctgtcaaatgcatctttttatttacatgtcccttaaattaaagctgatcatgaaagtaaaaaaaaaaaaaaaaaaaaaaaaaaaaaaaaaaaaaaaa

SEQ ID NO: 145 - DNA, 1048 bp, Homo sapiens
gccgtcctgcaggtggttgccatcgcggccttcaccaggtagctacggacacccgggaataccccacactggggccctcctcctgggcctgaccagtcccccagctgtcacctccccattcctggacaggaagggcacttttcctagtgaactggccatagatggttttggatggttccatctgttctggcaggagtgggagcaggagccagggcagaacaaactgctggaggccctggtgttgggaacagctgcggggagggtagggaccagacagaactgccttcaagatgagtcccaggagcgcacactcagccctgtcagtggggtctggctttagcagccaggcctccacagacccccatgggcccccagggccgagagggaggacagagcccttcagaacagaggcctcatctcactgcatcccccatcaccccctagttccccaatggtcctaatttgtgttctgagatcccagtttactccgtggccaggccccacctgtgtttccaagtcgggctggagacgcaggatggggtaggccttgtgctctgagcaaccccagctctgcctcacaggcaggcaggcccggtgcaagagtggactctgggttcctaaagcaataaatgcaaacaagccaacagctctgctgcctagcaatttccatcttagccacacttctcccttcaggggcttcggaggagaggtcagggctaaggccggggatgagactgcaggagagagagcagcggagggccacattcggagcctccgtccactccagttttatcagcttttgccttttgcacggagtgctaaacaaattctagctctgtgtttttttcccattcccagatttactatcagttctccttaaaaagtatctaagctgttacagtagctttcccttcacttgattctattgtgtgttttctatgtttggaataattacacccaaatatctagatattttctcttcaccgcattttgtaaataaagagatgtgtatgccwmmmwraaaaaaaaaaaaaaaaagggcggccgc

SEQ ID NO: 146 - DNA, 1882 bp, Homo sapiens
  SITE (1407): n equals a,t,g, or c
  SITE (1412): n equals a,t,g, or c
gaattcggcacgaggtaaatgtggtgtttctcctagctgtgaactgtgtcctaatcaggatggaattttcaaggagacagatgctggaagatgggttcatattgtttgtgccctgtatgttcctggagtagcctttggagatattgacaaattacgaccagtaacactaacggaaatgaactattccaaatatggtgccaaggagtgtagcttttgtgaagaccctcgctttgctagaactggggtttgcattagctgtgatgcagggatgtgcagagcctatttccatgtgacctgtgctcaaaaggaaggtctgctttcagaggcagcggcggaagaggatatagcagatccattcttgcttattgtaagcaacatgcagataggttagacagaaagtggaagagaaaaaactacttggctctacagtcctattgtaaaatgtctttgcaagagagagagaagcaactatcaccagaagcacaggcaaggatcaatgcccggcttcagcagtatcgtgccaaagcagaactagctcgatctaccagaccccaggcctgggttccaagggaaaaattgcccagaccactcaccagcagtgcttcagctattcgtaaacttatgcggaaagcagaactcatggggatcagtacagatatctttccagtggacaattcagatactagttctagtgtggatggaaggagaaaacataagcaaccagctctcactgcagattttgtgaattattattttgagagaaatatgcgcatgattcaaattcaggaaaatatggctgaacaaaagaatataaaagataaattagagaatgaacaagaaaagcttcatgtagaatataataagctatgtgaatctttagaagaactacaaaacctgaatggaaaacttcgaagtgaaggacaaggaatatgggctttactaggcagaatcacagggcagaagttgaatataccggcaattttgcgagcacccaaggagagaaaaccaagtaaaaaagaaggaggcacacaaaagacatctactcttcctgcagtactttatagttgtgggatttgtaagaagaaccatgatcagcatcttcttttattgtgtgatacctgtaaactacattaccatcttggatgtctggatcctcctcttacaaggatgccaagaaagaccaaaaacagttattggcagtgctcggaatgtgaccaggcagggagcagtgacatggaagcagatatggccatggaaaccctaccagatggaaccaaacgatcaaggaggcagattaaggaaccagtgaaatttgttccacaggatgtgccaccagaacccaagaagattccgataagaaacacgagaaccagaggacgaaaacgaagcttcgttcctgaggaaganaaacntgaggaaagagttcctagagagagaagacaaagacagtctgtgttgcaaaagaagcccaaggctgaagatttaagaactgaatgtgcaacttgcaagggaactggagacaatgaaaatcttgtcaggtgtgatgaatgcagactctgctaccattttggctgtttggatcctcctttgaaaaagtctcctaaacagacaggctacggatggatatgtcaggaatgtgattcttcatcttccaaggaagatgaaaatgaagctgaaagaaaaaatatatctcaggagctcaacatggaacagaaaaatccaaagaaataaaagattttctgtagtgtttttgaaaagtttgcagcttatgtaatagcagataaaatttctaattgtaaaatgttaaattgtaaaatctaatttgcaaaatgttctcaataaagtcattcaaaatgaaaaaaaaaaaaaaaaaaaactcgta

SEQ ID NO: 147 - DNA, 2254 bp, Homo sapiens
cgtgagaccagcggctgctgccctgccgcaagtacgagcagatcgaagagggcactgtccggcgcctcatcatccacaggctgaaggagacgatgatggtatctacctgtgcgagatgcggggccgggtgcgcaccgtggccaacgtcacagtcaaagggcccatcctgaagcgctgccccggaagctcgacgtcctggaaggagagaatgctgtgctgctagtggaaactctagaggccggggtcgagggacgctggagccgtgatggggaggagctgccggtcatctgccagagcagctcaggccacatgcatgccctggtccttccaggggtcacccgagaggatgctggcgaggtcacctttagcctgggcaactcccgtaccactacgcttctcagagtaaaatgtgtcaagcacagtcccccaggaccccccatattggcagagatgttcaagggccacaagaacacggtcctgttgacctggaagcctcccgagccagctcccgagaccccattcatctaccggctggagcggcaggaagtgggctctgaagactggattcagtgcttcagcatcgagaaagccggagccgtggaggtgccgggcgactgtgtgccctccgagggtgactacccgcttccgcatctgcacagtcagcggacatgccgtagtccccacgtggtgttccacggttctgctcacctttgtgcccacagctcgcctggtggcaggtctggaggatgtgcaggtatacgacggggaagatgccgtcttctccctcgatctctccaccatcatccagggtacctggttcccttaatggggaagagctcaagagtaacgagccggagggccaggtggaacctggggccctgcggtaccgtatagagcagaagggtctgcagcacagactcatcctgcatgccgtcaagcaccaggacagcggtgccctggtcggcttcagctgcccccggcgtgcaggattcagctgccctcacaatccaagagaagcccggtgcacatcctgagcccccaggacaaggtgtcgttgaccttcacaacctcgagcgggtggtgctgacttgtgagctctcaagggtggacttcccggcaacctggtacaaggatgggcagaaggtggaggagagcgagttgctggtggtgaagatggatgggccgcaaacaccgtctggatcctgcctgaaggccaaagtccaggacagtggcgagtttgagtgcaggacaagaaggggtctcggccttcttcggcgtcactgtccaagatcctcccgtgcacatcgtggacccccgagaacatgtgttcgtgcatgccataacttccgagtgtgtcatgctggcctgtgaggtggaccgagaggacgcccctgtgcgttggtacaaggacgggcaggaggtggaggagagtgacttcgtggtgctggagaatgaggggccccatcgccgcctggtgctgcccgccacccagccctcagacgggggcgagtttcagtgcgtcgctggagatgagtgtgcctacttcactgtcaccatcacagacgtctcctcgtggatcgtgtatcccagcggcaaggtgtatgtggcagccgtgcgcctggagcgtgtggtgctgacctgtgagctatgccggccctgggcagaggtgcgctggaccaaggatggagaggaggtggtggagaccccgcgctgctcctgcagaaggaagacactgtccgccgcctggtgctgcccgctgtccagctcgaggactccggcgagtacttgtgtgaaattgacgatgagtcggcctccttcactgtcaccctcacagagtcttaccaaagtcaggacagttcaaataacaatccggagttatgcgtcctcttgaaaaagccgaagacccggcggctctggtcccgcttccccccatggccacgaacagctggcactgagtagcagctgcccccatagtttggggcccacattcctctgtcccacctccctgccattgctttttgcctctccccagaccgcttcaccttccacccgggtgtggtaccaggtaagtgtacccgtttgcgacccctgtgttaaaccaataaacatgcaaataaatgtacaacgtcgtgactgggaaaaccctggcgttacccaactaatcgccttgcagcacatccccctttcgccagctggcgtaatagcgaagagcccgaccgatcgcctttccaacaagttgcgcagcctgaatggt

SEQ ID NO: 148 - DNA, 284 bp, Homo sapiens
ggcacgagattttcttcaaatatataatggcaattttcagatatctcaccttaccatatctttccttattttcactgcatgcatttaatcactgtattacttaatgtttgatttgttattatgggcatttcaaataggcaagcattgaattgtaatgacaaaaaggctattttatattaaggatatatgcatttgtatttcacacaccagagatgatattaaacactgattattttatgctgctgtttattaaaaatgtttactataaaaaaaaaaaaaaaaaa

SEQ ID NO: 149 - DNA, 1615 bp, Homo sapiens
  SITE (591): n equals a,t,g, or c
ctttctacttttctttggcactcttactgcctgtaaggagtagaactgttagggcacactgttgctatacagtttaactcccattttcatgttttgtctttcttttcccatttctggggcttacctcctgatacctgcttactttctggaagtagtgggcaagtaagatttggctcttggtttctaatttttaaatttctgaatactgccctagtctgaacttggcctttatagattaatctttgcttcacatttttagtgttgtatttaaactattttataatttaaaaatagattctaatctgaagatacttttcaagaaatattattaactgatgtcatcctcatcccagcagctcatctgttaggaatgaagttgagatgcttctattccatgtttttgtatttgggaaggattcaaagttgaaggtttattgtcgttgggtttttcagatggtgacatgtaaactcaggatagcaaaccctaatgttcacacagtgctctgcctctgcactcagttgggatagttgctccytttgagtgktttaatcatcgtataactaatcgtagtgycaagaagtycataatgnkgtatgtagctaatgtcactgaaaaacagtcctaccatttaggtaagaccaaacagagtctctaacccaaggacttgttacacctgacaacctatagtatatttgctttttctcacaaaatgaaaccaattttgccgaaagctagctgggataataggatcatcacaagttgcagtttctataactaaaattagattgaaatctcttctgacctagaacattttacttcaggcattcagcagatttcagaaagaattaccttattttaagttagtttctttgttagtttactgtgtgtctcttattcaataaacaagcagaatttgtgtcctgccctatccatgtcttaaagatgagaagttggatccactgagttagtttcattggggcgggggaaagaactgtaattaaacttgtttaatccttattttgtattgtagctattttttgtaaaagcaacttaaaatcttttaaaaattttatagtgacattagagacaatggtcatacaaattatcacataaacatggacttgaaaaattaggcttttcataaaacacatcacatgtcattgactgctttttagaaatacacttccaaggcagtacatctgtattgctactgaaaagtgccawttcacagaacacagacttctttttgcyctttgacatcttgaaaacatctgtttttcttttttaatacmaaactttgtgctcaagacmaatcttacatgaaactctcataaaccatgaaaatgtagctggccttcgggccttaggcatgaaataagcatgaggaacatattcccctaacttctacccccagcccagcaagttatcctttaagaaatctcctaggaattctggagtttgaaaacaattgctctatgttattcctgcttccagtctctaagtaacaagggcatttaaaagcatagtctcttaaggtccactatagtggttctttatttaaggaataactcagctgggtgcagtggctcacgsctgttaatcccagcactttta

SEQ ID NO: 150 - DNA, 1245 bp, Homo sapiens
gtagaatgccatggagttaatagcttctgtgatcctacatgttccaagataactgcagcagtccaaaaagccagtttcctttctggtgtttgtgggcatacactttgttctgctcctgagtaagtcacactttgtcttccaggtcctctaggatccctgcaatgttccatttgttgcctgggcattggagtaatagcagtgcttggtgctacagaaatagatggatggaagttgtggttactgtgacaccaaaaacttgtcccctgagctccctactcctctttctcctatattttttggtaattggctctgtcattcacctcactgcaggattcagaatcctggtactgggtcttgtatttctctttttcccttaccctccttatccaaattgtcaccaagttctgcttcatgctctcatgatttctcacctgagttaccctagtagcttccaaatagggccctctgatttcaaccttggacactcccactatcttttatattatggaaagatctaatcatgttaccccccatttaaaatccctcagagagcactgcagatacaattcaagccagttagcttagtgttaaggttttacatgcatttctgcagccatctgcccctattcttgcaccctaataatgccaaacttcttttaggccttaatttcatcatctgcaaaatgaggataataaatagtacctacttcatatgattgtaataaggsccctcaaaactgtttcatgcctcttttgcccactgcattaggctgttctcacattgctataaagaaatacctgaggctgcgtaatttataaagaaaagaagtttaattgactcacatttmtacaggctatacaggaagcatgatggtggcatctgcttggctgctggggagggctcagaaaacttacagtcagccgggcacagtggctcactcctgtaatcccagcacttggggaggccgaggtgggcagatcacctaaggtcagaagttcgagaccagcctgtccaacatggtgaaacctcatccctactaaaaatacaaaaattagccgggtgtggtggggcggcacctgtaactccagctactcagaaggytgaggcaggagaatcacttgaacccaggaggtggaggttgcagtgagccaagattgcgccactgcactccagcctggacaacagagtgggactctgtctcaaaaaaaaaaaaaaaaaaaaaaaaaaaaaaaaaaaaaactcga

SEQ ID NO: 151 - DNA, 1961 bp, Homo sapiens
ggggaaaatgaaagaaaagagatatgatgccagcaaagggatggaaagtctagaggacacctttgtatctcaagctaatgctctacaaaggaaaggccgagcaggcgttgttgcatctggggtctgcttccatttattcactagccatcactacaatcaccagcttttaaaacaacagctaccagaaatacaaagagtgccattggaacagctgtgtctaagaattaaaattttagagatgtttagtgctcataatctccagtctgtgttctctcggctcattgaacctccacacaccgattctcttcgtgcctcaaaaatacgattacgagacttaggagcattaactccagatgaaagattgacccctcttgggtatcatttggcctctctgcccgtggatgtgagaattggcaaactaatgttgtttgggtctatcttccgctgtttggatcctgctctcaccattgctgccagtttggcttttaagtckccgtttgtatctccctgggataaaaaagaagaagctaaccagaaaaagctggaatttgcattcgcaaacagtgattatctggcccttctacaagcgtataagggatggcagctaagtacaaaagaaggcgtgcgtgcaagttataattactgcagacaaaacttcttgtctggaagagttctgcaggaaatggccagcctcaaacgacaattcacggaactgttatcggatatagggtttgcaagggaagggctcagagcaagggaaattgagaaaagggcccaaggaggagatggtgtcttagatgccacaggagaagaggcaaactcaaatgctgagaaccccaagctgatatcagcaatgctgtgtgctgctttgtatccaaatgtagtgcaggtgaaaagcccagaaggaaaatttcagaagaccagtactggagctgtcagaatgcaaccaaaatcagctgagttgaagtttgtcaccaagaacgatggatatgtacacattcacccttcatcagtgaactatcaggtgagacactttgacagcccctacctgttgtaccacgagaagataaaaactagtcgagtattcatccgagactgcagcatggtgtctgtgtacccgctggtcttgtttggaggaggccaagtgaatgtgcagcttcaaagaggagagttcgttgtctccctggatgatggttggatccgttttgtagctgcttcccatcaggtggctgaactggtaaaggagcttcgttgcgaacttgatcagcttctccaggataaaattaaaamcccaagcattgatctgtgtacgtgtcctcgaggatcccggatcatcagcacaattgtgaaacttgtcaccacacaatrraaagcagtcttaragagtgcttgctactcacctgcttctagctcacctgggaaataacagcagaacctctacctcgaactaaagacctattggggctggccctggtggaggagcccagggcatgaagcccaaggcagctgaggcagtgtatatacccttagggccatttctaacaaagccttggccactcccagcacaatttggagtgtcaagggtgagagcctaaaacccagcttgcctgtctttgtctctgtgattgttctggagtgaattaagttcacctgataactcaaaagtgaatgtataatacaattctgttttaatctgtgtattctttttctcctactttttactggggtgagaggggcatgaagagaaatacgcctttttttttttcttttcctgtcgccaaggctcgactgagagaagtcagaacagagaaggggaaaaaaaacccaaaattatgtgaacaagcaaaattaaaatttcattttaggctattggctactgagtaaacttgacttgtgaggggtttttatttttactcattaaaagtcaacttaaaaaaaaaaaaaaaaaaaaaaaactcgag

SEQ ID NO: 152 - DNA, 936 bp, Homo sapiens
  SITE (699): n equals a,t,g, or c
gcggtgtgccacagctacctgggtgtgcctagattgatcggtataaggctcactctcccgccccccaaagtggttgatcgttggaacgagaaaagggccatgttcggagtgtatgacaacatcgggatcctgggaaactttgaaaagcaccccaaagaactgatcagggggcccatatggcttcgaggttggaaagggaatgaattgcaacgttgtatccgaaagaggaaaatggttggaagtagaatgttcgctgatgacctgcacaaccttaataaacgcatccgctatctctacaaacactttaaccgacatgggaagtttcgatagaagagaaagctgagaacttcggaaaaggctcatctgtcaccctggagaagggaaactgtacttttccctgtgaggaaacggctttgtattttctctgtaataaaatggggcttctttggaatttgatagccacatacttttgttttcctctagatgctgcctctactcatgtagactatgaagtcttgactcatcctagatcttaggatcttaggtttgggcttcacaccacttgccttttacagtctagctatacctaattcctttaaaaagaaaagttggtgagaatgttattggcgctttttgacataatgctgttatgtymatagtgtttctaaagagccttccacactgaaatgaaatataagnagaaaaatggagtcatacttctgtactactctcataaaatatttattaggcatattctctgagtaggaactataggaaaaacaaaaaagtgtgaggtgtcctttccatttaaatatgaaacattaagtaccatatgaatggtagagatggcggatactaagcctgactggtcatcagttttctgggtgttttaacatttcaaaagcctagtcctaacccctaaagattgatcagtag

SEQ ID NO: 153 - DNA, 3853 bp, Homo sapiens
  SITE (210): n equals a,t,g, or c
  SITE (3808): n equals a,t,g, or c
  SITE (3819): n equals a,t,g, or c
gcgctcccaacgtggtggaggatgagattgatcagtacctcagcaaacaggacgggaagatttacagaagccgagacccacagctatgccgccacggcctttggggaaatgcgtgcactgcgtccctctagagggggaagtttgttgccctggagaacatcagctgcaagattaagtcagggtgcgaggggcactcccgtggccgaatgnactctgtactaagtgccagccgagcgccatcacgctgaacagacagaagtacaggcatgtggacaatatcatgtttgagaatcacaccgtcgctgaccgctttcttgacttctggagaaagacagggaaccagcattttgggtacttatacggacggtacacggagcacaaagacattccccttggcatcagggctgaagtggctgcgatttatgagccacctcagattggtacacagaacagcttggagcttcttgaggatccaaaagctgaagtggtcgatgaaattgctgccaaacttggcctgcggaaggttggctggatatttacagacctcgtctcagaagatacccgaaagggtaccgtccgctacagtcgaaataaggacacctatttcctaagttcagaagagtgcatcactgcaggagacttccagaacaagcatcccaacatgtgccggctctctccagacggacattttggatccaagtttgttactgcagtggctacaggtggtcctgacaaccaagtccactttgaagggtaccaggtgtccaatcagtgtatggcactggtccgtgatgagtgtttgctgccatgcaaggacgccccggagctggctacgccaaggagtctagcagtgagcrgtacgtgcctgatgtgttttataaggacgtagacaagtttggcaacgagatcacccagctggcccggcccctgcctgtggagtatctcatcatagacatcacaacaactttccccaaggatccagtttacactttttctatttcgcaaaatccatttcctattgaaaaccgggatgtattgggtgagacacaggacttccatagcttggccacctatttgtctcagaatayctcatctgtgttcttggataccatctcagatttccacctcttgctgttcctggtcaccaatgaagttatgcctctgcaggacagcatcagcttgctgctggaggccgtgcggaccagaaatgaggagctcgcccagacatggaagaggtctgagcagtgggccaccatcgagcagctgtgcagcacagttggcgggcagctcccaggtctccatgagtacggcgccgtcgggggctccacacacacggccactgcagccatgtgggcctgtcagcactgcacgttcatgaaccagccaggcacaggccactgcgagatgtgcagcctccccaggacctagggcgcctgccctctgctggctaggaccgggcccagcccagcccttcctgaagccagaagcgttgctgagtgtgttccctgtaactgccccatagtgggcagccctggaggaacaaggggctggctgtcctgggctccctgacccactgaagcttctcagcacgttcctccctggagagcgggcgccacggctggtattctgcaggctgaatgcagtctccagactggaaacgcagagcggctcctcacgcctaatcctgttgacaagtcccccgccgtgttggaaagacctctcgcctctacgtggcacctggaattggggcgcacagggaggggcsgatgctgccaccacccagccttctctttattttcagtgctttttgtttggcctccctgcccccatgtttttctggctgggagctcctggttacccccttgtctgactgcttggtggcaggcaccctgcctgtgagggccactttcctcttctagtagctgttgtctggtggggacgcagtggccctggacacggctcccctctgcaggtctgcaggtcggtttgctgcctgccctcctcctctcacccgatgtccaggtgggattttaaagtctgcattggttataataacagttatcagtaattcctgcccagaagacttttatttatttttttttaagataaaaactgcacaaaaggggagtgagagagactagtttccacatccttccctcctttagtgaagcccccgaggttgtgtccagggtgatgagtgtggacgggggcaccagtcagttctcccttgaagtaaacctcagtgcctgagacttttctaccaagccacacagctgcagcaactgcagatactgcgggctgagcaggagcagtggtggcgcctgccctgaggctgccctgcgatggcctgggtgggagagctgggtcaccggtgccgatgctctggccctccccaatacgctgcttcgtcccactgcaccgcctggctgagggcgttaggggctgtgcctcttgtgagggccatttgggacctccctggggcactgcacaattgatagtgtaccaatagagggagactgggcgatctggaacagcacgtggtggggtcctgcttgtgtgctctgcgttcctctgtggcgtggccaggccggggcctggctcttacccggggagtggtgggcatctcgatgcttctttgccttaatgatggccacatctgggctgctctgcacccacgggagaggctggcccagctgcagactgcttagggacttctgtgtccatcctggggggtaagcccacgtgacccacattcttggcactatgaacagagaacatttgcctgttggcttctgaagtggtcagggccatggctgacacctccaggtccgcctggcatgggacaccaagtggaaggcccaagcagctcatctgctcttgggaccaggggccagttgggttgggtctggtcacggcagagctwttgtggagggtcaggaagggtggagaggagctgggttgaagcggactgctgcggatgcaactcccagcttgcccaccgcgggctgtctgctctccctcctagcagctgtcacactgaagttttgtcctctgctgtctcctctggtcctgagatgagctgtgagcctaggtggccaaggcttcctgcattgcttccctgtgagtccaaggccttcccccaccactgggcagaggctggacagcacggacttctagagagagccgcgttgccagttcctctcccactcgctcgtccttatccaccacgctattatagtttccgttgtcctccaccagcatttcccttactctgaagttccggcattcacatcattcatgttttcttttgtcttttagctaaaggaaaagcattggcgatttgtctgattctggttttgagttactctttgttcagtaatgcactttattttattgtccaaagagagtcagagctaagcatacaggcttgggggtgagccctgctgtgagagttcaggccctgggaggctcagccacctcctcttgtgggaaggaggtctcagccccacctcgcatcttcacctgcccttggtgtggacacaccctctcatgctaccagcaccataatccagtgggggtgactgggtgcacacctgcccaggtgaacacagcggctgccagtctcctggtcccgagaggaggtgggcctggccctggctccctccaaccagctgctcctgggacacaggtgctcctgcttcggctctgtttcggctcacaggtgtgcatcactgggcttggatttgcattacattgaccccagccctgcagtggaacctaataaaagcgcctgaagcaaaaaaaaarnaaaaaaactcnggggggggccccgaaccaattcgcccaaaagggg

SEQ ID NO: 154 - DNA, 1357 bp, Homo sapiens
ggcacgagtgacttaaatcatggctgtattatttcatttttaaagaaaataaagtataaaataatacatttaaaatacctgtcaaagttttaaaatataagatagaaccttctttttttgccttcttacacatgaatgtacttaaagtattgttatgtgatcttgggatacttatttatttttgaaatttttgtatatatagcatttctgaacttagcaaataatatgtgtaaaggaattaaccaaaaatgaaagaactggcattttcatatgggatacatatttgcttaaactaaataaaataacttagatttatttaaatcaggaatatttacgttgttgatcatttttaaagtatatttgttcaaatattcctaatttgtttttcagcacacttgtttaagttcttgcctttcaggtatactacagcgttatatgaacataatgttttaaaaaaatcttggttgtagtttctaattttcactgcataacaaatttgaaaccaaatgttgaatttctctgtgagggtacttattttgcctacagtttcaaatatattttcaaattcatctctttcttactagactgtgagctccttgtggacaaggatgttattttagttataatgacaactttaatatctagcaaagtgccaggcatagagtattcctttattgaaatgaattgatagatattgattattaaaatgctactacagtattctacgatgcaggctgaatgtatattacagtaattctctggctaattttaaaagtaagacatagaaaacaaaacacctgtagcattttctttatttaaaattgaaactctgttttgaatcctttttattttgtcaaacattctatgcaaatattgaaatatgcaacagctaaactttatggtacatattaattagttttattttccttttcaaaatcagaaatgctgtatttaagcttcctggaaatgtcgacaatcattttaatgaccaaaggtgctacttatttttcaacattgaccttgatcataagtgcttctatctgctgagctttatttattgtttttggacagaaagtttggtgggaaggttgcaataaaatcagaatctctcttgtctgaattatgcagtttaaccctgtccatgttcctctgtactctattcttactgtattttagttattgtttcttacttatcactaatttttactgcaggtctgtgctgtttcttagaaagtacatgcatatatatttctataatatgtaagaaaaaacctgtattgcttattaaattaaaattaaaataaaaaaattcatgttaaatttttgaaatgaaaaaaaaaaaaaaaaaaaaaaaaaa

SEQ ID NO: 155 - DNA, 810 bp, Homo sapiens
  SITE (5): n equals a,t,g, or c
  SITE (22): n equals a,t,g, or c
  SITE (26): n equals a,t,g, or c
  SITE (43): n equals a,t,g, or c
  SITE (54): n equals a,t,g, or c
  SITE (59): n equals a,t,g, or c
  SITE (88): n equals a,t,g, or c
  SITE (806): n equals a,t,g, or c
ggaangagcgccccaattacgnaaanccggctttttccccggnggggttggccnggatncattaatgccagctggcacggacaggttncccggactggaaaagccgggccagtgagcgcaacgcaattaatggggggttggctcacttcattaggcaccccaggctttacactttatgcttccggctcgtatgttgtgtggaattgtgagcggataacaatttcacacaggaaacagctatgaccatgattacgccaagctcgaaattaaccctcactaaagggaacaaaagctggagctccaccgcggtggcggccgctctagaactagtggatcccccgggctgcaggaattcggcacgagccgagaaggcccttaactcaaagtagcttatttatccaaaatgttctggatgcatcatctccaaccaaggaccccttatttatcatgcctttgttctcttttccctcagatgtatatttctttaaaaataattttcctaataacaaaacttatttctaaaacagcttaaaaattcaaagaaaaaccccaaacactgacattacctacacttccactacccaaagacaaaatgtgcccactgtgtgcttttgagtgtattttcttttagtttgttttttgttgggtgcatatttatgataataacaatgatggacttcaattgtactcactgttctattgttggttttaattagcagcaagttgtgatcactttcccaggtgaataaatcatttcaaagcaaaaaaaaaaaaaaaaaaaaaaaaaaaaaaaaaaaaaaaaaaantcga

SEQ ID NO: 156 - DNA, 811 bp, Homo sapiens
  SITE (23): n equals a,t,g, or c
ggcacgagctcatccagagatgnactgggcacagggaaagctttttttttcaagtagcagctgctattcattgaaatgttacaattttcctgccttagtatttcacacgtccttatactcctcataacattttttgcttgtgtagttttagccccatttcagaaatgaggaacccaggttcagaaggtttagaagcttgctcaagaccccccagctattaggtgccagagctgcaactggaatgcagctttgactccattgtgggtttctgttccattatcaagagtagcctgacagttggcaataacaatgactgaatgaatgaataaatgattctccaaagaaaatagttcatgtttccctagtatgagggaatacttgagatagttgttttgagaagggggccacagaccaggagacaccaataagtctttctcatttctggtaaatcgctttataatgaccgttattataaagtgtaaaaacaacaacaacaaaaaataataggcgcagtggttcacgcctataatcctagcactttgggaggcagaggcgggcggatcatttgaggtccaggagttcgagaccagcctggccaacatgatgaaaccctgtctctactaaaaacacaaaaattagccgggcggtggtggcgcgtgcctgtgtagttcacagctactcgggaggctgaggcaggagaatcgcttggacccgggaggtgaaggttgcagtgagccgagattgtgccactgcactccagcctgggagacagggccagactccatctcaaaaaaaaaaaaaaaaaaaaaaa

SEQ ID NO: 157 - DNA, 1010 bp, Homo sapiens
cttaaaatgtgaagaaagtgtgaattttagttttgtcacagttaactgtgtcaaagagaattaaaaaaaaaaacttcagattttgtttacatattttactacatttttgctggtataattccttagccacctatgtacatactgctttaagaaatgtttttttcctgtttatttctgtttggtttatattctggttgtctttttctttttgtaaagaggaaacaatgtacagaaaaacaataaactggttgtatggccatagctatccgaaaagcaagagacaaagcaagacaaatattcacacaaaaatgaagtgtgtcctctggagggtcatatatacaatttcttttgtacagatgaaaatcaatcagctgcttagatttagaaatctactcttgctggtctttgtaagttgcatgaatatttgactttgaaaaaatatcttaacgacatggggcaaaaagtgcaatctaaatggtagcctttactaatgtgtgtggaaagaggtgttcctcattatctaatatttcaatgtgttaagagtttaatttttttgttatcattaaaaaagacaggattataaagagatatcaaagcacgattttagataacctaaacggcccagcctatacgaagttgattatatctcgatgtctgtaaaagattgctgttcttggagtcttgaggtcttgtgaattgatttcctgctttctttcatttttttcaatttaagtaataatacatttgttatattcctttcagtgtaagtttctatttggacaattttatgggaacatgtgcattctctatgtgagcttctatcatattcctgttttattagcagaacctaaaggaatttatttaatgatgttgtgacattactgctttttcttttttcttttcttagttcatatttgcattttcgttcaaggatatgcttagcaataaaatgttcttcccaaaaaaaaaaaaaaaaaaagaaaaaaaaaaaaaaaaaaaaaaaaaaaaaa

SEQ ID NO: 158 - DNA, 1199 bp, Homo sapiens
ggcacgagacccattggagatcttcaacctttaccgattcaaaagggggaaaagacttttgttttgacaccagaacttagtcctgggaaacttcaggtcttaccttttgagaaagcctcagtatgtcattatcatggaattgaatattgcttggatgaccgaaaagctttggaaagagatggaggattttctgaacttcagtctcgtcttattcgttatgaaactcaaactacctgcaccagagaaagttttccagtacctactgtgttgagccctcttccatctcctgtagtttcgtcagatcctggaagtgtccctgacggagaagttttacaaaatgaacttcgaactgaagtatcccgactgaaacggagatctaaagatctgaattgcctttatcccagaaaaagacttgtgaaatctgaaagttcagagtctcttctttctcagacaactggtaatagtaatcactatcatcatcatgtgacatccagaaagccacaaacagaacggtccttaccagtgacttgtccattggttccaattcctagctgtgaaactccaaaacttgctacaaagaccagttcaggtcaaaaaagtatgcatgaatcaaaaacatcaaggcaaattaaggaatcaagatcacagaaacacacacggatactgaaagaagtagttactgaaaccctgaagaaacacagtattaccgagactcatgaatgtttcactgcatgcagccagcgtctctttgaaatctctaagttctatctaaaggatcttaaaacttcaaggggtctatttgaagaaatgaagaaaacagcaaacaacaatgctgtacaggtgattgactgggtattagaaaagacaagcaagaaatgatacataatcattctctttaagacaattataaattggatggagctattattcactacttcttttcttagtttgaaaattataaacaaattttaagctttattcaaagaatagatgttatatttctaaagaatttcatgaatatatattctatatttgtatagtttgagggatgctatgttaatgtatttttaattagatacatattttgtaaagtgttactatattttaaagttatttttatatgttttaaaatgtttactcttatttaattattacaataaacagaatttttttttttttaaaaaaaaaaaaaaaaaaaa

SEQ ID NO: 159 - DNA, 434 bp, Homo sapiens
cagaagacataccagtcaatgggttcttgaaatagtcaaggaatgtggcaattcacgctggatgtggaaggtggaaggaaagacaagtgttagcaaatgcagacctgtctgctgtggaacttgaagaccttgctagtagtcaggctgcttcctggcattccaggcctgaraggcttctattttgactcaaagcaaaaacaaatgctatgttaatgtcttcctatgtgtccccttcataagattttggtgaaatcatattaaaagtgcatttctcagtatcactctcagttatttagagatttcagttccccagtaccctggcaagggatttgacgaacgtagcaagaacgtcgtgaactttgagctaatttatatcatgttcattgtctgttaataaataaaagccaagaaaaccagagcaacaaaaaaaaaaa

SEQ ID NO: 160 - DNA, 716 bp, Homo sapiens
ggcacgagcaggattccgtctcacaaaaaaaagaaaagaaaagaaaaaagagaagagaaaagaagaaagaaagaaaggaaattttgtctaatagttgaatttactccatttatatgtattggtataacaaacattttggagcctacatcttaccatatttcatgttgtatttgtattgtaattcttttttattatatggtctgttctattctttctttttctattctccctttctgggaagactttggtatctcttttttatttttcctttttttcctaagggaatggcaaatagtgttctcacaggtttaggagcggtggagtagaatctaagaaactgagatgaaagtacatgaaccatgcaggttcagaaattgacaatgcagcttatggtgtagagagagatttacaacgctattaactttttatgtggattctttgctttatgttaaagtctttctttttgttctcttaaattgccttcacagataatttaagcctgtggctctggtctgtggatcctctttcatcataatcctgaaacatcatttgtcttttttactgatggtacagaaagcaatgatggatgataaaactgatgatgccttaccatgagtcaaggcagcggcaccaaactgtaatagtaaatgtagtaatagtcgtatgttctttagtaagaaccaagcacttcagtaaaaaaaaaaaaaaaaaaaaaa

SEQ ID NO: 161 - DNA, 2503 bp, Homo sapiens
  SITE (2497): n equals a,t,g, or c
ggcacgagcccaaaccccaactctcagacttacctcccaaaccacagatgaaggacctgccccccaaaccacagctgggagacctgctagcaaaatcccagactggagatgtctcacccaaggctcagcaaccctctgaggtcacactgaagtcacacccattggatctatccccaaatgtgcagtccagagacgccatccaaaagcaagcatctgaagactccaacgacctcacgcctactctgccagagacgcccgtaccactgcccagaaaaatcaatacggggaaaaataaagtgaggcgagtgaagaccatttatgactgccaggcagacaacgatgacgagctcacattcatcgagggagaagtgattatcgtcacaggggaagaggaccaggagtggtggattggccacatcgaaggacagcctgaaaggaagggggtctttccagtgtcctttgttcatatcctgtctgactagcaaaacgcagaaccttaagattgtccacatccttcatgcaagactgctgccttcatgtaaccctgggcacagtgtgtatatagctgctgttacagagtaagaaactcatggaagggccacctcaggagggggatataatgtgtgttgtaaatatcctgtggttttctgccttcaccagtatgagggtagcctcggacccggcgcgccttactggtttgccaaagccatccttggcatctagcacttacatctctctatgctgttctacaagcaaacaaacaaaaataggagtataggaactgctggctttgcaaatagaagtggtctccagcaaccgttgaaaggcatagaattgactctgttcctaacaatgcagtattctcaattgtgttactgaaaatgcaacattagcaaagaggtgggttctgttttccaggtgaaacttttagctccatgacagaccagcctgtagttatctgtgtacacagtttacagctacaaaaacctactttggtatttattacagaaaagtgctcagttaaatgtaagtgttattccttcagcaaaatattcactgacccaaaactctttatggcattttacaatgcacacagcctcatgcaagtttagacaagtggatttatactgtcttatgagtgcccgcccctgatatattacctcattatgcaaaaataacatatctttcatgactattttgacaaaagtttaaaacacatatgaagttcaaatttcaggaaccaaggactgccagaaaatattagcctctacattacgcatgcatttagaagcttacctgaaatctgccttttataaaggaatagtatggataagtggaattgtacattttttaaacttgattgccattaaagcagaaattataaggttgcaacaatatttgtttctaatcactggctttctcaagagtatggattgacatattgtgttatgaatgcacatctctcagatgtgttgaagcatccattgcatccattttttattattttcttagttttgttcttggacaaatttaaacttttaaaagattattcaagatgaatttaaaagtcaacccttcacacagtttccctactgtatgtagaatccaggtgctgaaaccaagtgtttcttttcccatgctctttgttaaaccccaattatagataatttttccagtcttaagctctgtccaccttcaagtcaattcataaccaagtttttgaacgctgctatgaattgcactgtgaaaagcactcttccctctcagttttcttttcatcccagccatgtttatcagatccttaagaacattgtatttcagtcttttacatcagtctgaattttggaaaagaatgcaatagttgtactccacagtcagtggaactgttccctgagtccgaggctcatgtgtcattctggcactacatttgcttaaattgctattttggcaacagcacagaaaactaatatttttaagcagagaatcttggcaatgagtgagagatgttaatttcacagaagcacaactcccaacccaacccttaggaaaagccctcttccatcgttacagtgctcagtgaatattaatttagttctgcttaagtggttgctatacaaactttgaatagccacctaataaataaaccttgcatgacaaacctgcaaaatattttatcagctgttattggaaagtgattttaagcaattgcttcctcagtgtcagggcacatgtgaatttccacaccaaacagagcatgaggaaccagttgacatgctgggttgtgactggcagctttagcagcctcggtactgaagccacaccagtgtccggatggaagtctgcatctgaggttgctcagtgtcccggtcattcatttacacattttaacttgcattaaagagctgttcttttctgtggcctagactcttttcactgatctcaaaataaactggtttttttcaaaaaaaaaaaaaaaaaacycgggggggggcccggnacccat

SEQ ID NO: 162 - DNA, 1108 bp, Homo sapiens
ggcacgagctgggtgaaaagtagaatataaactcggtagacttctggtcccttcattggtcatggaatggaccagtgcttgcttcattgagcaacagttctgttgttcagaattcctggatttcacctcacttctgctctccctgcaggtgaatgtgatgttcatgcttgccattcttctgacattcttccacccctttctggtatatcgggaatgccgtacttggaaagaaagtccctctgcaattgcatagttcagaagccctcacttttcagccccgaggatggttttgttcatcttccaccacctttgaggacctcgtgtcccaaaagactttgcctatcccagcaaaacacacacacacacacacacacacacaaaataaagacacacaaggacgtctgcgcagcaagaaaagaatctcagttgccaagcagattgatatcacacagactcaaagcaaaggcatgtggaacttctttatttcaaaacagaagtgtctccttgcacttagccttggcagacccttgactccaggggagatgacctgggggaggaagtgtgtcaactatttctttaggcctgtttggctccggagcctatatgtgcctggatccttgcccacgggttaaattttcaggtgaagagtgaggttgtcatggcctcagctatgcttcctggctctccctcaagagtgcagccttggctagagaactcacagctctgggaaaaagaggagcagacagggttccctgggcccagtctcagcccagccactgatgctggatgaccttggcctgaccctggtctggtctcagaatcacttttcccatctgtaaaattgagatgaattttggtgttgaaagttcttcctggagcagatgtcctagaaggttttaggaatagtgacagagtcaggccaccccaagggccatgggagccagctgacctgcttgaccgaaggatttctgacagactatctttggggatgttttcaagaagggatataagttatttactttgggcatttaaaagaaaatttctctcgggaataattttatagaaaaataaagcttctgtgtctaaggcaaaaaaaaaaaaaaaaaaa

SEQ ID NO: 163 - DNA, 930 bp, Homo sapiens
  SITE (137): n equals a,t,g, or c
ggcacgagccaatctctgttttcagagattgttttattatatgctttaagtccacataaatgatctcatactgaatgtgtcactgtaggattttttcttcaaaattgtatttttgaactttctgtatatatatatanctttaattttaaccattttatgaattgtaaagtttatgtatttccccatcttaatatattattcccagttttttgattacaagcaatgtaatctaaaagtacatttttgtatggatttcttctgtatatgtgcaatattttgtctagggtatatacctagaagtggaattgttgttatagagtgtgtgctttttcagctttaccagatattggtaaattgctgtctgaagcaaatgtagcagttcacactgctgtctagaattttctcatatccttattagattttgaattgtcagaccctgcgatttttactcttatgatggctgtgatatgctttttgttttaatttgtacttcctttattatttatggggataaatatatttccatgtttaataagcatttggatttgttcttctgtcaacaacatatataaatctttgtcaccaaatcagcttttttgaggtatgacttacatgtaataaaatgtgccaattttgattgtaccattctctgagttttgacaaatgtatgaaactatatatccatcaccacaattgagttacaaaacattttcagaatgccaaaaaatgctccattgtggtaactgtcttttcccccattgaattaattgtcttggtacaatcgttgaaaattggttgaccacattatatgtgaatgtgtttctggattctattattctcttgatctataattatgccaataccacactgtcttgattactgtaactttagaataaatcttgaaagtaaaaaaaaaaaaaaaaaaaaaaa

SEQ ID NO: 164 - DNA, 794 bp, Homo sapiens
ggctaggcagagtgacctttcatctgatgctaagcccctacaagtttgagaaggtaagaaaagatgaaggagacatatattaggtcagctcttacttttgaaaatgttttatttgaagaaacacctgtagcattgaggtgactgaatgcctccacttatttcaggaaaacgtatccaaaaaaagttgaaatatttggacaactttttttttaagtgccatcgatttccctagcagcattctaaaagatagcaagtaaaatgatgtttgttatcctaaatgctttagttttaggtcatttattaattttcttacaggtgcactttctagtacatgaagtatcctttgtaattaatgtgtgccatatgtttattcccatttagtataactataaattatattttaaattatatatttttaggatagttatattttttttgggttctacgacattgaagttggactagtgatttatttgaatgctgaatcctagtataggggaatataatcttatattttaacaggggtcctctatgggaaaataggatgaactttgtttcccagaaattgttaagtgatgaaaaacttcaaaataattttcctgcattttctgctttatttacatgtaaagtgaattccctgaaaattggatttaaaaagcattctccttcaatgtgcctttaccttggagctttaacaacttttctgttaaatatgtagttttttattaaacaatgttattaaataaaaacatttatccactgaaaaaaaaaaaaaaaaaaaaaaaaaaactcga

SEQ ID NO: 165 - DNA, 1145 bp, Homo sapiens
ggcacgagaaacagtttaaattctggatataggatctcctatagcaaaacattttactttcatttttcagtatttgctgctttctagaattctattagataagctatgtcatttttctgaaaaagaaactgagttattgagtgtattaagacaaggcactgagaactacagtgtcaaaatcaaagggcataaatgggcatggcagtgctggtggaaaaatctgtggtactggtgatctggttagggcctgttgcacaggctgggagtaactggtttgctgtttcaagcctccaagagtaccttaaacaaggtgatagctcctctcttctttagcattatattcctttagtcaacaaagaactttctccactctgctgcccagctctgagagtatctgagatgagaataggatgtgtgtggaggggcttttagggaagaaagggtcataaatgaatagaagtacagtctgaaacatgaattaaatatccttcctcaagttataaaggatactttaatagaacacagtctccagaattcgctgctatcacaccaagtcatgctgttgccctgtgacctcacacttcccattccatggccttgtcttggcagggagtaaaaaatcccacttctttttactttagtgggtctcaactgcagcatttcagaaacaaattttgatttgacactcaggagaataaaaacaagttgagggcagaatgtatttggaaaagcttaagacaaatttactgatattattttatgatcatttaggattacagatcaatttacctccataaatctttgaattgtcactgtgaccacaggatgaaaatcctttattagccattttataggttaaaacaaaaaattgactacacagccgacttccctcagataactatgaagtctattatgagtactgaatgaccaaagaacatggaaaaaatgcatatgaataaatactgaaatgtttatgaaagatatttatgaaagatattaagacttctgtgtttaggtatgcacatatgataaaataaatctaaaaacattaaaaaaaaaaaaaaaaaaaaaaaaaaaaaaaaaaaaaaaaaaaaaaaaaaaaaaaaaaaaaaaaaaaaaaaaaaaaaaaaaaaaaaaaaaaaaaa

SEQ ID NO: 166 - DNA, 1927 bp, Homo sapiens
  SITE (1899): n equals a,t,g, or c
  SITE (1922): n equals a,t,g, or c
ttacatttttcatggagtccctgcttagtgcagtttccattggaatgggtggaagatgataaagctctcttttttatctactaataatgtgattgcaacttaaaatagcaaaacccaactctccctgtccctccaatccctctcctaaaaagttcagtttggaatctcattctggaaaagatggaatcgcatggagattctctagctgttaggtagacctaaataaaaagttctcaatagattcctcttttgagtaaatataagacctcttgtagctacaatgttttagagcatgtttcatcttcatttttaatatcctgaactgaatgatagtgtttttttagatgaagaactgatgtcagcctgccaggtactgtaatttattctatcatattattatattatatatcaagtaggacagtgaaaaatgtttccttgcaaacttgtagtccagtatcagttacttcctatttttatccttaaaagaccattgcaaatcagtgtaagggtttttccagtaattactcacagcactttgttaaagtttgcaatttcttcagccatttaataatatctttctgtgaagaaactttgctgagttaaccataaatgttcattcattgactgggtgggatgtgaatggaatgttagaaatgttgtgtgaattgaagttctgtattcattatagatgtagcccttatttaaaaaagtgaattccatactaaaactaggaatgaaagtgagagatttctaaacttttgcgaaagtgggtcattttttgtttgactataatagcaggaagaattatagcaatctgtcattttacctgaaacagacaagcctatgtattatgaatactttcaagcttccctttggaatatacaagacatgcgtttggagttacctttgtttttctatcgtaaatttagattctggaattggggtttggtggtgcaatgtgttgctcacaagtggccagaactcctattcctaaaaggattttgagatggaggaacacatatttaattcccctttatgccttggttcttgctcctctttccacgttggataacaattttttggttgttttgtttaagttggtgctctgaagcttaatctcagtaccctttactctgaattgtcaaattttgataaaacgtgccattttctttggtaagagaaagcaggtcttaatgtctgccagaacacaatttatatgccttattggcttcattaaacttttagaaaactttagcatttgttacttttttccattgcatttactttcaaatgcacctaatgaattygtcacccagtcgcaacttttcccttctctgtcccattgctttctcctttccccgacgcacagaataaacatgaagctcagcagtagaagcgtaatgatttccctcaggaaaaacttctgacagctaggtttttcaagggtttccctgtgctagctgagatgcaaaacaaatcatggaagattgcatacctgtgtggtattttaaaaacaagttgactttttcagtttcttgaacggttaagggtggatttaaaaactagacagtttagttttggggaacagaagctctcttcgtcttaagccagattctctgattcttttagacgtcatagctccttagttctgctcctgtcgccctaacttggcatgggcaagttgaagttcatccttagactgcagcgttctgagcatggctgaagtattaaaatgtttmatattttttagagcaaaattgatggaaagcatttggctgaatctaaagacctgcagtcagattcttcaatgtggtttacccaactggagtagtgataaacaccttaatcataaaatgaataaaaacaaaaaaaccaaaaaaaaaaaaaaaaaaaaaattnctgcggtccgcaagggaattcantggcc

SEQ ID NO: 167 - DNA, 1316 bp, Homo sapiens
accacgctcagctcagcttcaacctgtctgcaaagaaaagttttaccaagaccagaagttaaatatgrcatttcctaggtagttgtaactctaacatagtttaaaaagtatgtggcttcagattgcctatactttgttcacaaacgtgtgatttagatatgactgatttagaagtgaacaacttggtaacatccctagactccactcatgaacgcagaattattacctgctgtttgctttctgaaagaatttcagaaatcagagcaaatgtgtctttaggcagattcagctccttttaatatttttctcttggcccactctctttgcytcccctgaatctgtgtggtactatagcagctctactctgtgcaccatgctaggaagcttcctttttggcagaatatgtttggcagcaaagctatagagacaggtgcattcagaacatcctgggcaccagtcatgagtcttactgtgtcaaaaatctgaaaacacttgctgagaaccaaatttattccattggaaaaaccctctgtggagctataagcctcttggactcttcttcctagattaaggcttgcatttccctccctgtttcagtaaaagatgatgaaagccactatcaatcctcactgctgagtggcagggagaagcagcaccactctcagctcttttctaatcttgtaacttagtgctagaagtctctccaggctattaccatgggcatttgttctctgttggagctgtaagcagatgaacccaagtagagaagatagatcttggaaggagagatccattgagtccagaagccagatcagcaaatggaggaacctcggaggtgaccagaaagatctccatcggttgcccaaggctgtaagtagtgatggttttagcgatgaataacgtaattggctatgaagtactgtggcagagctgctgttttctgaaggtgagaagccatttttagctcagagcaacccttaagagaacttttggcagattttgttggcattattgaaatatatatagaaaagttgctgattgcaatggttatgggaatggaatttaatgacatttgtaatttattacactcattggtttttattgattatagtattgtctgactttttattttctactatggttcctttagcagaaaagtaacttttgtgcatatattgaagtggtttttcagctatgaattctttagggtagaaatttatttagcaaatgtgaattcttttgagaaagtatgaagttttgcagaaattgactgtgaaatgtcagagaaaaataaaagtcacttacttgaaacctaa

SEQ ID NO: 168 - DNA, 1340 bp, Homo sapiens
ggcacgagtcaagatgagttggtagatcatcgtttgacagaaagggaatgggctgatgaatggaaacatcttgaccatgcgctgaattgcattatggaaatggtagagaaaacaaggcgctctatggcagttctgcggcgctgtcaggaatcagatcgtgaagaactcaactactggaaaagacggtacaatgaaaacacagagctgaggaaaacggggaccgagttggtctccaggcagcacagccctgggagtgcagattctctcagcaatgattctcagagagagttcaacagcaggccaggtacaggatacgtacctgtggagttttggaaaaaaacagaagaagctccttcggccccatctccatcctcagcagatgacactgattggcctcacggggacttgggtaagcaacaggcggcattcaggactcttctcaaccctgctgttcagacttgataagatctcagagtccacaggaaagaagtcactgttgcaataaaagcacccgtagtagcaaaaacataaacaaataaaacttcccccacatcacagatgattttggacaagattttccaaccttgctggctactttagtttgggacctgttttttttctcatttgattttgcttgtgcagaaaatagtttccagcacatggattgatctgagagagaatgaggctcagttgtggatagtctgttttctctgagcatgttggccaactagtatcgtcaaattattgagtggatcatctcttggaaatgcagaacttctgccaccacttggctatttgcacagtcatcttgttctgtgtccttttatctctcagaccacacacatctggaacgctgtgggcatcttctgcccatgggctccatttggcacctgctgagccacagttgtcctgctggatgtgctgtgcaggttggtaggacttgccccactgtcaaggcctggtctcatctgaaaagccctcctggacctcaaagaattcttcagacctcatagttacaggtcattatatctactatgttgatttatcatcaggcacacaacttctgtttccttctcttgtgttatctgatagcgtccctccttgagctcatcagaaaggttttatgaaatgtgaaccattttgggaaaagctgatcaatttttcttcctagcttcccattttcaaatgggacatcactcatatccctttcagaatgttaggaactgcctcccacattcttccctgtctttttgggttttgttttttgttgttgtggtggttttttaacacaaagcctgggcaacagagcaaaactctgtctcaaaaaaaaaaaaaaaaaa

SEQ ID NO: 169 - DNA, 2097 bp, Homo sapiens
ggcacgaggagagacacagcaagccatcaactatggttaattttgaaaaatggaaaagttggattgggcttacagtcagcactcagttatttgcaagtgtatttctttgctttgtagagtatttttattgggtgttaactttgacagctgagagtgggcttgcaagaacacaatctaaaagtgtgtttcaattgagtatctctctagtagaataggagttcatcctgaaaagctgtgactcattaacccagtaaacatatacaaagtaagcttaaaacactataaacatgagataagggaaaatgaatccagagttctcatattaataggtagtgaaacaataaggctttttagagcagactttgttggcataaaataacctggcttctatccctaaccctttcctacctttcctctccgtcaacatgtcctcatactgaagacaaacttgtttcaatgatagtcttcattttcaaaaacaaaaaggcaggcagacagaaataatgatgttttcttgcactaagaaggtactacttgtacacatatatcaaaacctcattctgcaaagtttttgaaggtttcaatgggaaatttgattttattacaaaataaaacattttttaatgttaaagtttatatattccatgcttgttttctcattcactggcatggatgatcaggagctgcctatatatgaaggcagaatcagactatcaggaaaggagctggccagggccacagccagtcaagatctctgagcaacttagagacattggtgtcattatatgaagcttgcatttaatacatttatacataatacatttgtacatttaattcataacgtctcttggtcacagatgccttatatataaaataagttgccagatctctaagattgcctagtacacctttgtatctcatttgatgtgatacccagaagagatcattgtttttgtttttgtttttgttttttcaagaagatccttcgtgatcaccatgctgttctcatggtaagaactggagttatgtttttaaatttggaaatatgacattttatgtagcactttataaaaagtgaaagcgacaaattccaccgctgcttaatactgctttgcttctttttattgacatgatagataaatatgtatctacacagagtaataataataaaccacagtaaacattctatttctctatggtctacagcatgccagtaaataatatgtaggccaataataaattatcaattacacatttttgtgttaactaattaaaagcatagtgtataagtgagtacactctaattaacttgcttctgttgcactttagttttctacctgcatatggactgcatttttttttttaacacagtcagtatgtagaatgggatgtattcttctgctgctgcttattaaataaagaaagcctgagtgttcttagatggggttattctgagatgagggtcttagcctacagttctttttgaaatgaaaggtgctttgttttttaattatattcatcttttcagggtaaatttgtttttctgagtttctcgtaatgctcatttttacatgctgctactagcttttttttttaaaaaaagtaaaagttgctgctttctaaaatattaattgccttatatttgaaagtgccattgcaatcgtaagtagactatgtatttcctataatgatgtctgatatttaaataggaaatcagacaaacaatattcagaaagtttaagcatataaactttttatttttaacttgcctaaatccctgtattccaaaacctgctgcatcataataaatatatctatatatatttagcataagacgtgatatttttaatttcttttttaaaaaattatatttgtctcttagagttaaaattttctttatataatattgtcatatgtcatagttttaatacaattcacatgatttctatgtttcttaatgatattttgttgtgtaaaattgatcggattgattaaaaaacaaattctctggaatttgtgcgttcatgctttttcgtattctttatggcttttaaataaatatacaatggttaatagtaaaaaaaaaaaaaaaaaaaa

SEQ ID NO: 170 - DNA, 958 bp, Homo sapiens
ggcaagggaaatctgtaacctacatactgagctcactgctgtcaccaaagctttctacctgtgtctgctgttgtatgctaactgggacattgttcccaggattccatgtacgattgtgggcattgtcacctgcacaagcacaagaatgcctggtcgggggtgaatggagctgatatccatctcacactgagtcaccaagtcctgtacttcagagattgacccttcccatacagggtacatttttctaatttgcaagaaaggtgccctaagagctagtggcttccctgattgctcccctaacatcatgtggttaaattttggtatctcagacaagtagaggctgcagatctgcagggtcaattggcttcagatttagtcaatttcttgttttttaggcagtgaataaatatgtggttcccctcccccccagtttttttcttaaaatgaagctcatcaaacaaatgtaccattctgaggtgtgttctcaagtcatatattataattcatttcactcaaagtatatgattaaagctcattcaaagccctaagagttgggaatgaaggaagaattgtaggatgttctgctgtgccacaagacttaatttataccatttattagtcttaccaagtacattgaaaggaaaaagttgttgggggccaggcacgatggcttacatctgtaatcccagcactttgggaggctgagtggggcggatcacttgaggtcaggaattcgagaccagcctggccaacatggtgaaaccccgccttattaaaaatacaaaaaattagccagctgcagtgacatgaacctataatcccagctattcaggaggctgaggcaggaggatcgcttgaacccaggaggtggaggttgcattgagctgagatcatgccattgcactccagcctgggcgatagagcgagatctggctcaaaaaaaaaaaaaaaaaaaaaa

SEQ ID NO: 171 - DNA, 1302 bp, Homo sapiens
ggcacgagatatgtacacatttatgtgtgggtgtacaacatttttctgtgattatatgggtagttttgaaagaatatacttatgagccagagcaagaaattggaaccaatatgtgtagaggttattgcttttctctgcttagtgtgtcttggaaaaaagttctttacaggtaaataattttaaataccaatacccttagtatggatcagcaaattaggggctctgagaagtcctttcattacaagagttgtttagctttgatttattgttttctaaacttatttgagctgggatgctttttcagagcagacacattctagtatattcttgttttatctgcactatagatatgtattgttacataccttcagcttggcaaggcagactaataatcttaaggaggttccaagacttcccttggtttaatgagaacattcaaaaggtgcaggcatagggtaaggtatgtttgaggacttgaatatctattaagaatagacaaaggattataatgtggtagaagagtttagcattcatagtctgtatagatcaaactgtcaaaacttctcaggtcacatgatggcccttaaaccaggtaatttctgtgtaacgtaagccatgtttaaaattgcttttttcttgacaactattcagaagtatatgtatgataaacattttttgagtgcctagtacctactagtcttacatattctgtggattactccacataaaatctataataaaatccacagaaagctgttaaaatctttcctatttttttttgactcaactttccatcccctgaaatcactcacaagctgagtttgttaataggctctcaatattttatttcttatattctggccttgtttttagtatttcttaaggtgattttaataataattaattgtatatgttttactgtactagacttagtaaaacataagaaagacgtataacatagttgaacaactttaagttgctctaagaagtttcctatttgaggctgggtgccatggctcacgcttataatcccagcactttgggagaccgagatgggcgtatcacttgagatcaggagttcaagaccagcctggccaaccaaccccatctctactaaaatacaaacattagccgggcatggtggcacatgcctgtaatcccagctactcaggaggctgaggaaggagaattgcttgaacacaaaggtggaggttgcagtgagccaagatcgcaccactgcactccagcctgggtgacagagcgagactcctgctctcaaaacaaaaacaaacaaaaaaaaaa

SEQ ID NO: 172 - DNA, 558 bp, Homo sapiens
ggcacgagagaaataatctctcaagctcttcgtacaaagtttgattaagagagagtgtctgcaactctctgctttgctcccagctgggtctgctgttctagtgagcgccagcagttattctcgttttctgcagtattcccaggctgccaaaaggctctgctctgtaagctgagaaagactcaacagctacaacactggtgttcacagcagcaaggtttatttcctcacaagatgatattcctgggtttgcatacgtttgctcttttcagtgaaccatgtcctctaaatgtcaccttgcttccattcagcacggtctgtgttccgactgtccaggggcttccaggaacagcccacagattgatggcttgctgaaagctccctcgttatctttcactgtaaattcctttcatcagtaatctcttgtgccctggatgcagcacttctttgtacgcgtgctgtgaaataaaatctcagataatgtgaaaaaaaaaaaaaaaaaaaaaaaaaaaaaaaaaaaaaaaaaaaaaaaaaaaaaaaaaaaaaaaaaaaaaaaaaaaa

SEQ ID NO: 173 - DNA, 1679 bp, Homo sapiens
gatctttaggtttttcctatagaaaacattcttcctccatcagtagccctttatttgatattcagaagtggaaagctttttcattctccagtagaacttttaaaaattgttacagatacctagctcttcacagatatcatgtattgtaaacagtcatgtgtcttaattttattttctctatttgagtgcataattatcctaataatcccaaagacactgacaactcaaggaacagcagtacagtactattagaagttaagtatgttgttgttatttcacatttcatttaattgtggataaatgttagacatctgttgaaataagctcatatggtggaaacgacaactatattatgaattattttcagaaatggatctttgaatagcagatcaggatttaaataataaaattatctatgaatcacttttatggtcatacatatatgatacaaatccagagttattggtgcagaaatggctacccgagagcttggtaaatttgccttggtttcttatgttaaatgtattgtgcttcccttctgtctctagaatgtggctcttcagaagacagacaatcgacatttaaatttttccaaacaatgaaaaactaaattaaaaacattgcttgatatttcatttaaaattgcaccttgcttaaggtttactgaataactgaaatgtcagcaatttaaaataaattcaattgtgtgataaaatatctcacctataatagaagaaaaggaaaatcatattatttggcaattttgcagcattgtggttgcctaacaggtatatccagcagatgagaaacagtatgaaaggattgtattaacatggtaagttttgccctaaggaaaacgatcttgcattctggattcttgcagcaaagtctcagatacttaatacgttttcttgktttatcatctgktctatgattcggcttcactttgtgtggktattgaattatgtaacagagatttggktttcccaaaatgktatcacatttgaaactatgattgctttgkgktcagtccttttggaacacgtagcttycagcttaagggtagaggaaatatatacctaaaatcatcaatacatgaaagaaaaaggatggaaactatgtcctcagttttacttctaccaaaacatccctgtatgtgtgtgcatgtatgttggcgtgtgtgtgtgtgcatgcatattagtaaatgtgtgtttgcatgtgtgtgttggggagtgtatgtgatctgggtgtttgtttatctctgttattattcccctttagctttattttagtcaactctacattatgatgaatttcaaaatgaagctgtattaaaataattgtaatataacaattcaatctcacatgttactgcagatagttaacttttgctgcaatctattgtacatttgcaattttctgtgttagtaaacttagcagaatctggttawttattttwgtgtaggcttaatgttcactgaaagataagtcaattactgytagtaaaaaattaaggtactctcactgcagagatttaagcctgggcctaatgtgctgtattatgaagccttgtgactgaaaaatatgtttacatatgttgtctatttttttaataaacttttatagctggtctatttgctcagtaaaaaaaaaaaaaaaaaaaaaaaaaaaaactcgag

SEQ ID NO: 174 - DNA, 1335 bp, Homo sapiens
ggcacgagaaatgataataggcctcccccaaaactcagctgcttttgtaaagctaatgggaggccatcaggctgggggcaaggaggagagcccggatcctgctaaggtgcagacataaacgagtatcagccattattctggaggttataagatatgcaccttccccaattacccctgcaatcacaccattattgtagattggcccttagagtatcttttcaggttttttggcatgtctgacactcatggctctacttggacccaccaaccctgctcctatggctccacccagaagccattcagcctagaggacagctctgaccccccctgtgatttcatacaatcagcagcaagtaactgttacctcaccatccccaccccttctgccagactgcctttgaaaaacctctaacctgtgagcacgagatgattccagaacaaactctgtctcccatgtggcatgaccagccttgggtctcttaaactttttctccactataatgccatggtctttatgcagcaggcaggaagaattcaggtggttataattccgtatgtgctttttgaacatttttctactgggctattgctctcttcataatgatttttttaacttctctctataaggaactgatttcatctgaaattgaagagacaatcagagaaaaactatagaccactcatgatggttgttatatgtgcttggctgggccatgggtcccagtgtttggtgaaacacagcagcagatgtccctgtgagtagatgttgctttgaaggtatcttttagatgtgatgaacatttgtcatcagtagactttgagtaaggcagatagcccgtcacaatgtggatgggccttatccaattagttgaaggcctttgaaaaaagactgagatcccaaacgaagaaggaattctgcctccagacagccttccaactcaagtagcaacattacctcctccctgcggctctagcctgctggcctttcctatagacttcagacttgccagccccacaatcatgtaagccaattccttaaaataaattctctgtcctgtttttgccccctctctctttctgacagcacacacatgccctcttggttctgtttctttgaagaaccccaggaaaacacacaaaggaaaaacaactcgatagacagaagattcttcaatgacaacaatggaagccatcttcaccattcaactaaacttgaatgggatattatcaaacttaaaaaaaaattatcaactgatcgtgtaatcagtttcatcttttaagacaggaaatgaaataaagtatttacagatgaatgtaaaaaaaaaaaaaaaaaaa

SEQ ID NO: 175 - DNA, 563 bp, Homo sapiens
ggcacgaggaaagatttaataatcctgcctcttttgaagcctgaaacttacaatttaaagcctgaaatctaccataaggaacttggtaaattgtgtcagataccatgaaaatgcatcttttcatagttaaccacagattgtttatgtaaaggcaaattggtggtcaggttcaaggtaaaatggattattgggttgattagtagccaaaaactaaatgcatgttcaggtcaaaatgaatttgtttgttttagttggtgccatttcctttatattcagaactacagagtgtgcatttattaataggatgaaagctcatgctgaggattgaatagggtggatgtatatattttataaactcaagttgcaaaatatgtaaagtcactactttttaaatagaatataaatgttaaaacagacaaatctatgttatatattttttaatacatgtatcagacttgttagttgaatgcagattactttgctttatggaatttcataacttttaataataaagcagttgttattggaaaaaaaaaaaaaaaaaaaaaaaaaaaaaaaaaaaa

SEQ ID NO: 176 - DNA, 2418 bp, Homo sapiens
  SITE (138): n equals a,t,g, or c
  SITE (171): n equals a,t,g, or c
gctcgtgccgctgttgaccccactgagcagtgctaagtgttggtttagtggatgttcgtggaattgctgacccatccaagggcgtcctttggagccagtggagcctgccggcgcatctraggggcagaatgctgctancacttgaatctgggatctcgccttattctcaantagcaaggcatctcgacaagcatggtctargtctggtggccagcttgccartacctgagccggtcgggtcatctgcctctgagggaccgtcctcaccgagctcctgcatcccttgagtgttgatcaggaggcgtccacagcattgttctcgcctctgaatgatgcttctttctgtgttggagcctggcgaagttgtgttttcaagccctttactttttttttccaagtggggtaggagcttttggcagtgtttactttacctagatggcttatataatccagtaagagatgcaaagataaaattgctgcggttgttacagaagcatggcggcctccagactgacccattggttgccctttagattttgtaaggatgcggtgctggggaggtggtgcttccctaccccctagaaatgctgccttccaactaccactctcccagatgtgacccttgcgattatttcctctgaggtttgaggatgaagataagttggagggaaagagagtaactaataggggatgaaatatagcagaagctagaagaaagcggtgaggtgagagagatgcatctgcacgttttcttcaacagcaccaggtgattcagcatattcctaattacctttcactattcgtgtatataagatcgtttacttgcataatatatcatcaatttgacatattcttaaaactagagggtgtgagaagcacagcaataggaagtctctccacaaactaggggaacacaaatggggtcattcacgtgcctggactgtcactatgtggctgtcacgtgaagtgctggtgttgatttccatttcagccagtgggtagctgataagccagtgccagcatccagcatgagcagatgtcggggagactgggaagtctccagcgttactgctctccttcccttcatgataagccagtgccagcatccagcgtgagcagacgtcggggagactgggaagtctccgatgttactgcctgccttcctttcgtgtgaggggctgcacttgcttttcttgtgatctgttagtggacgaggtcttccaaggaagtgctttgcacactttctttgctcctttttacagtctttgtctttgcagcaagcaaatgaaattaagccactttgggataatgaacattcagtataattctactttgtctcattttggatctcactgttgtctttataaaaatggcacattttacaaagtagtttattcttattatactttctgctggagagtgccttgaaataaaatgtgagagtattctggtactctgtgttccagatgcatgaaattgggtgaggaataacccctagtctggaatctttgtgaagcatagggttattgcaaggcaaatgggaactaacacatcttgccatttgaatcagggtctccagtttctagaaaaggcagacactggttgggaccaaagtctccatggcacatgactgaagactggtggtcgtgtgtgtgcggagtccacrgaagcctcggggaggtggagctgctccttccattccgtcaggacgtgatctgaaaacatgtagagaagatgagttgaggacagcttttctaaggcaatgtgatgtctttgctttcttatttctctttctctgcgttgttagttttgaagagtggaggagctaggggctccagaaagaatcttacacatgtgttgaagacattgatgtcatagggagcggggagctgcattcccttctgggctgttactgctaaatctcagtatgaacagaccaggcggaaagcttggtggccaagcagtctgtgtgcttccccgctgatggagaacgttgcgttgttcacaatagggcctcatgggtgtagccgcatggcagacccatggctggcgcagctgcctgttgccgtctgtcttcagtaactgctgctctgttaactgttctattctgatactacgcgtgttgttttttacaacaggtatgtttttgtttcagaaatatgtattgcttttctcatattttttgcaaattgtattgtcaacatgggtcatttaaagtcctgtatgaaccataacctgctgtggtacctttgtacatgtttgattctgtattctttattccagtgtggcatatgtgcccctctgtatcttttgagaagtgcggaataggttgcttctaccacctgttcttaatgtaacagtaaaagttttcacatttttctcagaaaaaaaaaaaaaaaaaaaaaaaaaaaactcgag

SEQ ID NO: 177 - DNA, 1308 bp, Homo sapiens
  SITE (1291): n equals a,t,g, or c
cccacgcgtccgcccacgcgtccgcactcgcgctcggctcaccatgtgtcactctcgcagctgccacccgaccatgaccatcctgcaggccccgaccccggccccctccaccatcccgggaccccggcggggctccggtcctgagatcttcaccttcgaccctctcccggagcccgcagcggcccctgccgggcgccccagcgcctctcgcgggcaccgaaagcgcagcgcagggttctctaccctcgagtggtccggcgccagctgccagtcgaggaaccgaacccagccaaaaggcttctctttctgctgctcaccatcgtcttctgccagatcctgatggctgaagagggtgtgccggcgcccctgcctccagaggacgcccctaacgccgcatccctggcgcccacccctgtgtcccccgtcctcgagccctttaatctgacttcggagccctcggactacgctctggacctcagcactttcctccagcaacacccggccgccttctaactgtgactccccgcactccccaaaaagaatccgaaaaaccacaaagaaacaccaggcgtacctggtgcgcgagagcgtatccccaactgggacttccgaggcaacttgaactcagaacactacagcggagacgccacccggtgcttgaggcgggaccgaggcgcacagagaccgaggcgcatagagaccgaggcacagcccagctggggctaggcccggtgggaaggagagcgtcgttaatttatttcttattgctcctaattaatatttatatgtatttatgtacgtcctcctaggtgatggagatgtgtacgtaatatttattttaacttatgcaagggtgtgagatgttccccctgctgtaaatgcaggtctcttggtatttattgagctttgtgggactggtggaagcaggacacctggaactgcggcaaagtaggagaagaaatggggaggactcgggtgggggaggacgtcccggctgggatgaagtctggtggtgggtcgtaagtttaggaggtgactgcatcctccagcatctcaactccgtctgtctactgtgtgagacttcggcggaccattaggaatgagatccgtgagatccttccatcttcttgaagtcgcctttagggtggctgcgaggtagagggttgggggttggtgggctgtcacggagcgactgtcgagatcgcctagtatgttctgtgaacacaaataaaattgatttactgtctgcaaaaaaaaaaaaaaaaaaaaaaaaacycggggggggcccggnacccaaatccccccaaa

SEQ ID NO: 178 - DNA, 1009 bp, Homo sapiens
ggcacgagattttattccccatacttatagtgcttgacatctggtaggcactcaatttgaataaataggtgaggggatatacaaactaaaactatcacttctctcctccacctgtcatttcagtttttcttctcgattaatggctttattgttacatttgactggtttaaaatgttggggtcatctctggcttctttgtattactgtgcacactcaggtagagcctgtatgttcatttccctttgacatgttcttctagtctattcctcctccgacttctctaattgagtctcctttgtcagactactgtgataacttcttaatggggttcactggcccccacctcaccttctgtttttcaaatctcaccagttataggacacttctgaacatgtcacactcagaattgttgatgtcttttgagttcaacctatgctaaagtgcactttttagcatagaattaacagcaattgatatttggcttcatcctgcttttctgactggattgtctaccataaccttttatctcctttttgctttagccagtccggactgctacttttcctgaatatggctggaatgtcccactgtatctgtttcaccgcatctatgagtctaagtcctatcttatctattgcacaaatatatcatgcctactatagaccaggtattgcccttgacactcaggctaaaaaggtaaatgacagggccgggcgcagtggctcacgcctgtaatccagcactttgggagagcaaggtgggcggatcacgaggtcaggaattcaggaccagcctggccaacgtggtgaagccccatctctactaaaggatacagaaattggcctggcgtggtggtgggcacctgtaatcccagctactcggggggctgaggcgggagagtggcttgaggccggaagacggaggttgcagtggggcgagattgcaccactgcactccaacctgggcaacaagagcaaaactctgtctcaaaaaaaaaaaaaaaaaaaaa

SEQ ID NO: 179 - DNA, 561 bp, Homo sapiens
cgaagctcgaaattaaccctcactaaaagggaacaaaagctggagctccaccgcggtggcggccgctctagaactagtggatcccccgggctgcaggaattcggcacgagacctcctgagtttccatgctcctttctgtaccaggtttaaatgtagtcttctggagaagtatttttgacattgagctctgggacaggacaccttgggtttgtggactgcagcccactatgatgttattacttctctggccaggcctccagtggaagtgcacaggcactcccaatgttgttaatgctctgtcttccatttgttctggaatcctacgtgttggtctgtggttccatgcattagctgtttgtaaataatgcatttgcatactgaaaaaggaatgccacctgccacagttgatggtgaggaagctccttgacgtggtgcaattttgatgagatgtctctgggggacacgaggatgccctaatgatgctgacttgtcatggttgcagcatttgaacttttggtgttaaaaaaaaaaaaaaaaaaaaaaaaaaaaaaaaaaaaaaaa

SEQ ID NO: 180 - DNA, 1718 bp, Homo sapiens
tttttttttttttttttttttttttttttttttttgccattatagttgttaacatttttattgcatatttacaatgtgtggaacattataaggatttacagtagaagccaaatttcccagcccttaaaattttaataggaaaaatcgaataaaccatacatatttttgaaaatgagcattagaaacacacagatgattataattctatagactaatacaggtgaatgctgtatggaatagaacagctgggagaggtaaaagagtggataagagagtcatcagagtgtgaaaaaactacagctggggggtattgaataaagagacaatattgaaaatatttttaaacggtaaaatgtcccggtaaaagcatagcttttcccccttatgcaaaacttgtgaggtaagaattttttccccaccccgttttctgctcttctggccaaccatttggggggacttccctgtcccaggtgactctctctcacatagctgtaccttggggcttactagcaatacatgctttccactaccccctcaacctcatcacagaaataaccttttctgttcaatgatcagtcttactttacctactgaaaacgggtggtgaaagttagtaacataaacaaaccagtgctgtttcttctagctaacatatcaccatggttgggctttaacctttcaaggagtgaaatattgctaaagtttcaggcataggaaccccttgaggagctgtctggggcagacaggtctttgctttcctcagatagttccaattgtcatccttgaccatgaacaatgccattgttattccaaactcacttcttctaatacttcaatatggatcataaaaatagtttacacctttatgcacatcaaaatacaaaatacagggcacaataaaactgaactggaaaaaggtatggcagtttcttttaaaactaccctgtgacccagcaattctaatccaaggaatttactgcaaagaaatgaaaacctatgttcacaaagacttacgtaagaatggtcatagcagctttatttataatggccaatcctggaaacagcccaggtatctatcaataataggaaattaagaaaacaaactgtaatattgtcatacagtggaatactactcagcaataaaaaagaacagcaataaaaaaatgaagccttgtagaaaagcgtacatgttgcgtgactctatttatataaagttttagaacagaaaaatcttatggtagaaaaaggaacagtggttgcctttgagggtcaagtagggacaggaattgactggaaagggcagtgtggaaactttctagggtggtgataacgtttcctatttccatagcactatatgcatttgccaaacctcagtgaacacattttctatgcacttcattgcatgctaattttatgtaaaaaagccaacaatgaactctagttaatgatatgcaatttaaaatgcatcaaataataatatgaaatgatgaatggatatgtgacaaagcaagcataggtaatgctaattagcatctaggtagtgagtacactataaaattattaactttttaatgtatttgataattttcataacaagatgttgggtaaaaatacagggtgcaatgtttaccaaatagttttgctgagaatttcattactgattttatgacagtaagatcatcaaattcttctaagtgtccattgagacggacgcgtgg

SEQ ID NO: 181 - DNA, 422 bp, Homo sapiens
  SITE (407): n equals a,t,g, or c
acgcgtccggtaagggatgagaaagtacctgatgggtacagtgtacacttttctggtgttggttgcaggaaaagcctggacttcaccacttcgcaatatatccgtgtaacaaaactgcacttgtacgccttatatttatacaaatttaattttttaaaagggaagagagaatcatattaatttctcaccactttttaagtaagcaaacagcagtatttcccagaggcaagaggttcagcaagaagtcaggaaatgtttttgtagataagcatctatcattctgatgggccatgactagtgtgttcacttgtaattcctttgcctttaaaaaaagagaatgatatcaaaaaataagtgccttatactgtgaaacgataaaaggacttcctgattctaaaaaaaaaaanaaaaaaaaaaaaaaa

SEQ ID NO: 182 - DNA, 2234 bp, Homo sapiens
  SITE (2157): n equals a,t,g, or c
cccacgcgtccggctaaagtggtattgattttaaacttgactcaccaacttcacaggggttaatacagatgtgaaaaatcttgagttataagcttcctgcatgcatgagacttgtttttattttgctgctctagtgttattggttttattacgcaaggagaaagaaggcagggaatttatggtcaggagattcctggtcaggaggttcatagtcagaagatctagactgggtcacaagaaatgacagaatttaagcatttgagccagggaataagaatgtgtgtgctctgcctgtgttttccacattcattttactcagcattgcactgtcatcttgcttaagaacaattcagtaggtcagaaacattggattccaaagctgttaatggtttattttccatttcttgccttcgcaatatctgaaataaagttatatcccagataactgatgggaaaacagggttcaaagctataggatatatgactcatttaacataaaattattcaaattaatgaattagcaaatcctcttgtgcttataataagcaaatataagttttatcttgtctattataaaagaaatgtctaaacattaagtgcaaaaccaaactaggcagcaggagaaggaaattagttatgttgtttttataataaggattgtaaaaccaatatcttagtgaaattctcagaaagcttgatttaaaaatttatcaaaattcgggagtttttttgtttcatttggtctatttgtcagtggtttgaggtcttagttctgcagcgacatcttatggagttggttagtttgcacaaccatttaataatgtctgccagaactgatcattgtctaacagatttgatgcaaataggatccctgcctgcgctttgaatgtggaagtaattaaacggatgctatgaggacttttatttttttctctgttggtgcttatctaaaatttccttatcatggcaactgtataatttttaagacactccaaaatatgtactgaggtctgaaattctcactacatattccaagttaggataggaggggagaaggaagctgttgaatagtgaaataagacagcagtaaaagatcacagtacagctggtgtttgttggcaagagtttccacttaaaaatttgcagcagtgcaagtacctcaattattattggcgcttttcactgttcgtgatcaccaggagtgaaaaaaaaagaaaagaaaagaaaagaaaattgaattctttgaagctcagagaagtaaactgaaaaatttttgagtaccgaaatttacccatttcttcttctgattgtgttcttttgaacagaacacattgcattaaactctagaaagaaaaaaagtgactgttttcatatttttatgattggagtcacattcttaagatctataatgtagattacagcaccattttgttatctgctagaagaaatatagctaatcatctctaaattagtaatgttacattttattttgcttcctatttactagtgtggcacattttaatgacagaaaatttccttgaaggcaagagctttacacacagtaggatttcactcagtttttgcatatattgaccattgcagaatacaaacaactgttaagtaatttctcccaaagacaggccataataaagaggaaaaatataaactatatgacactaaaaatcctgttaatcttgatcaatcagtgaatgaaacactaattgtgccaaacaacacattctacctgaacaaaaggaggtaattgcagtatgtttctatgaatacatagcagctgttctatgccattattatcactggtgagtaaagatcatggtgaatcattgtctaatatcttgtgatcttgctcacatataaaaattgccaggggacttcattaattatgattgcatcttaagggctctggacattttcatgagtgccacaggacacctagaaaataattgcatcttttgagaaccatgtgccagtgacaaggtaaagctcaggttgtatattccagagattctctggcaaatgagcattgcctgccttaatattctaagcccatcagttagaaaaggctgaccctatgacttaaaattgcatgctgcatgattagaaagatagataacaatatattttaaagaattatttgtncctcacacatgcccaacaagattgaatgattttaattgaattgaatattggtaaatttgctagaaaaaaaaaaaaaa

SEQ ID NO: 183 - DNA, 307 bp, Homo sapiens
cccacgcgtccgagatgagtaggtgtctggtacagaagtcttagtggagagttggtactggaatcctggtctaaggtattaggttttaatttgctagacaaagagaactcaagcagtgctgtctaggagtgttatgtaagctagattggactttagagtccggagaccatgcgggaagatactgtgtgataagggcctgaaacatgttggttacagtgagactagaaatgggataaatccagagctgtttcaccagtagacttgcctgaatatcctgtctgactgagtatggatcaaaaaaaaaaaa

SEQ ID NO: 184 - DNA, 1758 bp, Homo sapiens
  SITE (1720): n equals a,t,g, or c
tgtcccggcctgaggtgtcggccggatccctccttctcccggcgcctcaagcggaagaccattcctcaagaattttgtatccaaggcccaaaagtttgttacccaagatgatgaatgctgacatggatgatctctctgcaagagtagatgcagttaaggaagaaaatctgaagctaaaatcagaaaaccaagttcttggacaatatatagaaaatctcatgtcagcttctagtgtttttcaaacaactgacacaaaaagcaaaagaaagtaagggattgacacccttctgttttatggaattgctgctgatcattttttctttaaaacttggatagattccaaaagttacagtacctttgtggcttcattgaatatttatgaagataatgtcagatgtagacaaaaataacacaataacaggagacttccataagtttgtgtattatgttagtctatgaaaacgtgcaaatgtattgtagagactttatgattagaattgcatatatttatgaaacttaaagatgaatgttttattgaatttgtaggtttagcactgtcttttattataggattagtaagatatacaagaaaataaccaccgtgttgtgaaaaagtgaccaaaatcatgtactaaatgcacagctttatgtaccctgtccaccatcttgtgcctcttctccatttgcctcttccttcctatttcccttccgctaaggaaaaaaattggtgtcacatttgtaaaagtaattttaatagttaatcatctctgagagtaacctgtattttaattgttgaaacttaaccaaaataagatactgtctcagctagggcttgtcatttgtgtatttagtgttaagataggaatgctagtgtctctttaattaattggaaatagatggaggctaaaaatgaaggtttttctttgaaactgaattaacttgggaatatttgttgttaaaaacttctttttgcccaaaataactcattttgtattatctgaaaatatataatttctggtcatgtgtatgttaaaatagaaaattttgaggaaaaatggaaatagggtggaaaagtactcggtaaacagtagtaaccaaatattttcactccagatttgtgttttctctggcacagagtagatcttttgggaaatatatatgaaagtggattaagtttgactacccttatgttagccacatctggatgagaacagttacaaagagtttggtctctaagttgatttgtacccagtgggtcaacttctgcaaaattccgtaatggtgtattagtattagaatagtgaataaaatgggaaagttatacatgtatacttattatcttgctcagtattttatctcacttgttctagaattttctgtaaaccctgctactgggtttgaagagttttagtcatcctttaacaatttttaaaaatttagcttctagattccatttggtaaggaaatcaatattggaagtattgctaaaatcttataatatgaaaagagatccactaatgtagcttaaggttattagatttgggcttttaatcatggaataatcttatgtattggtgtaagagttgatgaatgactttagctgtgtgaatatataatagtcaaactgcaaacattttgcatcccttttgtgacctaatttacagacatttaaattgtgttgcagttctgctttgccgtttaataaaaagctatttcaganaaaaaaaaaaaaaaaaaaaaaawaaaagggcggccgct

SEQ ID NO: 185 - DNA, 1056 bp, Homo sapiens
  SITE (13): n equals a,t,g, or c
  SITE (15): n equals a,t,g, or c
  SITE (34): n equals a,t,g, or c
  SITE (46): n equals a,t,g, or c
  SITE (131): n equals a,t,g, or c
  SITE (1015): n equals a,t,g, or c
  SITE (1035): n equals a,t,g, or c
  SITE (1052): n equals a,t,g, or c
cctcgttttagtnanccgtcaagatcgcctgaanacgccatccacncttgttttgacctccatagaagacaccgggaccgatccagcctccggactctagcctaggcttttgcaaaaagctatttaggtgncactatagaaggtacgcctgcaggtaccggtccggaattcccgggcaaattacgttgattattatttttattttttgtatagcttaccacttacgtgtatatctctaaaaaatacctttgcatgcttgaactttacataaatgtcttactatatgcatttttccacaacttcctatattcattcagtagtatgtttttcagtttcattcatgatgttgcactgaagattatatattttcactcccgtaaatttgattatccaaaagagttcatgtaagattggaatgctcacttctttgaatgtttgacagaactcagttaaattacctgggattggtgtcttccttatggaaatatttgaattatcaatctcacaccctcaatgattttaggactagtattattttcggtttcttgttgagttcattttgttattgcatttaattttctaagaatttgtctatattcactgaattttaaaaaatcattgcttgcattttataatattctctacctttgaaaatataaatgctgcatttgtctttattgctcctttctattcttcatattattaatttttaaattaatattttaattaattgaagccttctytatataacttagctgaaattcttgtacctttgcttcctattcactaattccactataatgtttattgtttgcttctttcttgtgtaaaattttgtgaatcttgtttttttttataatttcctaatttggttctaaactattaaatttaagtctttcctattttctaataaaatttttttgaaagcgraaaaaaaaaaaaaaaaaaaaaaaaaaaagggcggccgctctagaggatccctcgaggggcccaagcttacgcgtgcatgcgacgncatagctctctccctatagngagtcgcattataagcnagct

SEQ ID NO: 186 - DNA, 470 bp, Homo sapiens
ccggaattcccgggtcgacccacgcgtccggttttgttactttttattatggaaaattttaacatacaaatgagaggagagtgtaatgacttacacatacaatatatgttcatttcatggttcatcttgtttcgtctatatcccctttcctcccccttcttctcccagaatgttttgaagcaaatctcagacatcttatcaccttattatttcatccaaaagtattttagtatccctgaaagatacagctcttcaaaaaagaaaactacaataccattatcacacctgaaaagttaattcatcagctatccagcattcaagttaccttggttgtcttataaacattttgttttgttttacagtatgtttatttggatgagatttaagacaaagacaatacactacaaatagatgtcaaaaaaaaaaaaaaaaaaaaaaaaaaaaaaaaaagggcggccgctttagaggat

SEQ ID NO: 187 - DNA, 932 bp, Homo sapiens
ttgcaaaaagctatttaaggtgccactatagaagggtacgcctgcgaggtaccgggtccggwaattcccgggtcgacccacgcgtccgagagacatccatatttccagtgtctctctcatgtttaagcttttttcggaatcaagcccacattcttcagcacggcattgaagactcaggagccctcccagtctggccccatgcacagatggaaggctttctttcctggtccttatccttctctgcacaatactccagtcacaccacaccatggactgctctctgaccctcatggcattccagtggcgttatgctctcatacagccttcctcatttgcccaccttgcttgtctctgactcatattctattccaaggctaagctcaaatgtcatcatatctctcaaactgtccctcacactcccgcccccacatgatttagttgtattctgccttttgttccacaggtctttgtacatcatggtattatggtgtttaagtctgtacatatgtatttgtattgccatccccaacccaggctccaagccttctgaaggtagaaaactgtatcacataaatgaagaatgaatgaatgaatgaatgagtaaatatttagcctatctgtctgaactgcctgctctgtcttagccattggaaacatgcttagaactaaatcattttctaagaaacaatagtcttccttagtattaattttatattatttttctctcttctctccaagcccttatcacttggattcttgctattttacttttgctttaagatatccctgttgtcttattaactackttgagtcctacacagatttatgtaagtgagaaatatacaatatcctatgtacctcacctgagctaaataaaatcattttccatcaaaaaaaaaaaaaaaaaaaaaaaaaaaaaaaagggcggccgc

SEQ ID NO: 188 - DNA, 1953 bp, Homo sapiens
  SITE (500): n equals a,t,g, or c
  SITE (742): n equals a,t,g, or c
  SITE (946): n equals a,t,g, or c
  SITE (1028): n equals a,t,g, or c
  SITE (1038): n equals a,t,g, or c
  SITE (1229): n equals a,t,g, or c
  SITE (1251): n equals a,t,g, or c
  SITE (1264): n equals a,t,g, or c
ggcaccggcggcgtgagggctccgggtcgctggcggcgtggacayctgagtcccggggtaggggtctcccgcgaggagtgagctgttgccgcakaatgggctgctggctcctgccctgcttcctgtgatcgagccggccctgaggactctgtggagatgcctgtaacccaccggaaatcagacgcatctgacatgaactcagacacgtcccccagctgcaggctccgagccttcagcagaggcggcagctggagagtcgaagcagcagctctcgctccagaagcttcactttggatgatgagagcctgaagtacctcacccatgaggaaaaggatgtgctcctgttttttgaagagacgattgactccctagacgaggactttgaggagccagtgctgtgcgatggaggagtgtgctgcctctgctccccgtctctggaggagagcacctccagtccctccgagcctgaagatgtcatcgacttagtgcagccagcaccntggcgccggggaarccgagggccttccagaggggacccaggcagmagggcctgcacctgctgggaaggagcacaggaaacaagatgctgagactcctccacctccagaccccccggctcccgagacccttcttgcgccaccacccctgcctagcacccccgatccccccaggagggactgcgcgccccctccccgccggtggagcaccccagactcctgcgctctgttcccacgcccctcgntatggcgcagaagatttccgagaggatggcggggaacgaagccctctcgcccacctccccgttcagggagggccggcccggggagtggaggacacctgccgcccgggggccccgcagtggagaccctggcccggggcccagccacccggcgcagcccaaggcaccccgcttccccagcaacatcatcgtcaccaacggcgcggnccgggagccccgcaggaccctgtccagggcggccgtcagcgtgcaggagcgcagggcgcaggtgttggccaccatccacggncacgccggcnccttccccgccgcgggggacgccggcgagggggccccagggggcggctcctccccggagcgggtggcgcgtggccggggcctgccgggccccgctgagagtctccgggcagggggtcaggctccgcggggcccggcgctggccaacggcttcccaagtgcgcacgaggccctgaagagcgcacccagytcnttcgcgcccgctgggaagtccntctgcttccgccntggcccggccctgcccagcackcgggcccgtcagagcttccccgggccccggcagcccaacggcgcccaggactggcgccgcgcagactccctgccccggccccagggcatcaccgtgcagttcgcgggccgcggctcctcggaggaggcgcgcagggaggcctgcggaagctggggctgctcagggagagttcgtgagggccgcgcgggctccagtccaccctgtttctccccaccctgaagagagggtgaaagagtcgctgcacccaggagctgtttggtctaaaatggaagtgacagcgggagcccctgccctctgtggcacatcggagtctagaggtgcctggctggggcctcctggctgagcacgcaccgcaagctccagccaccggcacagagaactcttccctaaaggaatctggccgagggcttgtctcccttttcccaagaactgagagagagagaataacctgttagacccataggtttccgtgatgtgtaaatgccatcttttgggggttgggaggagtaggactggtctgattatcattcttgagtctcatctaccctcttctcgaagtacatgacatgaaagttcagatcccttccactcaggattctcgccgccttttctaagaaaataataaaaaaaaatgcttgtttcaaaaaaaaaaaaaaaaaaactcgag

SEQ ID NO: 189 - DNA, 1008 bp, Homo sapiens
ggcacgagtgtcggtcccctccctgagccagcatctccatccaccaccccgtgccagctcccgtgccagccttcattcctcccagtgtccaagcccctccaggagggtcctggggtgggccagatgcctgcccacctctgtctcctgcctctgctcctctgcccttcttatagccagaacttgtatcttctcagcaaccttcactttgtccttgtccctttaccattccccatcaaagagtagtctgctatatcaatttgtgtagatatgtctgtctttttgggtcctcagagaaaatgcccattttctcggagaattctctgcactcctctctgcttcacattcaacttccctgttctcatctttggtaggattctgccagttgcttttgcatcttctgttcctgggtaatggtgggtcttaatggaggctgggtggaccactgcccgtccactcttcaacaggaggaacagcatgccaccacagtaacacacattagagaaaggacagaggtctgctccttcctgccacctttctcctggccccttagcattcccccagtccctccctcttcaccttgctccgtctatgtcttcccagctcagccttttccccactcttaaatactgtactacttcactgtaagaacgaaagaatagttaggataccaatgagtaaaagggttcctgttcactctgactctgtgcaaattgtattacagtagaccgctgacgttcccaagtgacagatccagggcctttcaaacatccccaaagtcatggccatactcaccattagccagtttctaacatctgtttcagggtatccagctgtagatgttcttatcccccatacttgtgagttcttggggttgctcacaaatactaggggtttttgttgtatttttaacaaatatatcctaatgtcatatttattctcttttgtaactgctgtctttacaataaagaaatcatctgcctttctatcttaaaaaaaaaaaaaaaaaaa

SEQ ID NO: 190 - DNA, 421 bp, Homo sapiens
ggcacgagcaccctgcagctggagctggagaccctgctgtcttctgccagccggcgcctgcgtgtgcttgaggccgaaacccagatcctcaccgactggcaggataagaaaggtgacagacgattcctgaagctgggtcgagaccatgaacttggagctccccccaaacatgggaagcccaagaagcagaaactggaagggaaggcaggacatgggccgggccctggcccaggacggcccaaatccaaaaaccttcagcccaagatccaggaatatgaattcactgatgaccctatcgacgtgccacggatccccaaaaatgatgcccccaacaggttctgggctagagaacatagaagggggcctcaaagttctggtggtggaggcactggtggggcaagggcgcccactcaggatttgg

SEQ ID NO: 191 - DNA, 1086 bp, Homo sapiens
ggcacgaggtgggatttgctttcatgtcctgtttcaaaaaccaagtgtctcttgacagcccactggttcttcctgtcctcttgctctagtctgtatcagaaagcagaatgactgtacttttgttttacaaacaaccacctgataggacggacactccacgagataaggaaaggcacgtgcccttgagcttgaatggaagcagcctctggagggggcagccactgcccttcgagggagagcagctcttcagcagtggccagagtgccacgtgactctgcagatgacccctgggagccgggtgatgggcacctgctggggcttttgttttttctttttcactggctggcttgatcctcagtggcaaaaggacccctgagccccttctccgagccctggagcactcctcgggacaccgagtggcctcagggctgggttcagagctcctcccgcaggggagcctcagaagtggaggcagctgctgatgggtgagtttacaacttcttatcctgcctaaggcgagtaggcgtttttattccgtttccagtccttgagctcagcagatcaaaataacagtgaccctgcaaccccacagagcccgcgacacgctcgctttcttccccgccctgcccctttagtccccgctctggaaggccaggcagtttaggtgtaaataggtatcttttatggtttccaaatgaattatttgtgtgagagtaattaaatctgtaagaaaacctgttgagattcttcactatgaattatgacttctacaacatgtattttagcaaaaacacgatgctggcctccactggatagctcagtatgctgattgccagtgatagttctgtacgcgttaccaacagcgtctttattaaccctcttccacatccagtggaaatcattgctaggcggtatttgttggttggctgttagctttgctttatgatttcatgtttcttttaaaggttgttttgcatgttgaatattaaattttttttttctgtgtcttcctctaaaaaaaaaaaaaaaaaaaaaaaaaaaaaaaaaaaaaaaaaaaaaaaaaaaaaaaaaaaaaaaaaaaaaaaa

SEQ ID NO: 192 - DNA, 1038 bp, Homo sapiens
  SITE (142): n equals a,t,g, or c
ccacgcgtccgcttactcaattttctacaagttcatccataaaatctgcctttatttacataaaattatataaaatatttgaattaaaagagatcataaataattctattttttcccagttcatgtggcattttagacatantcaaaatttgtagcgttatttttttttcttttccaaatctttaaaaagcatctataacccactgaataagatgggttagaagatgaagctgctgagaagtgctgcaaagctgatggtattgatatcaacacaaacatcatatgcttttggggaacagtgcactcatttgaccttattcctaataaattcaaacagtgggaaaattcctctaacttatttttaaaattctcttttaatctattacttccctattggtgaatgatacaaattagtttcttgacctctgttcagatactgggttacatacaatttttggccatttaagtatactgtaaatccctccagaaaactttcttatattgtcttgtgcttcacagctagttttcaggcatatgtactgcttacaaattagtttggtatttaaaaaggagttgtggcttgagttacaaagatttaaagttaaagcaatgctcttaataatttctattttctcactgaatcaattcacactagacacccctttaacttccatatacatgatcactcaccttctgtccaaaaatctattttaggaaagagcagaagtacaagaggaccttgtaaacaatactactaatattagtaggaatacggcaaggtttaagagtgacaactttagcttcactactttcaagctgcttactagctgggacaagttgtataaattctccgagcccattttcctcatttaaaaaaggggccatagacatttttccaaagacatacaaatggccaacaagcacatgaaaagatgctcaatatagttaaccattagggaaatataaataaaaaacacaatttcaaccacaatagtactacatacacattagaataattatgttaaaaaaaaaaaaaaa

SEQ ID NO: 193 - DNA, 765 bp, Homo sapiens
  SITE (757): n equals a,t,g, or c
caggacctggaacgcgcgggcctgcggcaggggagttagagcagcagctgcacgcccaggctgcggagcacctggaggcacaggcccagaactcccrgctgtggcgggcgcacgaggcgctgcgaacgcagctggagggggcgcaggagcagatccgcaggctggagagcgaagsacgaggccgccaggagcaaacccaacgagacgtggtcgccgtctccaggaacatgcagaaagagaaagtcagcctgctacggcaactggagctgctcagggagctgaatacacggctgcgggatgacagggacgcctgcctgggcccacctgctgctgctgctgttgctgggctcggccccccagacgcggctctggccaccttcccagtgcccggtgaccagccccgagtgactcacggaccatgagctagaagctgcccttgcaggaggcttgtcatgggtcgggggtgcccactcaggatgcaggctctccccagggggccccaggctcgcctgactgaagacatgaaggacctagcctaggagtggtcagggtcccgggagtggccagggtcccgtgtgtgccctctgccagtcttcgctctgtccccgttcaatcaaccccatctcagttcagcagaaaaccccctcgtcaaataaaacccactgactgcaaaaaaaaaaaaaaaaaaaaaaaaaaaaaaaaaaaaaaaaaaaaaaaaaaaaaaaaaaaaaaaaaaaaaaaaaaaaaaaaaaaattnaagggggg

SEQ ID NO: 194 - DNA, 668 bp, Homo sapiens
  SITE (11): n equals a,t,g, or c
  SITE (13): n equals a,t,g, or c
  SITE (19): n equals a,t,g, or c
  SITE (23): n equals a,t,g, or c
  SITE (35): n equals a,t,g, or c
ccgggggaatnanaggganaacntccccttactanagggaacaaaagctggagctccaccgcggtggcggccgctctagaactagtggatcccccgggctgcagrcggggctgtgctggctgcccgcagtggcccactggccatggtgggctcagcaatgatggggggcatcctgttggccctcattgagggcgttggcatcctcctcactcgctacacagcccagcagttccgaaatgcgcccccattcctggaggaccccagccagctgccccctaaggatggcaccccggccccaggctaccccagctatcagcagtaccactgaggaagccactgccaccatgggagctacttctcggttccctccccgatggtctacctcgaagggagggctggctcccagttagccctgggaccctccagagagggtttctactctgctccctagtcccagggtgggggtggggcaccccagctgccctgacagatgggtcccctttttctctctcagggcaccccagccccacactcacatgtacgaagttctcaccccagctcctttgtgtggcaccctgatgagtatttaaagcccgttttgaaatgccaaaaaaaaaaaaaaaaaactcgaggggggggccccttaacccatttgggccttaaggggg

SEQ ID NO: 195 - DNA, 893 bp, Homo sapiens
gggcttgactttcgaatgtaaaactgactgtgccttagcatcaccctgtccagtgcccctggggcagctggtagtgtccagaagaatggacacctgctccagatttagatgcccatctgggcttttgtttgatttgcggcgttcctgtcttctgtaaagctagtgagttgtcccaagagactgatgccacagcttgttcgcagtttacacaaactcagctttaaaattccaaatagaatctgacttgcaaactctagctgcagcatgtggagcttctagatgtttactaccttgaatggttgtcagtgtcactgaaccacaggggagaggagtatggggtagagcaatggtctgggccaaggaatggtgagcttagggtcttcctctgactccttactcctcaaggaggcagttagggtccctcttaagcaggcttctatttcttaccactaaattggtttcctttttcatccagaagttagaactccccagatattcacactataggatctgaattccgagattctaaaatatcttaaaccacaagagagaaaatctagttctgcctcagccccagtcagcaggccatctgtcccttcctctcctctgagtcagacagctctggcaagcaaggctccttggctagttcctaatgcactgacaggagccctcccattaaggacgacttctactcaaaatgcgactctccctctgaacttcagatgcctctgttagcaggaaaaggcattgattggattggatatatttatgtgactgcgggcatttgtggctgtagaatccgtgaccgtaatgttatatgtaatgggaactatcttataaacttgaaaaaaataaagtttttattttctawaaaaaaaaaaaaaaaaactcga

SEQ ID NO: 196 - DNA, 519 bp, Homo sapiens
  SITE (492): n equals a,t,g, or c
tcctcacctcacatmtggcttcctccaggggccctgatacagtgggtgatgggtcctaagggggcctccaggacccaccagccctatgaggaaagagttcttcctgatcctaccccttgacttccttttctttctcctgcaggtctcagaacggccccgaagcctccccctatcccctgaattggagagctctccttgatgccctctgttagggcccaccccaatcccagggcagaaggacatgagggagcaaagagcttgaggaatgccatactccggctggtccgggacatggaaattcggactcagggaggacccgggctgggcaatgactgggagacttgcctgggttcccaggacttgggggtcctgactcccagccctcatcctgccttacccctctgttcccagccccagcctttctaagccattggraatagaatggccccttttgttaaaaaaaaaaaaaaaaggctcgggggggggcccganacccaattcgaagttgcgagtgggctc

SEQ ID NO: 197 - DNA, 453 bp, Homo sapiens
ggaattcggcacgagctgagcttgtgtttaaagccgttggccttgctcccccagctttgtcagctcaggtctgtctacacccagatggtagcgcttgtgacactggcctggcagtcctgctcacagtgttctgtgcctgtgtgctcccaccctttcctcctgctgctgcagaaacccggccatccttccacacccagatctcttgtcctgtcctcaccccaccctgccaccatcagccctgcctggagccacctgccctttggcaacaaaaccaaacctttttgtgggcgttcaagatggtattgtgcccaccagtcagatcctgtgttttgagtcccaaaggccatgccaaggattggctttgggaggctttaatcaccaacccatcaacatcaagcctcccccaggccggttcaaataaatgtatttaaataaaaaaaaaaaaaaaaaaaa

SEQ ID NO: 198 - DNA, 415 bp, Homo sapiens
ggcacgagcagcggccggccgctctgctgagaaggcagagaggcaggctcaggcctcagcgtggacagcagggataaggggcacgaaggacggggactcggccccttcagaattcctcaggactctcaggtgcagctttgccaaaaaggaacttttcatgtcatgcagttgaggggacttagtctcaatcccaggctcctcttgactctgggcagcctctgtcttgggagctcagccccagggttcggtcgtcagcagtttcccaagaacaagatgtgatggcatctgctgctgaaaccctgatgaggaccaggccccctgcaccgctgtcagcctgaggaattaaagctttggtgctgggaaaaaaaaaaaaaaaaaaaaaaaaaaaaaaaaaaaaaaaaaaaaaaaaaaaaaa

SEQ ID NO: 199 - DNA, 674 bp, Homo sapiens
ggcacagggaaaccccggagcatgtttagaagatgacaatataatgatcattatgttagtcatgaaatgggaagaatctatcatttggcaccatttggtactgtgtgccaactctggcttaagcattttgctcatattaccctgtaaggtcaataattattatccccattttgctgtagagaaaactgagtattctgatacaactttaactttcctggggtcaaaaaaattatcagtatcactaggatttgaactccaggtcaatctgattttaaagcatgtactcttaagcattagaacagtggttcttttgactgggcatggtgctcacgcctgtaattccagcactttgggaagccaagggtggcagattacttggacccaggagtttgagaccagtccgggcagcatggcgaaaccccatctcaacagaaaatatttaaaagttagacaggtgtggtggcatgcacctgtggtcccggctactcgggaggctgaggtgaaaggattacttgaacctgctaggtggaggctgcactgagccgggattgtaccactgcactctagcctgggcaacagagtgaaattctgtctctaaaaaaaaaaaaaaaaaaaagagaaagaaagcaagaaagaaaagaacaaaagcaaaaacaaaaaaaaaaaaaaaaaaa

SEQ ID NO: 200 - DNA, 1246 bp, Homo sapiens
ggcacgagctcgtgccgaattcggcagaggtcaccttctcctcctttccctgctgggggtggcaggggtccctttaccccctcattcttgacccttctccagggatgcttgtgacctccttaccccaccccccatcacctctctgtcctgaagtgagggtttgtcaccgtccatggcaaggtgtggtgtctggtaggctctatgacctgccttctctcagggtgtttattctgcagcagagaggggtctgcggtctgagtgtaatggtggaaatccaggcttccttccatggcccaaggaggcctttccggagcaacagggttttcctgggactcagcctggcttttgttaaggcaggtcccggatttactcagaagatgggccccagagaggaggagaggaaaggaatacctgtcagtcaaacgtgaagcccactgatgacactgcctggcagagctgcctccggtcagcagtgacccttcaccccccagctcccaagtcctcttcctgagggagctggtccggctttatggaaggctccgcctgtgttcccccactgggtccctggtccctcacctgtcacgtggggcgatggtcaccctccctccctgcctgccctgaaggatacactgagatgaaggtcaggaaatctgctggctgcagaaccaggggccatgcaggagtgagggatggtctggtcaagttgaggctctgccccagcctcagtttccccacacaggcatgagactgtcttcctgactttcagaggacagggctgagatgggatgagggaacacagggaaagcgtttagcacctctgagtgctgtgtggatgcgacctggggggtcctggcctccactctttaattctatctggactgtgtgccctcctacctccagtttccctgcgggggcctttcacagggcctggcttgcggatacggggtttggcgtagggcagtgcttctcaaatgggaaggcgcactgggattcttcaggttggggtggggcctgaggttctgcatttctaatcagttgcctaggactggctctaattcttgttgaatttacaatcacttgtggagttaagaaaaacatactgggccttggttgggtgtggtggctcacacctgtaatcccagcactttgggaggccaaggtgggcagatcatgaggtcgagagattgagaccatcctggccaacatggtgaaaccttgtctctactaaaaaaaaaaaaaaaaaaaa

SEQ ID NO: 201 - DNA, 1510 bp, Homo sapiens
ggcacgaggtaagactatgatatttttattgattgttaattatctttcctttatagattatggaagagacctacaaaatggaattcatgtacagtggtgtggagaataagcaggtggtgattatacatcacatgaggctgcaggccaaagctttgcaacttatagtaacagcacgaactacacgagggtaagatgtggggttggccaaaatatgtggcatgttcctttcaaagatacttcaaatgcattcagacatcacacgaaagttaatgataagtgaaatgaaatttaggaaagactagctaaggaatgtgtgatctattcatttttttcagatattacaaattctgttgttggatcagattagacccttggaaatccaattgtgtctctcccttgctaaaaaccctctggtgactctccattacatatagcacaacactggactttatctggcaataaggacactctgtatcctcctacttgatagatttccttaagaatttagtgccagggacactttttctgtctgaaggactaataagctttttctcaggcaataaggataaattaagaggatgtactgggaagtcagactactttgttcaaatcttgtcttttctacttactagttgtttggttatgaacctttctgtaccttgtttccctgtacaaaatgaaaatgaagacagcatctacctcatggcatttctatgaagaataaatgagataatacatgtaaaaacacttagcatggtacttgatacgtaataagagctcagtgtaattatatctgtaagactttcagataactggaattgccacatttcattgattccaagatacacattttttattattgtaacttctctgaactcagatattttgatggtgtcccatagtgttttttgtttcttactatttcataaaataaaggtgcatcttaagaatgatggcatcatagatttgatacaaaaaagtacttaggtgactcattgccagctcacagacatgtttgatgctcagtccagctcctgtgtcaaaaaaaaaaaagtgccatagagatataaatatgaatgcttaaacacagaaacatactaggtcagaaataacatcctgaaaaataaaatattttatttcttcacgtatcttgatagtgacctcataaagtcaaagaatcatttaatcttaaagatattcatatgtggccgggtgtggtggctcacacctgtaatcccagcactttgggaggccaaggtgggcagatcacgaggtcaggagatcaagagcatcctggctaacatggtgaaaccctgtctctactaaaaatacataaaattagccgggcatggtggcatgcaccagtagtcccagctactcgggaggctgaggcaggagaatctttagaacctgggaggtggaggttgcagtgggccgaaatcacaccactgcactccagcctgggcaacagagcaagactccatctttatataaaaaaaaaaaaaaaaaa

SEQ ID NO: 202 - DNA, 1259 bp, Homo sapiens
  SITE (4): n equals a,t,g, or c
  SITE (18): n equals a,t,g, or c
gggntacaaaagctgganctccaccgcggtggcggccgctctagaactagtggatcccccgggctgcaggaattcggcacgagtccacacagggcctggtgttctaccccatctggcccctggcccatctcttctgtgccttagtcacatatgaaagcgcccctccctggctccccatctgtcccacacgctccctggggctcttagttcagctgctggcactcgcaggatcctgcagtgctgggcccagagcccttggacaggcctcaggagtggtcaggaccaccaagcccctcctctccccctccacacctctagacctggggcctccggaacccccagcaggctgggcttatactagctcctgacttaggaagagcctcgtgtcacaacacgtgtccctacaggcaaagtgtcctggcatttaaaacccagattatccctgggtttgggctgcagtcacctggagaagctggtagggtaagggagagggaccctgccggtgttcactggggattctttcttttggtccttcctggaatgaacaggttccctccctgccacctgtgaggagagttggggcccagccgtcttcctggcctccttcctttcctcgtggcagaggcctgcatgtgggtgccagaggccagctctccccctccatcttgggggggcggagcagttgggcccaagctgcccgggagggtgggtgcagacacaggctgaggaccagccctggccctgccccgccatctgctttcaccaagctgtctctccaccgtggcttcccttctccctccaggccaaagtgctgctgattcccactcccttggttttcgcctgcccagcgttgctgtttgcgtggagggtggggggagctcagtggcagggaatcagcggtccgtggggtcgtggggacgggaacatgtgcccgaccgctccatcccctcctcctccttaggatgcataacctaccttgtctttttttttttaaattttctttccaggtagagtagctctttgtacataaagaatacttgaaaaattaattgtatgatgtatgagaagacagagtctcctagttttgtatcttgttgtatgactgccatgagttccaccagaaagccactctattttggtctctgtgacattttaaatgcgtgacagaagtgagcaaataaagtgaggaagaaatctatatatgagataatatagattgtattgaaaaaaaaaaaaaaaaaaaaaaaaaaaaactccga

SEQ ID NO: 203 - DNA, 2101 bp, Homo sapiens
agccggcctcgcacttccggtggggagattccggcctggagctcccagggccgagcagaccttgggacctgtgagcgctgcatccaattaaccatgggaagggtcagcaccagccaccagccccttaggtgaggactctgcctggggctctgctgatggttccgaatcatggagctgcagagagctcctccagcctggagacgttcttggtgaaagctgtggtctaactccaccggctcttcctgcacattgtattcaagaggggtgcctgcccccgctgactcaggagctccggtgctgcagccgccacgaatggggaggtgggccctcgatgtggcctttttgtggaaggcggtgttgaccctggggctggtgcttctctactactgcttctccatcggcatcaccttctacaacaagtggctgacaaagagcttccatttccccctcttcatgacgatgctgcacctggccgtgatcttcctcttctccgccctgtccagggcgctggttcagtgctccagccacagggcccgtgtggtgctgagctgggccgactacctcagaagagtggctcccacagctctggcgacggcgcttgacgtgggcttgtccaactggagcttcctgtatgtcaccgtctcgctgtacacaatgaccaaatcctcagctgtcctcttcatcttgatcttctctctgatcttcaagctggaggagctgcgcgcggcactggtcctggtggtcctcctcatcgccgggggtctcttcatgttcacctacaagtccacacagttcaacgtggagggcttcgcttggtgctgggggcctcgttcatcggtggcattcgctggaccctcacccagatgctcctgcagaaggctgaactcggcctccagaatcccatcgacaccatgttccacctgcagccactcatgttcctggggctcttccctctctttgctgtatttgaaggtctccatttgtccacatctgagaaaatcttccgtttccaggacacagggctgctcctgcgggtacttgggagcctcttccttggcgggattctcgcctttggtttgggcttctctgagttcctcctggtctccagaacctccagcctcactctctccattgccggcatttttaaggaagtctgcactttgctgttggcagctcatctgctgggcgatcagatcagcctcctgaactggctgggcttcgcctctgcctctcgggaatatccctccacgttgccctcaaagccctgcattccagargtgatggtggccccaaggccttgaaggggctgggctccagccccgacctggagctgctgctccggagcagccagcgggaggaaggtgacaatgaggaggaggagtactttgtggcccaggggcagcagtgaccagccagggcaaatggcttagaagcaggccactccccagcctgctgccagcactcactgtgctcaagccgccagggctcatcatggtagctgggagctgtggacgggagtcaccaggtggtggggccaagccagggactcatgacttttgcccctcccttcagagcctggtcacacaaggggcgagcaccaggccagcctgggactggccagagctgggcccaagctgcgctggaatcgcagcaggagaggggagtgggctggttcttcccaccacttcccaggctctgacagccgagactcatttccaaggcacagcagctttctaaagggactgagtttggactgggttttggacctccaggggctggagcttcatcacctgggcagtgtcttttctcagagagcaggtttctttatagtttggaaataaatggttcacggtccactggccgccttgtgttgctggagacgtgggggcagggaggggacagtgtgggcctggcctctcctttcctttccctgcctggagccttcttcaaatgtctggtcttaagccaggcctccttcattttctcgctcctgttagaacaccagtcccctycccagtggggccccactgcacctgctggcaggaaataaatgaatgtttactgagwaaaaaaaaaaaaaaaaaaaaaaaaaaaaaaaaaa

SEQ ID NO: 204 - DNA, 725 bp, Homo sapiens
gtgcattgagtgcattgttcttgcccagttttcaggaagcagaaagaaaatacaggcaagaactgcaggactttgaattatctgcctagatcattctaagaattgaattgattatgcaataattggactccttttcctgtagattaattgaggcatgaggtggactgtctcctctggttactggaagaggacttcctgattgccttactttgaggcagccagggtgggggtcctcccgagagcatggggagggtcccagggggcccacttcagggttgcctttcatgaaaaacttgtcaaacctttgtacagatgtctttttaataacactcactgctttgcagatccaagtttggactctgggctgctccagyagtttgttgsctctgtttatggtagcttaagtgcaaggtttttatgtagccagtaargtctgtcccatggtcttgagtgaaatggggagcaggaaaacagaaagaaaggaaagtgccacgttgtagcaggggagggtcaggagaccaccttamctgggcattgtgggtgcagggtgccagcagagcaggagcttacytggtgggcaggggcactgccacatcttgggagggagtatgtgtgtagtttgaaaaagcttacttaatagtttagatttggaaaatggaaaaaacatccttttgaaatgttaaagatcgttaaagaagtttgtgatattttcataaatcaaaatg

SEQ ID NO: 205 - DNA, 926 bp, Homo sapiens
ggttgtaactcttggtccttctctctctccttttctcttcccttccttccccttccatctttctttccacatgtcctttccttattggctcttttacctcctacttttctcactccctatcagggatattttggggggggatggtaaagggtgggctaaggaacagaccctgggattagggccttaagggctctgagaggagtctaccttgccttcttatgggaagggagaccctaaaaaactttctcctctttgtcctcctttttctcccccactctgaggtttccccaagagaaccagattggcagggagaagcattgtggggcaattgttcctccttgacaatgtagcaataaatagatgctgccaagggcagaaaatggggaggttagctcagagcagagtagtctctagagaaaggaagaatcctcaacggcaccctggggtgctagctcctttttagaatgtcagcagagctgagattaatatctgggcttttcctgaactattctggttattgagcccttcctgttagacctaccgcctcccacctcttctgtgtctgctgtgtatttggtgacacttcataaggactagtcccttctggggtatcagagccttagggtgcccccatccccttccccagtcaactgtggcacctgtaacctcccggaacatgaaggactatgctctgaggctatactctgtgcccatgagagcagagactggaagggcaagaccaggtgctaaggaggggagagggggcatcctgtctctctccagaccatcactgcactttaaccagggtcttaggtacaaaatcctacttttcagagccttccagctctggaacctcaaacatcctcatgctctctcccagctccttttgcataaaaaaaaaagtaaagaaaaaaaaaaaaaaaaaa

SEQ ID NO: 206 - DNA, 1248 bp, Homo sapiens
ggcacgagtgaatagctacaatgttgggaatgtgttcagtatatctttaagaccactgttctgtaggaaaaaaaaatctagtatcatgtcataatatccccattgcctatstccatataccttttccttcttagagctcaaagactgtttcctaacatactgtgccttttgctatttcctgatttactaactggtttttttctccccatgaatttttaaaagctgatgccctgtattcctacaaaacaaattcgttgtgagtacaaaacttttatgtcctcaatggaagcctcggagtacaaaatgaaatttttccttgttttgtgacactttaccttgtacgtatttctgtcattgcatctgtaaaacctactaagtgcatgtatatacatgtatgcccctctcttagcctataacttctcatgagcagggtcagggttttattcattttggtctaccaggcaaccagtcacattcaggacaaatagtgtgatctcagtatgtttagcatgagattataagtaaatacaaatggatgtattttcagagagaattttatgcaatataaaacataaataaggaaactagtctgaccagtaaacattgtcagtactaggtctccaatatctagttctcacacatttccgatcacttcaggatgaactagagtatgcccttacagggatcagtgtcattcaaggatgtgactgtggacttcaccaggaggagtggcagcaactagaccctgctcagaaggcgctttacagggatgtgatgttggaaaactattgccacttcgtatctgtgggtaagaaacactcctgaatctttcactgtcatgcatctccttctaagaattcctgaaacatattggactttgaatttcagggattagaggtgattatttttttggcagaaaatattattttgccaggcacagtggctcacgcctgtattcccagcactttgggaaggccgagggcaggtggatcacttggaggcagggattgcaagaccaagcctggccaacatggtgaaacccagtctctactaaaaagtacaaaaattaggctggggtgtggtgggcacatgcctgtgaatccccagctactctgggaggctggaaggcacgaaaaccacttggaacctggggagaccaggttgcagtgagttggaggattgtcaccactggcactccagcctgagtgaaacagtggagactgtctcaaaaaaaaaaaaaaaaaaaaa

SEQ ID NO: 207 - DNA, 824 bp, Homo sapiens
gcacgagagtgtctacctatttatggtttttatttataaatgtacaactccctctttgcttagcatcaagatgaagaagaagagacagtctttcgagaggtggtcagttttccccggaccccctgccagatattatgacaaggacaccaccaaaccaatcagcttttacttgtcttcgctggaggagctcttggcgtggaagccccgcttggaggatggctttaatgtgccctggagccctggcgtgtcgccagccccctctgagcagccagaggccccggactttgttgtgtcatgacatgatgggcgggtacctggatgacaggtgaggacctggccttacattgatgttgcttacattgttctcctttgctggggtgggggctggaggggcgggagagagtgccatgtgtagaaagagcactgggcggggaatcaggagacgggcattggagggatggcactaactgcgagaagaaggcaggccccagtgtttcatctgtaaaaagggaagactgggctgggcttggtggctcacacctataatcccagcactttgggaggtcaaggcaggtgggtcacctgacctcaggagtttgagaccagcctggccaacatggcgaaactctgcccctactgagaatggaaaagttagccaggcatggtggcaggtgcctgtaatcccagctacttggggggctggtgcgggagagtcgcttgaaccagggaggcggagattgcagtgagccaggattgcactactgcactccagcctgggcaacagagtgagactctgtctcaaaaaaaaaaaaaaaaaaaaaaaa

SEQ ID NO: 208 - DNA, 2206 bp, Homo sapiens
ggcacgagccagatctgagccttgacgcaggccaagtggaaaaatactttcccgcccccctcccctgttcccacttcctcatctggcactatgcatgtctcactcaccctccacagcactcagtcccatcgacgttcactgaacattggctttctctttctgactcctgcctgttttagtccactatatattgctgtatttgcttaaatgctggaaagtaactgttaaaatgtgaaattgtaatttttaaaaaggctacaattaaattttagccaatgccactcaccaaatctttgcacctagtagatatatcaatgtaaaaacaaatacctaactgtacagtgagtgtgggggaaatgtagtaacctagttagtagtcttcaatataaccaattgtacaaggggaagtggtgtttacctacttgttcatcaccattactgaaagccgtactgatcagttagttgacaacgggcatttttttttctttgcttcatggaatgatttcttttcttaaccttcgacttatcctgaggtcaagccttttgtctttatgtgtaaccgacgttcagtctattctaggaatgaaccagcaagttgttcatttaaaactgaccaaagacaattaattcctggyctagtttcctgggccttgtggctcagctgccactaawgagctttttggataaaattgagaacaagctgtgcttcctaccccactctccccgtccccttttattcccttttcctcttaaagagctgctctgagctgtgggattctatgaaaaattcttgcctttccttgtttcagtgctaacgatttctcacctcgaagcgccttttgaaccccggacagagtgcacaatcggagggaattgcgagcttgggaattagactttggagtcttttctctgaagtcaccaggccaggggtcaggagagagatggattcccaagggatgaaaggtttctattcaatgaagaaatcggagtgggaagagacacagggaaattgagccatattttggctatcggctggaaccagcagttcagagatctgccttataaacatttaaaaccggtttgtggtacacaaagaggaaccagtgtgggaaggggcctttatgtggggctttcttctctgktggagtcccttggagtgccttgctgggtatatttctctgtcattcaggaggcacgaatgtggaggacttctcgtgacctggtcgtgatgtggcattcagtgcatgtccacagctaatggaaaaacacgaggactcgggtaatggttcttcctctcagtctttctattcctaacttttcacacatccagatggttccacactagtgcaaatgcctcactctcctgagaaacccagaaagaagagtggctggctcacaaccatggggttagcccctgctgggctgggagtcggggtggcggccaggaggaaaggcagaaaggggtgagccgaggtgttgcctagctgattttctgctgtgcagagctaatgctgacatttcatgtcaacttccccggttctctggggtctcctctcctctgagcagccacatagaacattccccacatatccaaagctgcccaggggagccgagagaagggactttgctgtcaggtccaagccctcctgacctccctgagattgatctgccagtgtcctgctgtccctctgggactggccacatggccatcgctgccccttgttgacacctcctttctgtgtgagttgtccccggccaataacaaagctgttccttgaaccagaacaaccagagtgcacttttccttccttagacggaagtagatcctggctagggtttctgcccaggcccttgttcccggcagtgtgactgtttacatggtttggcaataggtttgattctgattgcttcagagtggctggtctattttgtttcctttggtttccttcctccccaaattgtgacaggaaaaacagaccaaaaccaccctaggaaattgctggttgcctgtccccacgtgatgataaatgttgccctcttctggatatcgtttctctaccttacgaccaaacgcccgtcctatagagtgtctgattggatcctctgtcgcgtattctgatggtgcctgctggtttgacgtggagctatcctgtgaaataaaacagcttaacttttctcaaaaaaaaaaaaaaaaaaaaactcgtag

SEQ ID NO: 209 - DNA, 1421 bp, Homo sapiens
gaattcggcacgagttcaagtataaattgtttttgacattaagaccaactcctgttcattacaagcacctgaccaactgtcttaatagaaggtactctagactcagtagcttataaacaacagaaatttatttctcacggttctggtggctaagaagtctgagatcaaggccccaataaattaggcctctgatgagggcctgtttcgtgattcgtagatggtaccatcttgctatgttctcacataatggaaagggaaaggcagctctctggggcctctttttattagtgcacgaatcccattaatgaggaccccacccttatggacctaatcactccccagccacgcctcccaatasgwtcacattggtaattaggtttcaacatatgaattttgtggagagacaagcattcggaccataacaacaacattcttaaaactaccattgtaggccaggggcagtggctcacaactgtaatcccagcactttgggagcctgaggtgagagaattgcttgagcccagsakttcaaracctgcctgggcaacatagtgagacctcatctctacaaaaaatttaaaaattggctggggtggtakagcaagatgttgtctcaaaaaaaaataaacaccattgcaggctagtcagccactattasattgtggaatctactgtgtattttatgtaccagaaatccagggtcttaaacttttttgctgagctctgaagataccaccaccatgcatcatattttcaagtagcctctaggaaatgccttgtagaacccaaattgaaaactaacgtataactctttatgttgtgaaggtggtcctaatgaaatctaaccatccccaaaagtgtcttccatacctgactcatacctttagcaagtgacatcacattaaatttgtcaaaatcagtctttaataccttatttagaattatgcagctatagaaggaacatggaggaaattatagagctgtgctgcccaatatggctagccactarctcacatgtggctgtttaaatttaattgacttaattgaaaatataggtcctcacttaaactagccacatttaaagttcacaatagccacatctaartagtgactaccgtattgacaacgcagatgtagaactatgtagaacatttgacaatactgtctagaaagtactgatacaaaaagcactttagttgatarttgcttatatatttatataaaaatgcctatatgatgacttctcaagagaaaagattgtttataactggaacctataattttatttcattgtgccagaaaagtagcttttaaatttataaattctacttttttcccttaaactcctacctatctccccttttatactaataatcttataaaaaaaaaaaaaaaaaaaaaaaaaaaaaaaaaaaaatccg

SEQ ID NO: 210 - DNA, 630 bp, Homo sapiens
ggcacgaggcctttcattgcctgcctgtgctggccatgcttctgctaccaggctgggcctgctcatggggcccagtttctttttcctcttcagtgtggccttctctatcttcagggttcaccttgctcttcctcctaatctgataaagaatgtttcagacctgtgatttccccagattggactcctgtgttctttcattcgacattgatggttctcagtgaggctgcaatacagtctttctctcaactatcctacagattctcttttgcaacagctactaccttctactcattccttcctcctccacagtcctctcttctctcatgagtcttctgagactatcaggcggctggttctccaccacagggctatctctctacatctctgacttctttgcatgactgctgcacgctgggctctctgggccacttctcccacccgaactaagccctgcccccctgtctctgctgctttgattccttacatgcttgatttctgttttgagacttatctgacatttattgtttgtaatgatccttgtggaacccaaatcctttgatatgactacctgggcattggcccaaatcttctctgaaatttctatttgggttaaaaaaaaaaaaaaaaaaa

SEQ ID NO: 211 - DNA, 1408 bp, Homo sapiens
  SITE (1401): n equals a,t,g, or c
  SITE (1402): n equals a,t,g, or c
  SITE (1403): n equals a,t,g, or c
  SITE (1405): n equals a,t,g, or c
  SITE (1407): n equals a,t,g, or c
ggcacgagtaatacagttaggtgccactgccttgattggtgccaaggcaccaggaattttacccaccattgcttttgcaccatcactgcatctctttaacacagtgaaagaggcaagtagcatgtcagtgtcattgaatatgaatgaaaaagttactagattccataatgctttcctttttccaaatcattggtattcgtgattcccttaattatgatcctttgtgttgtagatatttcaatgctaamaacyggttctagtcttctcaaagaggaggaggaagatggtcaagaaggcagcattcacaatctaccacttgtaacatcccaaaggccattttatgatggacccatgccaactccccggcaaaagccatttcagtcaggttctacaccgttgcatctcactcacagattcatggtgtggaactctattggaattattcgctgctataatgatgagcaagacaatgccatagatgtggagttccatgatacctccatacaccatgcaacacacttatcaaacactttgaattatacaatagcagatctttcccacgaagctattttgttggcatgtgaaagcactgatgaactagcaaggtaaactcaagattattaggaagaatttggcactgttgaactgttagatacagttgttgaaattaaagacaaaaagttaataaaacaaaatttattttttgtaatatgaaatttcagaagagtttggtacaaacaccagcacacccaaaatacctcagaacatatgtctgtttttgccataatgattccctcattacatgctctaactacatagcaaaatgacatggcatagttagtaatgcaagagatgggattttttttttacattgktaagtgctttttttttttttactattataagagtaatatacattcattgtaaagaaaaaaaaccagtatacagtatagaagtttcggaaaatgaaaactcctcccagaattctactctcagatataactgctatttacaatttgrtatgtatccttccagatttctttctatttgaacctcccttattttaatttactttattgagatgtaatttatttacaataaaatgcacccatttgatgagttgacaaaggtgtatatacacagataacccctaccacaatcaaaatacagaatgttctttatcacccgaaaatgttttcttatatccctttgcagttagttcaaccctagccttggccaactattagtctagatttttgtcactacgtctttatcacccaagaatgttttcttatatccctttgcagttaattcaacctgagccttggccaactgttaatctacatttttgtcatgatggattaaatttaaaatctctcttcgagaaaggaaaaaaaaaannnanana

SEQ ID NO: 212 - DNA, 785 bp, Homo sapiens
agagcggcacgagcggcacgagtcctggcctgcgcggcttccggatccttggtctgcgctccagcgtgggcccggctgtgcaggcacgaggtgtccatcagagcgtggccaccgatggcccaagcagcacccagcctgccctgccaaaggccagagccgtggctcccaaacccagcagccggggcgagtatgtggtggccaagctggatgacctcgtcaactgggcccgccggagttctctgtggcccatgaccttcggcctggcctgctgcgccgtggagatgatgcacatggcagcaccccgctacgacatggaccgctttggcgtggtcttccgcgccagcccgcgccagtccgacgtcatgatcgtggccggcacactcaccaacaagatggccccagcgcttcgcaaggtctacgaccagatgccggagccgcgctacgtggtctccatggggagctgcgccaacggaggaggctactaccactattcctactcggtggtgaggggctgcgaccgcatcgtgcccgtggacatctacatcccaggctgcccactacggccgaggccctgctctacggcatcctgcagctgcagaggaagatcaagcgggagcggaggctgcagatctggtaccgcaggtagcgccgccgccgccgccgccggagcctgtcgccgtcctgtccccagcctgcttgtgtcccgtgaggttgtcaataaacctgccctcgggaaaaaaaaaaaaaaaaaaaaaaaaaaaaaaaaaaaaaaaaaaaaaaaaaaa

SEQ ID NO: 213 - DNA, 1767 bp, Homo sapiens
  SITE (183): n equals a,t,g, or c
ggcagaggagccgccgggtcacccaatgccccagcctggcttcatcccaccacacatgagtgcagatggcacctacatgcctccgggtttctaccctcctccaggcccccacccacccatgggcttactaccccccagggccctacacgccagggcccctaccctggcccctgggggcaccancagccacagtcctggtcccttcaggagctgccaccacggtgacagtgctgcagggagagatctttgagggagcgcctgtgcagacggtgtgtccccactgccagcaggccatcaccaccaagatctcctacgagattggcttgatgaatttcgtgctgggtttcttctgttgcttcatgggatgtgatctgggctgctgcctgatcccctgcctcatcaatgacttcaaggatgtgacgcacacatgccccagctgcaaagctacatctacacgtacaagcgcctgtgctaacggagctgggactcgggactcccccgcctgtcagtctggccccctgtgctttgctccctgygctcagtggtcactttcccgctcccacttggggctgggagccgtgccaccatcccctagaagtcctgtcctcttcaccctgccctacctgagccgctgactcttctggcaaaaattctgttgggatttaaggccaagggtcagtgggtggcagggggctgrcaatgagcttgtgtgttgttggtctgcttggtgtgtgtgatcgggaagataagctgggaggggtctcctgctggggtcctgatgcctctgtttccaaacaaggtacaggttcagtccagactctttccccctgggaccaacagcagccagagcagttagccagttagtccccaggcctgtggcacaggcgtttctgacctgctgggccgagaatgggtaagttgtctggagtcaggtgggcccacgtaggacagggtcacaaagcctgggtttgtttctgggtactttgcgcctctggggtgctagaggtggggcatggtggctggaagtaaaactgccaactctggccctcagaactctcaggtatagaagcccaggatgtctaataccctgtcccagtgcccgagagctgcctggtgtcaggtagagaggacactgtacctgggtgaatgatcagaccctggtagctaagaaggaacttgtccctttgagtcagtgtgcagaccccctttcaggccatgcctctgtgaaccctgtattgctggggccggaaggagcccctgagcctagccccttcccgtctgccctgtgtcctcactgcgtgtgggtatgacctctgcctggtggctggtgtatcccaactgggcaagagatggcagagggtcccccttgtgggtgcgcttggatgtgcagagccttctccatggattttcttccctgtaagtgccgggcccctcaccccagctgacaggctgttgctgtgcctgctcacacctgctcctgcaggcacactgggctagggacgaggaaggagcagccacaagtggtagaactgccttggtggacaccagcctcgccctgtctttatttcctgaatggtttgtgaacttgctcacctggaccactgtatcctgccactgtccttcctggtctcgcactgccactgcatggcctcctgtcactgtgaatcgtggcccagtctcagtttgtagtttctcattaaattggccctttcactcccccgcaaaaaaaaaaaaaaaaaaactcgagggggggcccggtacccaatc

SEQ ID NO: 214 - DNA, 781 bp, Homo sapiens
ggcagagtgctaatcaccctatggaaagaataataaagcatggaatgaacaagcaaatagcaagagctcttcaaagaaagttgtcattaacactttacagagaatagaggtaggctcccccaggaaaagtttgcataaatagccctgggagcagctgagaaagaggaaatgaaatgacattcaattaactcctaatttgctgttgcagtttctcctgaactgagttcactccagaatttaccaagggatcaggctgcttaagaactaattacaatgaattctccatgagcctgctgacagtctgtcctttctatgtaagtcctggggttgttgccagccaaaaaaccttaggcaaagttgtcttcttttagtaaaggttttccagcctccctttaatttttaccaagaaaagcacagcatatcaaggcgttagacagctttattatttctcttaatgtcaagttatcaaaccccttagaagcctggagagagaggcaggtcatggtggctcacacctgcaatcccagcattttgggaggcctaaatgggcagatgactcaaggccaggagttcaagaccagcctggccaacatgttgaaaccctgtctctactaaacatacaaaaattagctgggcctggtggcgcatgcccataatcccagctactcaggaggctgaggcaggagaatcacttgaacctgagaggtggaggttgagtgagccgagttcatgcagcctgggtgacagaataaggctccatctcaaaaaaaaaaaaaaaaaa

SEQ ID NO: 215 - DNA, 2115 bp, Homo sapiens
  SITE (1310): n equals a,t,g, or c
  SITE (1351): n equals a,t,g, or c
  SITE (1861): n equals a,t,g, or c
  SITE (2091): n equals a,t,g, or c
ggcagagtgcgcccggcccaattacttctctgtaatttttttcccctgaggattggtggggaaaaaaaatgcttggcacataacactccatgttaagtttcaggattatttcttctttttacattattttagttttttgttcatatgtactcagggctcacactttgcttggctccgtaagtcctagagaaaaatggtatgagaaatgaattcacatgaagcattagtgccttagtctcttactgtttttacctttcccgtgaatatttgtgctacaaaatggtgtccagaaaggcagtgcctcagcgagataaatatgtttctaatcttagcatcttgggcagagtgaggctggcatctgaggtcagggaggccacagggccacgctactgaccgcattggtaacagactccattargttgacagaaaggttaaggttcctggaatctgtctctaaatyctccgtaccccctcattaggttagaagccaatgccaatacaagtaaccaataccaaaccctctcttgcttacagaggcattattaagttgggggctccctaagaacaattcattgcaaataattgttggcacatttattctcatggcacaactttcaaaagcaaattaattataaactggttgcaatttaattcagtttgyctggattatgtgtttgcaaggcctagagtacatttggcaccgttgctggcacatttggattttaatgtctttgacaagccacagcttccttggcctgggtaaacggcctactgccatacggtcatttaactagattgcgtcagagtgactctttagcttcgcggtgggtcttcagtttacaacctccacgccaccccatcagccgcacgggcatagatctcaacatgtatcaggaaactggaagaaagctgtgaacagaatactctgagaaaatgatggttaatcgtgtagaaaagtttaactatttgcatcagcacaatattacacaggcacatacgactttcagttccctaaacctgagaaaaggtttaacaacattgtgtgaaatctgacatcttgctattcatataaatgtgaaaggcagattgggaaaaatacagtaaaatccccgcttttgtgcagagaatggtgcatatttttcccctaattatggaaggtagccttttatttcttctgaattcattcatttctgagcctgtgttttcagcttgcttatgaaactcaattataaaaccagggktaaaaattaagtcaagtcacaggctatactcctctttgattctggggctcctgagaacttccagccctntgccactggcttgaaaaatctctacccttacaaatctctcnragctttcatrmacctytctacacagsagattaattaaggaaaaagatggaaaactcctggcaccattttatctttccaaactgtgatttgcctcttccccctaaatcttcccttccctctmttctgctcctttctcaaaaagaaagtgtatgattgtcaactttctgagttcaagacagtggaggattaaactggccttactgagatttgaacttgtgactcaagtcattggattttgtgaaagaggcccaaactctccggactggacaggttacagctccggtttctgtccctctgctgccttttcctgggtagcatgatgatctctggcatttatctatctatgaggcttgcaaaatcgcggcctgtcataatggtaamtaaaatgtgttaaagttaatatgaagaagaaaggagcaattacaactgcttaaaacagtcttcaaatatacttaagcagaggtttgccacgtaaacacacaattaaagcaggaatttgtgatggatgncaagggtttgacggtcccagacatactgtttactggtgtagttagcagatggataagtcaactgatcccagatgtgcagcttataaatataaactcatgtcttactagtgatgtatgtctgcaagtagcaacaaattactttctatttaactcttgactgtttactagggggagctttgtaatgctcacttgcttaaaaaaaaaaaaaaaaaactcgtagggggggcccntacccaatagccttatgatgaaac

SEQ ID NO: 216 - DNA, 1148 bp, Homo sapiens
gccattcacctattgatgaatattggagttgcttccagttttaggctactgtgaaaaagctgctctgaacattcatgtgcaagtgtttttgtggatatgttttattctcttgggtaaatatctaggaatagaattttgggtcatatggtaagtatgtgtttataagaaactgatgttattttttaaattggctatataatttttcagttggctttatatttctactaggagtgttccagaggctcctcatcccttgccaacgcttggtattttcagtcttttagccattctactggagcagtagtattttattgtggttttaattagcacttccctgataactaataatattgacccatttcccatgtttctttttattatatgctttattttgtgaaatgtgtctatgagttttttatatattctaggtacaggtactttacaaatatttcccatttcttaataatgataccttggaagatcagatggttttaatttttaggaagtctgatgtatacatttttctaggtcactaattttgtgccctatgaaaactttatgtaccccatagtcaagtacattttttcctatgattttttaaattttataattttagccaaatagttatagtttttatgtttaggtctgtgattcattttgagttaaattttatggtttaaggtagaggtttgaggttcatgtttttttcctccattttagttgttctgtagcagcatttattgcaaagatattctttctcaatggaattatactggcaatattgaaaatctgttatctggactctattctgttccattgatctatatgcattttctttgtatcattaccaccttgtcttgactactttagctttgtagtaattctcaaaatcaggtagtgagtccttcagctttgttctttttcaaaattgttttggcttatatctttcttatataaattttagaatcagatcatcagtttctgcaaactgagattgtgttgaatctgtagatcaattttgtgtcttaacatcccccagcaaagttagaaagccaggcagtaatatcagagggcacaagcccagattgaagctggaagacatagtgctccagaaaggtccttccaaaaaaaaaaaaaaaaaactcgta

SEQ ID NO: 217 - DNA, 1131 bp, Homo sapiens
ggcacgaggccttgtgtcagtagtcagtggtgttcctttagtccttgttatgttaataaaaaagctttggtttttgcaagactttgtttttagagattctggaaaggaacatattaaccaaaaagaagagctgacttcaattttacttgtcttgaaaataactgactactaaagggatgtcagggaacattagtgaaaatggagaacttaaggagttaaagttttagctgtttttttcaaaggatattgtccttcaaaatctttaccttggcatttttgttactgtgatttaagatggttgtaattatcattgattgatgatacctatcaaaaggcaaccctaaccaaccatttctggctggattctgaatgccgagaaagaaaaactgagaaatttgtgaactattacaagtcgtctgtaaaatgagataataatatcaacttcacaaggtaatttaggctttcgtgaaaactagagtgtgaaaatgcttagtaatgtgctgggcacactgcaggtgctctacaaataactactgataactactttttttcatgagtaattgtacattttctttcttccttcctttcttccttccttccttccttccttccttccttccttcctttcttttcttttcttttcttttctttcttttctttctttctttttttgttttcttttgttttgagacaagatcttgctctgttgcccaagctggagtgaagtggtgtgatcttggatcactgcaacctctgcctcttgggctcaagtgatcctccctccttatcctcctgagtagctgggacaacaggcgcacatcgtcacacccagctaatttttgtatttttgtagagatggggcttcacttggtgttgaattcctgggctcaagcgatccacccacttcgacctcccagcgtgctgtgattacaagagtaattgtaaatttaaaatgaatttctttcccatcccaaaccagtatcaaaatgcaaatatagtaaattactttttaaaagagagatgtttaatggcagttgttggtagtcttttgagtctttaagtgggtatattatagaaaaacaacatatctctgcttggagggaagatttaactaaaaaaaaaaaaaaaaaa

SEQ ID NO: 218 - DNA, 1117 bp, Homo sapiens
attgagcttggtttccgccggcacccagcccgaatcaatgtgcaactgcgccacacggcggtagtcgcgcttgaagaaggcaaacaggttgcgcgccaggtaatcctggtcttcaggggtgaggctgccgacgatgccgcagtcgatggcgatgtactgcgggctccacgggttgacggtgctgacgaagatgttgcccgggtgcatgtcggcgtggaagaaactgtcgcggaacacttgggtgaagaaaatctccacgccgcgctcggccagcatcttcatgtcggtgcgctggtcggccagggtcgcaaggtcggtgacctgcacgccgtaaatgcgctccatcaccagcacttttggccggcaccagtcccaatacacttgcggcacgtacagcaattgcgaaccttcgaagttgcgtcgcaattggctggcgttggccgcctcgcgcagcaggtcgagttcgtcgtagatggttttttcgtagtcggcgaccacgtccaccgggtgcagcaggcgcgcatcggccgagaagcgttcggccgcgcgggcgaggacaaacagccacgccaggtcctggccgatgatcggcttgaggcctgggcgaatgactttcaccaccacttcttcgccggtcttgagttgcgcggcgtgcacttgcgccaccgacgccgaggccaggggctcgacgtcgaagcggctgaacacctcgctgatcttctggcccagctgttcttcgatcagcgccatcgactgctgcgagtcgaatggcggcacgcggtcttgcagcagcatcagctcgtcggcgatgtcttcgggcaacaggtcgcggcgggtggagaggatctgcccgaacttgatgaagatcggccccaagtcctgcaacgccaggcgcagctggcgccacggctcaacggcgacggcttgcgcggcaaccagcgccacggcagcacataacgcaccgccagcaaaaaccacggcaagggcagggcaaacagcaggtcatcgagacggtagcggattacgacgcgctggatacgaaacaaacggcggacggcgagcagcttcatgcgttatcgcttggatcaagggaacggctcaagcgctcgaagcgggc

SEQ ID NO: 219 - DNA, 963 bp, Homo sapiens
ggcacgagagaatttcacaatatgcttacagtaaatatttcctagcttgttgaaatgttcaattctttgttggctttcttcttgattctgtgggggtgtataacaagcctgaaggacattgtaatcatttcttacaaggtgaaaattaagaaagattgtgtatgagagcctatatagttgttttatccattatcatctttgattaagactttaaaaaaatgctatttccagttaatgcatttggccctattgaattttcagggaccagaaaacattaaaaagttctgcatcttataatggtaaccaattaagcttgagattgttctgaaagtatcaattgctttaaaactgttgtaagtacagttggcaagatctccaagctgaaacttacacgttaaaacttttgcctgtaagaatttgcacatgaatgttaatggaaaacacaaaacttaagatggcccaaaacaaaagccacaaacagttcatcatttggtgcttagtctttgtaagggctctctgtggtttgacttactccagctaccgttaaatgagggcaaatcaccttaaaacatgttcatttgattcataacaaggaaaattgggtctatgattttttgccaatcttagcctaaaagaaattgctttagcttctggtcagcactgattaaaatgtgaatagtgaagtggctatcctaaactggtttatctccacccacactatcatagatttcttaggtaaatacaattcttatctagtggtattctacttgtattcagaatactgtattaaaattttactatttcatttttgtattctgtgcttattttttttgtcacgcatgtatgcttagtataaatgtgtcacttctaaagttttgtctctgacttttagaaataaatttcagaaaaattgtttcaaaaaaaaaaaaaaaaaaaaaaaaaaaaaaaaaaaaaaaaaaaaaa

SEQ ID NO: 220 - DNA, 2884 bp, Homo sapiens
  SITE (8): n equals a,t,g, or c
  SITE (18): n equals a,t,g, or c
  SITE (19): n equals a,t,g, or c
  SITE (26): n equals a,t,g, or c
  SITE (52): n equals a,t,g, or c
cgaaaatnacccctcccnnaaggggnccccaaaacctggaaccccccccccnggtggcggcccctccaaagacctaaggggatcccccgggcctccagggaaatcggccccggagtacagagaaaaaaccaacaccttcctgtgcagtcctgttggaatttggacttgccatgaggtgttgaagccttgtttcactgagttggagagactggacctaaatggcgcacatgactttgctccagcctggcttaatttccctactccaccatcatcaacaaagtcgtcattgaattttgagaagcattctgaaaactttgcatggacagagaatcgttatgatgtgaaccgtcgacgacacaactcttcagatggctttgattctgctattggrcgtcctaatggaggtaactttggaaggaaagaaaaaaatggatggcgtacacatggaagaaatggtacagaaaacataaatcatcgaggtggataccatggtggaagttcccgttctcgtagcagtattttccatgcaggaaaaagccaaggactacatgaaaacaacatacctgacaatgaaaccgggaggaaagaagacaagagagaacgcaaacagtttgaagctgaggattttccgtctttaaatcctgagtatgagagagaaccaaatcacaataagtctttagctgcaggtgtgtgggaatatcctccgaatcctaaatctagagctccaaggatgctggtcattaagaaaggtaatacaaaagacttacagctatctggattcccagtagtaggaaatcttccgtcacagccagttaagaatggaactggtccaagtgtttataaaggtttagtccctaaacctgctgctccacctacaaaacctacacaatggaaaagccaaacaaaagaaaataaagttggaacttctttccctcatgagtccacatttggcgttggcaactttaatgcttttaaatcaactgccaagaactttagtccatctacaaattcagtgaaagagtgtaatcgctcaaattcctcttctcctgttgacaaacttaatcagcagcctcgtctaaccaaactgacacgaatgcgcactgataagaagagtgaatttttgaaagcattgaaaagagacagagtagaagaggaacatgaagatgaaagccgtgctggctcagagaaggatgacgactcatttaatttacataacagcaatagtactcaccaagaaagggatataaaccgaaacttcgatgaaaatgaaattcctcaagagaatggcaatgcctcagtgatttcccagcagatcattcggtcttcaaccttcccacaaactgatgttctttcaagttcacttgaggcagaacacagattgttaaaggaaatgggctggcaggaagacagtgaaaatgatgaaacatgtgctcccttaactgaggatgaaatgagagaattccaagttattagtgaacagttacagaagaatggtctgagaaaaaatggtattttgaaaaatggcttgatctgtgacttcaagtttggaccgtggaagaacagcactttcaaacccacaactgagaatgatgacacagagacaagtagcagtgatacatcagatgacgacgatgtgtgaaggatttcctaacagctttagaaatcttagtgtgatacatctctcatacagtttggggtgaattgtaaaaatgaagaactataatttatgtagtgaaataccccattagaagaggattttttgggggacttcaatatgaagaaaaccaagaatgttttgttgggctgtgttgaacattatttctttgtaaatgaatgttgtaggaatgaggacttgggttggtccaacattgactttcttcatcactgcaacatttctctgactagcaatgtgacgatgtaacaaatgagattttctcatttaataataaaaaattgtgtaatgttttgcaaagcttctgtcttaaaatgtccaggtcttaagaaaaaaggcagcttacactgttttgcttgcagagtcatatctttttcgtacaatggaaatcctcaagtccactttgtgcggtctccctctccttcccccaaaaaacaacaacaacaaaacaaaaaccaaaaaggaaaatgtagcatgttggctaaaactggagcaaagtgcactaaaacaatttcctgaactcacctgttgtactattcaccttttaaaccataaattgctctttagccatttgtagtgcagtaaatgttacaggaaaagacttggcacattttcttccaaatttyaagaggtgattttcaaaagctttattggggtatgttgtcagaccagggttttcagagttgatggaaaagagtcttgtgagaaaacttattttgataaattattacacacgcagaaaaactgatcacactgactggatctgtccacgacatggaaaataaactggattttcagaatatkgttgttttctgtagtgttcaaggtattgtttctaaacataaacatactctaaacatgctttattcacttgttaaagtcatacttttaaaagtaatmccttactaaagatggtgattacttttccgaggtcagaaaaggaaagctaagcgttttcattatcaaatacacaagcttattaaatgaatgactgttaactactttattttcatttgcacattaattttggaattgtttctgttttgctgctgacggaaatactattttggctctgtgtatatttgtattttgatttttctggtttgtttacccccatttgcttttagctcccccttatgtttaaatatattctaacttatgtaaagagcataatcttagagcaaaaataaaaaaaaaaaaaaaaaactcgag

SEQ ID NO: 221 - DNA, 1014 bp, Homo sapiens
ggccgagataattctggaagtgatggattcccaccatatgcctataaaatgttagaatatatttttctagggagaaggttcacacttgtcatcaatttctcaaagtatcggtaatgggctggggcagaaagcccaggggttaagatcagctgttccataaatttcaaactgagtcattttggttttatctcagtttggcagttactaaatagacttagtcaaaggaggataattgaaaaaggacaggcagtccaggaagagactaaggattcttgaatacagaagggaccttttgaacactttacatgcctacgcacctgaaatgttagtattaacttttgtttcagtataccatttgaatgtgtttatgtatctaatggtattttgtgggtgcttttcatgatcagcaatggcatttgtactgaattacatttttttctgttaataggacttaattaaaagtactgcctacagtgtagtttaaattttgtaaacgagagaaaaaattctgcataaaggttcatgaatgtgtgggcaggattaaatataccaaccaatcctgttaaaaatggctgggttttagttttatattttgcattctactgtgtcatggtatgtactggtagtaatggtagaaacgtagaatctatacacacacacacacacacacagacacacacacacagacatgtgtccatgttttaaagcacttagtaatggcaagagtcctttttatgtatgtaaagatgtgatttctgattacatttattactcaattttcttgaaaagttaaggatgcttaattgttaacagcagttagttaaaagcagaagatagcattttaagggagctgacatgggaggatcacctgagcccaggaattcaaggctgcagtgagccgaaatcatgttattgcacactacactccagcctgggcaagagagaaaagactctgtaaaaaaaaaaaaaaaaaaaaaaaaaaaaaaaaaaaaaaaaaaaaaaaaaaaaaaaaaa

SEQ ID NO: 222 - DNA, 743 bp, Homo sapiens
ggcacgagcagggctgtcctctctccacagccaacagccaggccttacagtggggcaggcttagtgactgtgcctcagttatgctgtacctgggagtgggcaggccctctcccatgtcaccatcaaaacccactgatgaaggctggtgggagtctgagggctgcacccgggtatggtgagttcccctcagggattgtgctgagcgccttggcctggcttcttggctccgcccacctgctctccctgccaccaagttgtcttccccgggtggcatgtgccacttggctgcctcgtgcctgggcacagtggtgcctattatgggccctccaggtggctctggtgctcagcctgctgtgagcaggaacagctgagtcccaggggttcttgcacacagcagggctcgggtttgaatccaggctctgctgcttggtcgctgcatgagcttctgctgtgctgacctctctggtttgtctcgtcatgtgtaaggtgacaccagatacctacctcttagggctgccccgagactaaaataagaccatgtgcatgaaccacttaccaaagtgcctgttgctctccaggtgtgcctaccgcatgttgccgctgctgtttctgctgggacgtctgactccagttccttctcccctctccagtgacaaggtcatttacaacttacatttacaatttatagtgtttaccagtattaaattctcagccactcctaaaaaaaaaaaaaaaaaaaaaaa

SEQ ID NO: 223 - DNA, 1118 bp, Homo sapiens
ggcacgagaaaaaacccaggagagaacacttgttaccgtgatacacagtttactgggaagtagtgcagaaattgattagtgtgacatggcgttttaagtggatcctcacaacacttgagcccaccacagcagcagcagatgtctgtggtagtaggacattattatcacagtagtacagtgtagtctatggtaaattttatgcagttgtgatacaaattaaaaagaaaaaaataatgaatttaaaaatatgcagttgtgagttaatattgcatctttacatttctgtcaactgcagatgtcaccatctatggtcagtaagtgattgtgtgcataaattttgataaagtttaactttgtataatagatttgtgttgattttatggtagtaaatggataaaataggctagtatctacatatattttatgccattcaggacatatccttttcctaagtttttttccaatttttgtaggctgtgggagttcatctgtgagttttycagattgttataaatcgccaaaaaattgcccaatatatttattgaaaaaaactctcttgtaagtggacccatgcagttcaaacctgtgttgttcacgaatcaactgtattgccaaatttcctacagaaattgtgcattaatattcttaccagtggtatatggccaatcatatccctttctctgctgcctagtcacccctaggtattgttacattattccataaatatttattgaacacttattatatccaggcactcttagaggtgctgggaatacatctatgaaaaccaagtccctgccgtcatggagatttcattttactgaggggacacagatagtaaacagcactttggaaggccgaggtgggtggatcacgaggtcaggatttcaagaccatcctggctaacacggtgaaaccccgtctctactaaaaatacaaaaaaattagccaggcgtggtggcagacgcctgtagtcccagctactcgggaggctgaggcaggagaatggcctgaacccgggaggtggagcttgcagtgagccgagatcgcgccattgcactccagtttgggcgacagagcaagactctgcctcaaaaaaaaaaaaaaaaaaaaaaaaa

SEQ ID NO: 224 - DNA, 1485 bp, Homo sapiens
ggcacgagcttaaattgctgtactagtaggacaagcaaggctgcgcacaacaaagttaatgggatataatccaaataaaattatagttccattagacaaacaacaaattcagcaggcttatattaattcccaggaatggcaaattaatatggcaggttttactggtgttcttgataatcattatcctaaatccaaaatattccaatttcttaaattgacatcatggatattgctttccattactcaaaaaacccctattgaaagggccattactgtttttactgatggatctagtaatggaaaggcctcatttgtgggacctcaacaagtttttcaaactgactttgcttctgctcaaagggctgaacttatggctgtgataacagtgttaaaaacttttaaatagccagtaaacattgtttctggttcagcctatgtagtgcaagccacacaaaatattgaacatgccttaattcaaaatgtgactaaagaccaacttaatgttttatttcattctctacagcaagcagtacaacaaaggcattcccctttctatgcactcatatgagagcacatactaacttccctggccctttaactaaatttaatcaaagggcggataattatatggggaagaggattttcttgtgtctctccaggtaacaatcaggcacctgtgtgggtgcccaccaaacatctggagatctatcatgagccacaccaggaagagagggctctgggaagagccagagctcctgatatgagtgatggtacaaatgaacatctcagagacaaaggagaagaccaatggagtctgtagatgcggaagccacctctggagagaaagccaccactgagagcaagcaatgatagctgtggcggttttgcaaaaaagaaaagggagacaagcgcccagctatagttaccaataaagcatggtactggtattaaaataggcatgtgttctgttccaatggaacagaatagagaacccagaaacaaagccaaatatttacagccaactgatctctgacaaagcaaacaaaaacataaagtggggaaaggacaccctattccacaaatagtgcagggataattggcaagccacatgtagaaaaatgaagctggatcctcgtctctcactttatacaaaaatcaactcaaaatgggtcaaagtcttaactctaagacctgaaaccataacaattctagaaaataacattggaaaaactcttctagacattggtttaggcaaaaagttcatgaccaagaacccaaaagcaaatgcaataaaaaggaagataaatagatgggacctaattaagctgaaaagcttctgcatagcaaaagaaataatcagcagagcaaacagacaacccacagggtgggagaaaatatttgcaagctatgtatctgacaatggactaatatccagaatctacaaggaattcaaacaattagcaagaaaaaaaaaaaaaaaaaaaa

SEQ ID NO: 225 - DNA, 1249 bp, Homo sapiens
tgctggtaaggcgctctcccccacaacccaccaacattttaacaaatatctctgaatgacaggattacacatgactttactcatttccttcatatatgtcagtactttttagttttttcagtgactatatctttcatactcagacatttttaataaaaatgagaagtaggatgctgagttatctacataggatgaaggtagtagtcaaatgtgaaaacagtttgtgcaagagtctcctcccttgactaacatcagctggggacagtgtggggacagtgtcttcttcagtgatgtcctcaggcctgggagaaccacttcacagagtggactttgatacgtgtttgtggcattaataattagggaaagatatatgatgaaaagaaaaaagcaattttggaggagacagctgtttggttttcaaatgattgctattgaagattcgctctacttgaataaagtgaaaaggatagtggtgtagaactaaaaggcttgactggacacaggcaggatttaataaaactctcatttttaaccccagtaatcttttaccagaaagaatattacaggggtcgggaagtggctgtctccatgaaaaacaaatctggcagatgttttttaaccaagaaagtcagtcctctgtgggaatcctaaatactggtcttcggtcacttgctagaaatacacataaaagcaagtgtgggatgtggggcagctccattttctctgtgtttaacaagcctgtttctttcaaggagaaatattaatggatttctctggtgcccaaacctacttgtggaaggaggagcctgaccttactgtctccccgttctacataatctgggtgttcagccaactggcacagatgggccagacgccaggctcagcaacgtgccctgtacgcagctttctacctccctgaaagcaatcacctataaatgtctggtgcgaagactacaaaagttgaactagttagtaaaatgctaagctgcttccaacaagacattcatctcagctattgctttgatgggtgaatttaaaactctgctaaaggaatctttccaggaattccatctctaaagcagcacactccgggaccttagtggtggagaatccacacccatatttttcccccaaaaatcacttgtctagttgccatgtctcctcaggactatattgtatcactctgatgtttctagaatattttgtgctgagtgacttgcttagaaaaaaaaaaaaaaaaaaactcgag

SEQ ID NO: 226 - DNA, 2082 bp, Homo sapiens
ggcacgagattcccagggtcctgtttgagaatgtggaggcttttgccatgggttttattgggctgatggttgccatgattttcattatgttgtttggttcctgggatcataaaaatgtttgcctcttcctagagtacctaggatcattgaaaagaaaagggataaaaaagcccctgcatttgtagctgctacatagcatacaaaccatggcttccttgagggaaaagggccagctctggctctgggctagggaaaatcatcaaactggaagggacaggacaagcagccacacccagtctccacctccctcccatccaaggacactgaggcccagagagatgctcatctaaagctggtctggaatcctggtcccactctcggtcaggtgctctttctctccctggtgacttgaggctgtgagtagagttgggaaaggtaaaggagtctgaattctgctgaactagtgctttgggacacctctaggagtggaagaaatggtcagatttacaggcagcatagctcaggaccttgtccaatcagctgtcttgaacacccactttggtccacggttcacgttcatgttatagtcatgagcccctgctcctccgccagtctagactcaaggaagcagtggcacaaatctcctggctgttgggttccatggagcagagagcctgaacccacccggaaaccaagtctagacaaaacagagctttgaggtttacacccacaacctttgtaccgtcggaagcagagggtgccaggggatccactacacgctccctgggaagcagaggccagaggtgtcgcatttagaagatgcgtcaggagaaatacacccacctaagttagttctcaaaaaaattaatagtaagagaagtctgaaacagccactggagcaaaatcaaacaatttcacctttatccacatatgaagagagcaaagtttcaaagtatgcttttgaacttgtggataaacaggctttactggactcagaaggcaatgctgacattgatcaggttgataatttgcaggaggggcccagtaaacctgtgcatagtagtactaattatgatgatgccatgcagtttttgaagaagaagcggtatcttcaagcagcaagtaccaccagcagggaatatgcgctgaatgtgggtaccatagcttctcagccttctgtaacacaagcagctgtggcaagtgtcattgatgaaagtaccacggcatccatattagagtcacaggcactgaatgtggagattaagagtaatcatgacaaaaatgttattccagatgaggtactgcagactctgttggatcattattcccacaaagctaatggacagcatgagatatccttcagtgttgcagatactgaagtgacttctagcatatcaataaattcttcagaagtaccagaggtcaccccatcagagaatgttggatcaagctcccaagcatcctcatcagataaagccaacatgttgcaggaatactccaagtttctgcagcaggctttggacagaactagccaaaatgatgcctatttgaatagcccgagccttaactttgtgactgataaccagaccctcccaaatcagccagcattctcttccatagacaagcaggtctatgccaccatgcccatcaatagctttcgatcaggaatgaattctccactaagaacaactccagataagtcccactttggactaatagttggtgattcacagcactcatttcccttttcaggtgatgagacaaaccatgcttctgccacatcaacacaggactttctggatcaagtgacttctcagaagaaagctgaggcccagcctgtccaccaagcttaccaaatgagctcctttgaacagcccttccgtgctccctatcatggatcaagagctggaatagctactcaatttagcactgccaatggacaggtgaaccttcggggaccagggacaagtgctgaattttcagaatttcccttggtgaatgtaaatgataatagagctgggatgacatcttcacctgatgccacaactggccagacttttggctaaaaaaaaaaaaaaaaaa

SEQ ID NO: 227 - DNA, 2294 bp, Homo sapiens
  SITE (2287): n equals a,t,g, or c
ctgcactcagccctgatctactttctgggaacctttctgctatccatattgatcgcctggactgtgcagtatttccagtctgtctcagcaagcgatccccctccaagaccatcccttgccttagagctgatgaagaaagcagcttccaagggattgcatcaggcagtcaatggcctgggatggtattaccacaaattcaagaaaaattacgccaaagcagcaaagtactggttaaaagcagaagaaatggggaacccagatgcgtcatacaatcttggagtcctgcatttggatggcatcttccctggagttcctggaaggaatcaaactttagctggtgaatatttccataaggctgcgcaaggtggacacatggaagggaccttgtggtgttctctctactatatcacaggcaacctggagacattccctagagatcctgagaaagctgttgtatgggcaaaacatgtagctgagaaaaatggctacttgggccatgtcatccgcaaaggcctcaatgcctacctggaaggttcatggcatgaagctttgctgtattatgttttagcagcagaaactggaattgaagtgtcacagacaaatttagcacacatctgtgaggagaggccagacctggccaggagatacttgggtgttaactgtgtttggagatactataatttctctgtttttcaaatcgatgctccttcctttgcatatttgaagatgggagacctttactactatggccaccaaaaccagtcacaagacctggagttgtctgtgcagatgtacgcccaagccgccctggatggagactcccagggattttttaacctggccctgctaatcgaggaaggtacgataatcccacaccatatcttggatttcttggaaattgactcaactctccattctaataacatctccattctccaggaactgtacgaaaggtgctggagccacagtaacgaggagtccttcagcccctgctccttggcctggctttacctgcacttgcggcttctctggggtgctatcctgcactcagccctgatctactttctgggaacctttctgctatccatattgatcgcctggactgtgcagtatttccagtctgtctcagcaagcgatccccctccaagaccatcccaggcctccccagacactgccacgtccactgcaagtccagctgtgactccagctgcagatgcctctgaccaagaccagcccacagtaactaataacccggagccacgtgggtgaactgtgcactccagttctctccagatgagagagaatcttttcaacagctggtattgggaagctggggccagggcatgatcctgataaacaccttaaatgtcttgtcaactggatgcaaattttgcaattggtgtcattttttttaaagtcaaattacaaggaagtacccagatcaggcagtggtaataccaaaggtcatcaaacacatacaaggaacatcttgatcatagggcatgtggggaagtttactgggccatcacagacttttgttctagtgattgtatgtattaggagtcatagcatgccctacggcagatctggattcttatacactaagatgtgtcttaagaatcacagtgcgtgcttcatccctttattgaagaacagaaaattatgactactctacaaggtggataatattttggtacctgtgcttgccacagccctgttcctcaaagctgaattgatagatttctctttgacttccaagacctagcagttataaggcaccttgaaataaattgtttgtgcctggaaatgcagggagggcaatagctttgtaaattggtttacatttttctccttgaatttttctagggtcctagtgcttccgaatcatttaatggcattgtcggatatcttttacatttcaattgcaatccatgaaattacatttagaagattcttagtacttaactgtagtcttctccatgaattacacgttagaatagactggcagcaactgaatatgcagcaagtaagcctctagcttatagtttcatccctacccctcatgcctgcgtgagtctgtacagggatatgtgtgtgtgtgtgtgtgtgtgtgtgttagagaggaagaggaagagcagaatgtctgtatactacatgctgctaaggtagtgaataaatcagtaatgcaatattgtgggtccaaactactctttgcactactttatttacagtagtaaataaaattatttttatacaattgaaaaaaaaaaaaaaactcgaggggggncccgaaa

SEQ ID NO: 228 - DNA, 1255 bp, Homo sapiens
gaattcggcacgagacttgccagactcacatccgtgcagtttaaccacttcgttttccagaaaatcacattctgaattccgtgaaatcaggcttgcaacaagggctgtgtctgtctgataatatgtgtatctgtgtatcctatggaaatgcatttttaaactaagaagtgaaccattccaccagaacctttgattctgcacaagatttccttgctctgggaacaacccccaaatgcccttgggaggaacaacatgagctcaggaagcctctctttcttcacttaccattactaactctccaagcatagaaatccctgggaattgcgagaataactcccactattttaaaatttatattcagatttgtttcgtttcataagacacatcaaacaggcctatacaaaaggtttaggaaaagaaaacaatggtgagtcccggccctcttcgaattcactggcacctcatgcaagtgtaggaaggcacgctggatcgtctatctgattccaaagctgtcctttgccatctcatcccttggcctgccccccaaccctgaggatgcccctgccatccccccaacctcctcatattgcctctgaacccagatggcaatccatcccggttctctctgagggccacgggcttgggtagtggaaagggtgtttgggaaattgttaaatcagttacccgtagtagagctatttcttgtacttctaagttttctagaagtggaaggattgtagtcatcctgaaaatgggtttacttcaaaatccctcagccttgttcttcacgactgtctatactgagagtgtcatgtttccacaaagggctgacacctgagcctggattttcactcatccctgagaagccctttccagtagggtgggcaattcccaacttccttgccacaagcttcccaggctttctcccctggaaaactccagcttgagtcccagatacactcatgggctgccctgggcagccagcattcattgtaagttccctctttgaaaactggtgtgtgggtgttcagttctgtgtctggtgggtatggacagacagtaatctcctgtgatctgtgctagctgtgaggcagctctggaacgtgaagagctgtttggtttgaaccgtgaacaaaactgtgttttgagtttagctgacattaaagaaaaaagttcatcacgtgactgttaatgtaaacctggttattaaaataactatgaaattacaaaaaaaaaaaaaaaaaaaaaactcgag

SEQ ID NO: 229 - DNA, 895 bp, Homo sapiens
ggcacgagcagctctgcctgtagcaggagccctgaggaggaggaggaagaggatgtgctgaaatacgtccgggagatctttttcagctagggcataaactgtgcactgaactgtctgccgagagcagctggaggacagctgagcttccactggtgctgctgggccgcccgcctgtgggaatggggctctctgtgctcctacctttgtgccttcttgggcctggcagattcacctcaggccagaagcccctggacactccgggccttggggctgccgttctgagtgtgcggaaggcaggactcaaaatgagatcccatttgactccctctgtatgtactgtgccctctcctggctcttgaggctctggagtcccaattgtctgtgttagtcagtgaccaggttccagggaaaatgatgtcatgtggtggtccaacttactggaaccaaagagacagtactttgcaaagaaaaggatcactgccaggtgcactggaattgctacagtttagtccgcatgatctctcctgaaggaggaagcctgtttcaaaaatagtttccatcatgagtctatcaatgagctcccacctctccagccagcctagaaagcaaacgagctgcccacagttctctgccctgtctgggaggttgaggccacagtgtatagactggtaagccagacaggcctcctcccgcaagctgctaccttgctttcacctgtaccttggtccccgggcagctagctataaagcaagagggacaggagcccagaagagacactgaggacaagagatcacaccagagtacatgtctctgcctctgttttcagtgtggctttggacaggaatatatgaataaatcactgccatacaggttttccaataaaaaaaaaaaaaaa

SEQ ID NO: 230 - DNA, 1208 bp, Homo sapiens
  SITE (1164): n equals a,t,g, or c
  SITE (1166): n equals a,t,g, or c
gaattcggcacgagaagttatataccttgaaagtccctgccatgacacttattagaccagattttttgatatgttgttaagtcatcctgaccctgtttatgtacaaactcaatctttgtgtggttgatggtctacatgagatatgtcaagtgtttgtcaatggatttggtccatagtaaatgttcactaagaggaagaggcagtatttaggaacatatattctatgttaaacagcctaggttgaaatgttgacttctcttatttgctatgcgatcccgtgcaagttcctgaattttgctgtgccttggttttgtkatataactcctggaagtgtgacgatggccacatgagttcatacatgaaaacctcttagaaaatgcytgggrcacattaaaaactcagtaactgttagctactattaccttcaaaatataaccaagtgacaaaaggggagtacaactaatcctcagraaatcagattaatattctggctttgcgacctgtacaaagtacttaatttcccagtttagtgcctttgtctgtgaaatgatacgtaacttttatggcwattatgatgataaagtaagaaatgcatgccaagtgcctaacataaaatcaatgctaagaaatggtagctattattagtaataatgataaagaatktygcaaaaatttccctttgaatcctaggcgttggtcatattgaattacttgtagtttctcaaacatgttctcttgtttwcatgtgtacctgctgtcttgctttgctactccactgtattcttcacttgattgcctcctactagttcttcaagatgcaggtgtttccttccctggaaaacatttcctaaagtcaggggacgtgttttctgtttkcctctattattgtacttcttatactctctaattttctattgacctattttcttccaatataagacactttcttcttgtgtgattttcagataagctactaaagtcttggtttcctcatctgtgaaacagggatgtaaaaattaaatgagatgcacttggcacttaggccaatgtctagcaccttccccaatcccaagaacataataggcagtcaacaggtgtttacttatgaaatgaaaataatgatttacaaattttattcaatctaaaaaaaaaaaaaaaaactcnanggggggcccggtaccaattccccctatagtgaatcgtattaa

SEQ ID NO: 231 - DNA, 1165 bp, Homo sapiens
gaattcggcacgagaagttatataccttgaaagtccctgccatgacacttattagaccagattttttgatatgttgttaagtcatcctgaccctgtttatgtacaaactcaatctttgtgtggttgatggtctacatgagatatgtcaagtgtttgtcaatggatttggtccatagtaaatgttcactaagaggaagaggcagtatttaggaacatatattctatgttaaacagcctaggttgaaatgttgacttctcttatttgctatgcgatcccgtgcaagttcctgaattttgctgtgccttggttttgtkatataactcctggaagtgtgacgatggccacatgagttcatacatgaaaacctcttagaaaatgcytgggrcacattaaaaactcagtaactgttagctactattaccttcaaaatataaccaagtgacaaaaggggagtacaactaatcctcagraaatcagattaatattctggctttgcgacctgtacaaagtacttaatttcccagtttagtgcctttgtctgtgaaatgatacgtaacttttatggcwattatgatgataaagtaagaaatgcatgccaagtgcctaacataaaatcaatgctaagamatggtagctattatkagtaataaygataaagaatktygcaaaaatttccctttgaatcctaggcgttggtcatattgaattacttgtagtttctcaaacatgttctcttgtttwcatgtgtacctgctgtcttgctttgctactccactgtattcttcacttgattgcctcctactagttcttcaagatgcaggtgtttccttccctggaaaacatttcctaaagtcaggggacgtgttttctgtttkcctctattattgtacttcttatactctctaattttctattgacctattttcttccaatataagacactttcttcttgtgtgattttcagataagctactaaagtcttggtttcctcatctgtgaaacagggatgtaaaaattaaatgagatgcacttggcacttaggccaatgtctagcaccttccccaatcccaagaacataataggcagtcaacaggtgtttacttatgaaatgaaaataatgatttacaaattttattcaatctaaaaaaaaaaaaaaaaactcga

SEQ ID NO: 232 - DNA, 1021 bp, Homo sapiens
  SITE (977): n equals a,t,g, or c
  SITE (998): n equals a,t,g, or c
  SITE (1001): n equals a,t,g, or c
  SITE (1015): n equals a,t,g, or c
ggcacgagaaacaagctcattgttaattcatgcagttttaatttatgcataggagaattatgcaggataattacctgcagttgaaggaaaatgaatagcgtcagatgtggttaattcacgcatggtttacccttctatctctctatcagaaaagatttaaagtggtaaccaatctgaatgatatgcaaaattgcattggtttgctaagtagaagtattttttttatttgcatcacaaatagagttctcagatttggactgactagatttgaatataatttccagaacaatagctgtgattcactgacttaactcatatgttatctcttccagaagtgcccatttttcaaatcagtgcaaaagaagctatcttcatgggccccatgttagcctgagtatagtttcctttatgaggataattcaatgagaatgataattatttcctatatcaagatttgtgggagatttacggtaatgatcacactacttgttcccacattgtccctgaaccttcatgatccagtggcttccaaaaactgaaacaaacagctggaacaaattatggggcaatgaatggacatcagtggaaatttccttgtgacttttgtcaagcaatagatagctgctaaggcctctttgaactcacacctagtaattgagagaaggctaagaggtggttcaagtttactgaaaaaaaaaaaaaaaaaactcgagggggggcccggtacccaattcgccctatagtgagtcgtattacaattcactggccgtcgttttacaacgtcgtgactgggaaaaccctggcgttacccaacttaatcgccttgcagcacatccccctttcgccagctggcgtaatagcgaagaggcccgcaccgatcgcccttcccaacagttgcgcacctgaatgggcgaatggcaaattgtaagcgttaatattttgttaaaattcgcgttaaaatttttgttaaatccagnctcattttttaaaccaattanggnccgaaattcgggcnaaaaat

SEQ ID NO: 233 - DNA, 1661 bp, Homo sapiens
aaagatcttccagtgtaaagcaataggaatgaaacaagccatgagaaagcagaatattttgagtatattctcatgcctttctttaaaggagaagcgcctatctaaacagttacagaaacccaaattcaaagtagattaaacaagaagtaaatttgtaaactcttttaactgggagacaggaagtagggagggctccaggcacaatatcattagcagttcaatgtgaacgaagacccatgtcctttccaagcctccctctgccatcagcattgccctccttcccagggtcacagatggctatcaatggcaaaactggggttccgcgttctcttctcctcatctggcaagagaaaatgggaaatctctatcccaagcttggattaaaaattattttcatttttgtgttccagcaaacttgggtcctatgcccagccatggaccaaaaataggcttaatgtgaatgttatgtgctgattggattaaaataagttctgactctgaatctgggaatgtggtcaccttcctcagagacaagttgagaggttggcttatctgaataaaagcagagaatatgagatgctggagaggtgttcattaaggagaacattccctgaggtgaattaacggttagaattatctatctctgtatttatctatccacccatctatcatcatcatcacctcatctccctcctttctctctctctaaatatatacatgcgggtatgttgagtgtgtatatatttatttttttgtgtgtttatatggtgtgtgtgtgtgtgtattccaggcagatgtgtgcatatatacccaaactttcctgatgaccttgaaattaaatgggtcatgtgaagctaaagattatagaaccccttgattcctttataaacagtatttctaagataagatcaacactaatctttcaaattagttgactgtgtatagaacaacttgtttatttaaagtcatctagtctaatgcaatcaaggagtaaattataaataaccagttagcataaatggaaagaaaatagttccttttctttgaattcatttcatgtttaatttttcttgcgcacatatagaaatgaatagaaatattcccatttcaatgtgcaaattcagccactatatagtttgtttctttttggtagctaataataataaatttttaagtaagatctgattttgaaatatgaaaagaagtttatcctttcctgttttaataccacctgatacccgtttaacttactgtgtttgattcttggggacatttatgttcaaggttctgtcaaagcaatctattattcttgtttttacctgatggatcatggagaaaaataatggattcagttatgagaaacagtaatagatttttttaactgccataaatttctctccctgtattaaataaaaggatcaggaaaagataagttgaattttcctacaatgagccagctcttcttaaatttacctcccataaattgtagcaaagcacttttcatataatgttttatttatgtaattcagttatttggagatggtggtgagggatgtgagtacatcatttcatgttgtatttcaaatctcttttgacagaaaccctaagaatttgcaataaagaaaattcaatgttcaaaaaaaaaaaaaaaaaaactcgag

SEQ ID NO: 234 - DNA, 477 bp, Homo sapiens
ggcacgaggagaagtgacacagagtaaatggctgatcttctatattgtagtatattttgtccttccctcttccctgaggaacaaagcacgtatctttagtctctttgatatttattctgagaccaagggcttgcttgacctgatgattttccttcagctctctgaaggtgctttttccacaatccaagtgattctgatacacactaaagttgagaatcactgcactagatcactttgtgttttctgattttcaaggttgatacatagctttaatacagctcttctgttgacagttattactttaattttgcatttgttccttgtaagaatggctggaaactgtgtgttgacatttgaggatgggtatgcaaggaaaaaatatacttctgtttacttactctgactttgaaatagtgttatttttctatatctgaaataaatgcttctaccatagaaaaaaaaaaaaaaaaaaaaaaa

SEQ ID NO: 235 - DNA, 779 bp, Homo sapiens
  SITE (766): n equals a,t,g, or c
  SITE (767): n equals a,t,g, or c
  SITE (773): n equals a,t,g, or c
ggcagagggtaaatctgatgtcctcccaaagtgctgggattacaggcgtgagcaccgcgcccagccaccacataatgttttataatctaagacctctgcatcttacgtaaatttaagtgaaagtagtaggttataaaaataggaccttcaccaaccatcatttgatatcaagtatatcaaatgctttcagtagcaactaacagaatatacaattcaaactgatttttacaataagggggattattcttaatcacctgagctttaagcatcagtagatctggtagctcaaattttttgaactatgttttttggattaaatgcttcaaatagcattttctcccccaaaccacctgctccttctaattgatggatttctcacatgagtcacaggcttgaaacatcatgagcatctttaacagtccctttgcatgcccccaacgtctgtcagttgccagatcatctgcattttgtccccatgctatctccttctctttctttcttcctgtttccaagaccaccacctaatcaagtcaaactggtgcagtaacttatcaactagttccctccccttccagcttttcttgctaattaatcttttcaaagcgtacattgcagctgggcatggtagctcatgcctgtaattccagcactttgggaggccagggcgggaggatagcttaaggaaaggagttcaacaccagccttgcacaacatagcaagacccctgggtctctgcaaaaaaaaaaaaaaaaaaaaaaaaaaaaannaaaaantccgag

SEQ ID NO: 236 - DNA, 972 bp, Homo sapiens
  SITE (62): n equals a,t,g, or c
ggtacttcaaaacccccgaggcctagatctgctatttctctcccaaggagggttatgcgcantctaggagagagttgttgtttctatgccaatcagtctggggtcataaaggatactctccaaaaagttcgagaaaatctagatagacgctaacaggaattggaaaataacacccctggtaccaaaacatgtttaactggaatctatggctaactactctaatcactggattggcgggaccccttctcctcctcttgttaggtttagtcttcgggccttgtatattaaattggtttcttaaatttataaagcagttcatagcttctgtcaaacttacgtatcttaaaacccaatataactcccttgttgtgactgaagaatcaatgatttgattacccaaaacatgagtggggaatgtgatacctaccctgttttaacctgccccaagtttacgtgtacagtgggtcagaagggtgacttctgacccttctgctcagagtgactctctcttagctgagatagctggacactctccattttagcttcttcacttgcagtccccttatccccctcccttaagggaataactagtgcaagctgactccaagcacatccaggaatgcacttactgataagatattgaggcaagctgtaccagcagctcctggggacgtgctcggcggatggtacccaagcccctgcatttatctctttgtgatagtttaagcccctgcacctggaactgtatttttctgtaactatctctgtaaccattaatttttttaactttttgcctgttctgcttctgtaaaaattgcttcaagtaggctccccctcccctatttagaccatggtttaaaaagaaatctatcccgttcttcgaggccaagagaattttgagctctagccatctctcggtcgccggcaataaaaggactcctgaattagcctcaaaaaaaaaaaaaaaaaaaa

SEQ ID NO: 237 - DNA, 1885 bp, Homo sapiens
gaaagctgaaaggtgctggaagcctcctgcactttgggaatatacagtcaggaacaattgtcaggagttctgtagttgattctgtaggttgggattgccataaggttggttagaaaaaagatgtgcgaaagctttcctgagggtttttgcccttgctttcacatgtcccataattgaaattaagaactgctggcaactggttagtgaccagtgttgaaatgggaaaatattactggcttatgcttttgcttatagatattgaaatttaataaaatttaaccatagttacatatgattctatgaaattaggtaggctcttcaagaaaaatgtgagcaatgtaaggcagggtatttttgggaggggggtgctttattgtataggcaagctctcgaacagtgtctgataattagtagtgtctgacaatatttgctgaatgagtgaactcatggtaacataactccagtatggcagattgattcttggtgcttttttccagtggcaaacttttatagaaattggagagtttcgtaaagacttttaaaaagttgtcagaattacctattatgtcctttcctagataatcmatttggaaacaattgctggtaccttaagcccgatgtatgcctcctattatagtgttgaaaatgttcytttgacaaatgcatcaatgaccaggcmcatgagamcagtgcacagctgtagaaaamcamcaatgaaggtcttcgacacaggagagagtctgcactgcatcacagctgatccgaaagttaaattcaatgaaaaggcaaatattttggtcaggagaggaattcttcctagggagtattagcacagtgtatttttagytgtgtggctatttatagctgcccaatggcttgcgtctgagtctttatttggtttttaggacatgctaaggattgagggtcgtgggccttaattgtatagaagacgcagttgcgtttggttgcctggaggcttctctgtgaagcctggtgggacacctgctggccagtttggcccttcttagtgaaggtgatagagacaagggcagaaggtcattgtatttataggatatttgaagcttatctkgtttacttkgttaataatactkgagtcatttttctaaacattcttkgcataacrgcaargattaaaargataagtaatgtaatatattagsccctagttgtcattcacctgttcttgtagagctgatacttttttcttgatcaaattttaggtttaatcatatttagcttagaagagtggtctgtcttaaragtatwctgattatttaggaacatctrgatgaaacttctttgccttagtccatcgtttcycctttaaattcctaaaggcaggaatgagtgtttcttaaaaccaacatgtataaagcaacwttttaggcaaactgggatgaggaaaaacatcttgaagggggcttcataatggtgttggagcctgttaaaaatgtggaatggaaagccgatcatgaaaacagatagtactgacttttggcaaaatgagtctttatgaaaacataccttaatgattatctgacaaatgcaagtgctttttgaggttaacagaattataaacaggagactgcagacactaaggtcactactgagcagcacgataattcgtgtggtgtgttctttttaaagattaacaatcttaagtcttttgtatgttatgttgctaagttatttgggggaaagtgttaaaataagtgctcttactttctttctccactgcttttgcacaaaaactttactgttcaaagaatattgtccattcagtttactttttatttttaagatgaagtatcccccaaactggtcatgccaggaaaaaaaaaaaaaaaaaaaaaaaaaactcgag

SEQ ID NO: 238 - DNA, 1251 bp, Homo sapiens
ggcacgagagaagaagtactactccaaaaactttggtaaagtgcttattcttccctagcagtaggctgttgctgagttgtagactggtggttttatgaaaaaaaaacaggttggggaggtgtgaagatggaaatgagggctgtgttatgtatatctggtatctacttctgttccaggtgcttaattcaccctcatactgatgtttaaagttagaggattcttgtccatttgtcttgtcttctgttggcaggtcacatgcaggtaataggctatgggaaggggaagatgcctagattacttctaggctggtctccaagccccaagttcaagcctcctgagtagctgagactacaggcacacaccatcgttctcaacttttcttttttaacataggctagctagctcccaccttagccttctagaccctccattataattcttattcaattgccttggcctcccaaagtgctggaattacaggtgtgagccactgcacccagctattttttctatatttttatgtagttcattgagggtaataattttatcctacaacaaacatgtaagttattgaagaatattggagttttatgataatgctgtcataaatataaaaggtagggtaagagggatccaaatagagctcacttatattgtcactgataggcagtcacgctgtgctgatagaatgtggcctgacacttgatggagtgcagcatatgtatacttgggcaatttgagcagatatatacggtcccgagtttaaagaagagaacaaacaccagtgcacagctatagtattcctaatataggatgcattttaaagaatttcacattctacaaatggagagagatggcaggagaagccttattttaagtcctgcactaaggcaggttaacctcatgggtgtaattacctggacctttttgtaaggacaaaatatttaatcattaaaaggccctctgtagggtttgaaatatctatattttatatatgaatgcttcttttattaatatttatggtaagatattttatactgctgataaacggacattaatgatatatagcctattgtttgaaaaaagcattttggattatagcccaaaactggaaataaccaacagataaataaatggtggtatattcatacaataaaatactactcagataaaaaagatgaacttaatctcataaacattatgggcaacatagtgagaacccatctcttttaaaaaaaaaaaaaaaaaaaa

SEQ ID NO: 239 - DNA, 1252 bp, Homo sapiens
  SITE (243): n equals a,t,g, or c
gagaagaagtactactccaaaaactttggtaaagtgcttattcttccctagcagtaggctgttgctgagttgtagactggtggttttatgaaaaaaaaacaggttggggaggtgtgaagatggaaatgagggctgtgttatgtatatctggtatctacttctgttccaggtgcttaattcaccctcatactgatgtttaaagttagaggattcttgtccatttgtcttgtcttctgttggcanggtcacatgcaggtaataggctatgggaaggggaagatgcctagattacttctaggctggtctccaagccccaagttcaagcctcctgagtagctgagactacaggcacacaccatcgttctcaacttttcttttttaacataggctagctagctcccaccttagccttctagacccctccattataattcttattcaattgccttggcctcccaaagtgctggaattacaggtgtgagccactgcacccagctattttttctatatttttatgtagttcattgagggtaataattttatcctacaacaaacatgtaagttattgaagaatattggagttttatgataatgctgtcataaatataaaaggtagggtaagagggatccaaatagagctcacttatattgtcactgataggcagtcacgctgtgctgatagaatgtggcctgacacttgatggagtgcagcatatgtatacttgggcaatttgagcagatatatacggtcccgagtttaaagaagagaacaaacaccagtgcacagctatagtattcctaatataggatgcattttaaagaatttcacattctacaaatggagagagatggcaggagaagccttattttaagtcctgcactaaggcaggttaacctcatgggtgtaattacctggacctttttgtaaggacaaaatatttaatcattaaaaggccctctgtagggtttgaaatatctatattttatatatgaatgcttcttttattaatatttatggtaagatattttatactgctgataaacggacattaatgatatatagcctattgtttgaaaaaagcattttggattatagcccaaaactggaaataaccaacagataaataaatggtggtatattcatacaataaaatactactcagataaaaaagatgaacttaatctcataaacattatgggcaacatagtgagaacccatctcttttaaaaaaaaaaaaaaaaaaaactcgaa

SEQ ID NO: 240 - DNA, 1256 bp, Homo sapiens
  SITE (22): n equals a,t,g, or c
  SITE (26): n equals a,t,g, or c
  SITE (34): n equals a,t,g, or c
acgtttcctgtcctgtggggtntccngcatgtgncaggatttccttcccacatccatgatagatgtgtgtcaaggggcctaattccggagatccactgcagaggagcaacatctaaagtcctttcacctgagacacaggacattatgaatcctccttggtgtcttggcagatggtgctagtggcataaacaaaaccaaatggcctacagctatacttacaatgagaattawtcatatttyattcggtagctgggactatgatgggcaagcatgccactcaagcaagtgcatgccctcttaatacagccctcctcagtcttggattcacaatcttttacatggatttctaagttttcataaaggttcttttgtcagggcataactgctgtattttcataactagaagttgtgggtagagaacctcctattctgccatcttgctatgtcactccccttgtatgtttcactttctgatatgttctatgccaaattatctgatttcaaattcaaaatttctgaaataaaatgcccaagtttacacattgtgtaataagtacatgtattgacatggctcattttcattagagcatttattaatattgagatgcattttcttttactgctttacatttcatgccaaagattcaaaatcctggctcttcaataagaacatagtcacagttaaaaactgtagttatttaaaggattgtttttatggtacatctgtatatatttaatattttgtgggttagaattttattgtattcaactccattttactgggcaatcttttttcatgtagatactccttgattatttaatttttttcacttctaatcttcatatttggtaattttcaaatctatacctttaatgatcaagtggtgtttaattcaaataaaaataattgggtttcacttgaggcaatttaaaatacatttataaatcagacatttttattgcctataaaagttaggtggtatttgcctgtataaatagtgcccctcctttgattataaattatttattttctttggtggtcatcagtgttttcttgtgtaggtgagtagtcaaaaaacagtgtaaagttaccatctgtttattgtcttattacatattattctgtgagacaaacacttttgcaatttgcaggtaatttctgaggaatgtaacctttttaagtaggtgtaaataatagttataaaaaaataaaattgccttcttaaacattaaaaaaaaaaaaaaaaaaactcgag

SEQ ID NO: 241 - DNA, 2858 bp, Homo sapiens
tcgacccacgcgtccggccctcagccgctgcccacggggccgcgctgcttagccactgggaccccacgctcagctccgactgggacggcgagcgcacgcgccgcagtgtctactccggatcaagcgggatatcatgtccatttataaggagcctcctccaggaatgttcgttgtacctgatactgttgacatgactaagattcatgcattgatcacaggcccatttgacactccttatgaagggggtttcttcctgttcgtgtttcggtgtccgcccgactatcccatccacccacctcgggtcaaactgatgacaacgggcaataacacagtgaggtttaaccccaacttctaccgcaatgggaaagtctgcttgagtattctaggtacatggactggacctgcctggagcccagcccagagcatctcctcagtgctcatctctatccagtccctgatgactgagaacccctatcacaatgagcccggctttgaacaggagagacatccaggagacagcaaaaactataatgaatgtatccggcacgagaccatcagagttgcagtctgtgacatgatggaaggaaagtgtccctgtcctgaacccctacgaggggtgatggagaagtcctttctggagtattacgacttctaygaggtggcctgcaaagatcgcctgcaccttcaaggccaaactatgcaggacccttttggagagaagcggggccactttgactaccagtccctcttgatgcgcctgggactgatacgtcagaaagtgctggagaggctccataatgagaatgcagaaatggactctgatagcagttcatctgggacagagacagaccttcatgggagcctgagggtttagaccctgctcccatctccccttcccccactcaagagtcccagcagaatcccttccccccaccccagggatggagaggcactgtgtatctccctccagactcgaagtcatcctgcaagatggcaagaaccaagcaagctccgatcccagggtgtgggagtgggggcctgttcccggtctgacctccttggcactggagcatctggggcttcgttcatccattcatcccgtatcaggggccaaggtacctttacaggagcacctagagcgagggcctttggcaaaaacaaaacaaccaacacacctctccacagggccagctccttagggataagtggaagatggaaattgcaattccaagagggagtgtgcccaaatgatttatggggatacctggaagggagcttggggtgggggctgtctgtgacacttaagcagtctgggtggttgtctatttgtctgtcttcagtcttgaagcagggcttcccaatgcccttttcctccctgccttccttcccccattatttcccacaggccagcataattttgtttttcctaatttatagtcactgttctagacagaccaaagagaaggaacagtggtggagtctaggctgctgatcagtaagctttacctagcacctgagcacctttctcccctcccctctttcctcacccttttctagatgtaagacagaargtaaatgtgactgggacttaaccaaggtcttggtaaagcctgcatggcaccgtaagaagctgaaaatactgtttgttcccgcaatcactgatttgaaaagttcccaacacaggcagctgctgtgtatatgggattagagccactacatagaatagtctcttacagattttcataaatactagtcacaataagggtatttttcttgggggtggagtaagggggagactgatgctagtccttgttgtattttgttgggctgtccttgtgtattttcaccccagcctgtagtcctcctcacttcaaccccagggatttttggggagcaagggtagccaatggcagagggggttggggctgggactctggaggctcctccccttctttctcttccttccgcctcccccgtgcccccagctgctcttgtcactgtctctgatgggtatttgcctggctttgttgcttctctatctgtatttagctgcagtgatcctttagctggttggctcagaaaaaaaaaaatgtgctttaggtgccctgtaatcctgggcatcaagggaatccatccttcccctttttgatatgttctccccgtacttccagatttattgttatggctcccagtgggtattggcgattcttgtgatgcagggcctcagtcagtgtccagccatgcataagggagaggatagtgtgtacctgccctgccctctgctatgaaggtctctgccttgtggatcatgggactccccttggaggatctgtgcaaaggggggctgggcacaaaggagaatgtcctatttgggagggcaggaagcaaaggaactggacagggattggtgggcttggggaacggaagtttatcttggatacccttgaagaggctgggtctcttcacatgaagatcgaaaagggaccctgcttccaatttccctcttccattcctcgagctactccagggcttagaagaatgctcttggtctgtgggtccagtgttgtctgtcatccatttaagtgttcccactttcaagtgacaatcctctccttggccctgccatagggcagagcatgtctggcatagcagcctgacttttatgccctaatcttgagttgaggaaatatatgcacaggagtcaaagagatgtctttatatctgactgtatataaatgaagtttttttgttttttttgttttcctttttggtgcaataaagtttgttttggcagaaaaaaaaaaaaaaaaaaaaaaaaaaaaaaaaaaaaaaaagggcggccgctcgcgatctagaac

SEQ ID NO: 242 - DNA, 1363 bp, Homo sapiens
ctgcaggattcgggcacgaggtcaagtgagggcagcagcaggtgaggtgagggatggaggtgaggccagatcacctggtggtttaaaagccgcagtgaggtgtttagacctaattttaaaaacaatgaaaagcacttgatttagtttagccatccatatgtggcttgtattagctcaattagactcctgccttttcgcaaggacagcagtctctctgtatcccatacacaagagaatgatgtgttttctctttttaaatgagatctgtttagctagttgtatggagaatgaattctgctggtcaattgtggaaacagagacttagttaagtagaccttcctgagcttaccccttgcagccttccctgagatggcaaacaggagggctgcaccaatcctatactgtcagcaaaggtctggatcgctttgcaaggattagaaagcctgcacatgtggggcctcagaccatctgtccccatgtctacagaaaagttccaactgctgaatggttttgaaatgcatggttatttcctgggcccaatccagtccttcataatttggccaaacctttatgcagagggctatgaggcatttttcctccagattctgagggtcaaagcagtcccaatggttcaagatacactgcagagtagtataagctgggggcagtwaagagaactggttgtccattttgaaagacagggaatagaggcatccctcattcagggtgtgatggggaaagcaagcaagtgtccttccttcactttccacctgttgtccctgagccttggtgaccttggcaggtactggccataggtaacaatacccacgaagcagggaaaacctggagaataggaattaaccaccctcagctgtgcctccctttctccctgctgccagcaacctttgagttccctgggcctgtttataccgtgaagcatggcctccttccgtggggtggggttcagtcagcaggaattggtcctgcgcatttacattttgcctgttgcttggctttgagcccctcagacctggtctgtctttctagggcctcagcctaaagcttggaattgagtttggaactgaaaaggtattttagaggctgtttgtatctgtttagagtgtctcaaatgtgccctgccgaatttgcggttatcagccagaaggggtttttcctccgttaacttccctgtcagaaacagctggtggggggtgggggaggcctctcacttagaaaaaraaaaaaraaaaacagtttaaggggcaaaaagggggaagttctgggggaagaaccccttgttagtgcaactgggcatttccaatccttatatctttcccctgggtcagactgaattgaattcctt

SEQ ID NO: 243 - DNA, 724 bp, Homo sapiens
  SITE (506): n equals a,t,g, or c
  SITE (512): n equals a,t,g, or c
gtgaggatccttttttctagtgtgtactgaaaacagctcttttaggaatttttcatttccattggtttttgtcttgtgatatatgtcttttcatgagggataaattttatttgcactcactgtttatggagtatcgagtaaaaactagaacaaagcagaacgaaccttcctatacaatgccttcccacaaaaacaaatacctccctcaaaaaatttctgctctgaacatgaaaatgcttatctgcagcttgacattattagtatgtctgagtcctagggtaggtaggagatccaggtattatcattcaaaaggaactgaaagtgtgagcactctttgaaaaagcactattagcaatgtaaatgccaagttacatctgataggcaaactcttaagcctgtttgtgtgatatttaaggtgagaaaatagttttgcctattctttatgactttgaatagccttaggactatttcatctgtttattactctgycttcatactagatttcntttttntcytttttgacacggagtttcgctcctgtcacccaggctggagtgcagtggcgtgatcacagcttactgtaacctccacctcccaggagaattgctttaacctgggaggtggaggttgcagccagccgagattgcaccactgcacatgagcccaggcgacagtgcaagactcagtctcaaaaaaaaaaaaaaaaaaaaaaaaaaaactcgag

SEQ ID NO: 244 - DNA, 1099 bp, Homo sapiens
  SITE (900): n equals a,t,g, or c
  SITE (1060): n equals a,t,g, or c
  SITE (1062): n equals a,t,g, or c
aagttctggataaatacttgatttgatgtgatagtgtgtattactctatcagaaatgcagagcgttgtatgatttttctgtgtacacgcgataagagcaatattagttgcaaaaggaagttttcatctttgaacattaaaggtatcctttattgttgatcactatagcatgcaaaaaagaaactatattttctgtcctgttctttgtattactgttaaagagttggtaaactgccgtcttgctgtgagactgggaagtcggcaatgaagttagatttgtattcatgaacatgatctgcctgtcatataggcttgctttgacttgttttttttttcagtagtggcaaagggttttctgccactcaatccacactttcctccgcattggtatctccgttgaccattttgcaaaatagtttattgagattaggggtctgatcttttgtataacctgttgtagtgaactgatcatatgcgacttgactttggccaatagtacctcgtcagtgtacagtactactatttagmcttactgatttgggtaatagaaaagctatgatgttagaaatgttgtcgttgtatattggagaaattttgaagttgcatattggagtaatttagtcctgtatgctttgtaaatgagtgcattctattgtcgagagtaaatacagtattttgtagtataaacttaagcttttagctgaagaaattggcagcatagttggagtgtggagactawtcttaaaacgcaaatgttttaaattacaaggaactgtagtggtgtgtaggctgtaacaattcctggtgccaaatttgggagattatttggttgagctactttctataaagaaacatattaagtatctgcaataaaagtggatttgtagctatacacaagggnttttacattataaataataactcaataaggcacctttctttgctctttgtgtatctgccagttaagaccaaaacatctcatattttcactggagcttcctgccaaaacaaatactggttttgcattggctttgctgctcagtttgaaagctaggggaatntnttagagcctactctggttctggaggctgcctgattaa

SEQ ID NO: 245 - DNA, 1703 bp, Homo sapiens
agagaaagttacgaggttcgtggccgcggtttccccaggcagctggcgctggaggcttcggcgtcacgtgctggtctggatttttctcgatgcactggggaaagcggtggactcttatcgtgggagggctcttgatctgtgatttatagataggcacagctactcccgttcgggaacccaacggcagacaggtcctagtgcccatcagatacccgcggccgggactcggagctgtggggtgtggggaggcggaggcaccaactaagagcgacctagcatcgcaaagccgccctcggggcgctcatggcgggacgctcctgggaaaggctttagccgcggtgtctctctctctggccttggcctctgtgactatcaggtcctcgcgctgccgcggcatccaggcgttcagaaactcgttttcatcttcttggtttcatcttaataccaacgtcatgtctggttctaatggttccaaagaaaattctcacaataaggctcggacgtctccttacccaggttcaaaagttgaacgaagccaggttcctaatgagaaagtgggctggcttgttgagtggcaagactataagcctgtggaatacactgcagtctctgtcttggctggacccaggtgggcagatcctcagatcagtgaaagtaatttttctcccaagtttaacgaaaaggatgggcatgttgagagaaagagcaagaatggcctgtatgagattgaaaatggaagaccgagaaatcctgcaggacggactggactggtgggccgggggcttttggggcgatggggcccaaatcacgctgcagatcccattataaccagatggaaaagggatagcagtggaaataaaatcatgcatcctgtttctgggaagcatatcttacaatttgttgcaataaaaaggaaagactgtggagaatgggcaatcccaggggggatggtggatccaggagagaagattagtgccacactgaaaagagaatttggtgaggaagctctcaactccttacagaaaaccagtgctgagaagagagaaatagaggaaaagttgcacaaactcttcagccaagaccacctagtgatatataagggatatgttgatgatcctcgaaacactgataatgcatggatggagacagaagctgtgaactaccatgacgaaacaggtgagataatggataatcttatgctagaagctggagatgatgctggaaaagtgaaatgggtggacatcaatgataaactgaagctttatgccagtcactctcaattcatcaaacttgtggctgagaaacgagatgcacactggagcgaggactctgaagctgactgccatgcgttgtagctgatggtctccgtgtaagccaaaggcccacagaggagcatatactgaaaagaaggcagtatcacagaatttatactataaaaagggcagggtagccacttggcctatttactttcaaaacaatttgcatttagagtgtttcgcatcagaataacatgagtaagatgaactggaacacaaaattttcagctctttggtcaaaaggaatataagtaatcatattttgtatgtattcgatttaagcatggcttaaattaaatttaaacaactaatgctctttgaagaatcataatcagaataaagataaattcttgatcagctataaaaaaaaaaaaaaaaaaaaaaaaa

SEQ ID NO: 246 - DNA, 1120 bp, Homo sapiens
  SITE (927): n equals a,t,g, or c
  SITE (968): n equals a,t,g, or c
  SITE (972): n equals a,t,g, or c
  SITE (1002): n equals a,t,g, or c
  SITE (1053): n equals a,t,g, or c
  SITE (1081): n equals a,t,g, or c
  SITE (1113): n equals a,t,g, or c
gtgacagcgctgcacctaaatgacaattaccttagtcgcattccacctgatattgccaagcttcataatctggtttacctggatctgtcatccaataaactcagaagtttaccagcagaactaggaaacatggtgtctctcagggaattgcttttaaataacaatctgttacgggttttgccttatgaacttggtcggctcttccagctacaaactctaggtttgaaaggcaatcctttatcacaggatattctcaacttataccaggacccagatggaacccgaaagctactgaacttcatgcttgacaatctcgcaggtaactgttagtgacaaagctgtaaaataaattctacagatattatgaactagctaatatatgttcctcaagagcatctgactgttttttataattgcctatgggtttggagttccttccattgtatatcctacgttagtggaacattcttcttttcatatactgaatgttttctatttaccaagcaatatgttaggagattagttgcattattttgtttaagaacctaggacataggaactttaactcacagtttagagatgcaaattctgagattcagagactggggagaatatttttgaaacgtcctgcagcaaagtggtacttttttgagacaaggtcttgctctattgcccaggctgaagggcaagtggcatgatcacggctcactgcagcctcaaatgcctggggctccaagagatcctcctggcctcagcctcccaagccagctgggattacaggcgcgcacacccacactcagtcccagagtggtccatttgttacagctgatgaatctacatggacacatcgtcaccacccaaagcccacagtttacaatggggctcactcttgatgctgcacattctctggctttggacaaatgtatnatgacctgtatccaccatcacagtgtcaggccagagcagtnttcntacgcctatagtcccagctactcgggaggntgaggcaggagaatggcgtgaacccgggaggcggagcttgcagtgagccgngatcgcgccactgcactccggcctgggngaaagagcgagactccgtatcaaaaaaaaaanaaaaaaa

SEQ ID NO: 247 - DNA, 1832 bp, Homo sapiens
ccacgcgtccgagaccagcctggtcaacctagcgagaccctatatctatgtgtatttaaaaattaagaattttgtaaaataataaaaataatagaatccaggctgcccatctttgtagtttagagatggtaggttcttctaaggggtagtaattggcctttgaaagttcacattcataacttctttcttaagttgggtggagagagggaagccaatggcgtttttttttttttggtttttttgttttttttaaacatcaaagtgcactgtcagagtgccgagtcctgattggtggaatgatgatggtatgatttgattctcccaaatcatctttgaaaaactgtgaaacatacaataagcttattccttgcctaattaccggttgctgggtcccagggggttgctggaacacggagactaatcagatgattcttgtctttaaggagcatgtggaagaggggacagatgaataccccatcttcctgctctccatcagtccgccctggtgtgatgtgcctaagcagttccgagtaatcttctggaaaaaataaataggcaactgcgatgagtttgtgcaaggatcctaatggaatgaataataataacacaccactgacagcgaacgctgagtggtcactggtgctaggaccatgcaagggttccctacatgtactttagggtagaaagaggccaagaggaaagtctattaggtcagatctgtgactctgaatagccatccaccattgagctcagaaccctcagggacctggccgatggcaggctgcatgctgctgcaccatgagtcagcaccagactgggagacgcagccactcagggatccaagggactcaaacatctgcaacctggccccaggccaagagaccaaactgcaggctccggatttgcggccctgtaggataggctcaaaatgaaacatgtttgttatttctaagtggatgggaactgaaagaacccgaacaatcagtgtacaaggattcatgaatggaccaaacatgcttgctttttgttcttgaaagatgtttgttgtatttaatatataacgagaagagtggtcaacgctgactgggtgctgagcactttaagtgcattacctgggtggctggctgggctgtgccagggttgaagggtgtggggagcttctttcaaggtgccccttctgcctcctggcacaggactctggctccagcacaccccaagctgaccctggtgggggtagggcccctcacccaaacctggcctctcccgtctcttgttctgctgcctcagctttctcctgtctgtggtagagtctgcttggacagactctgggcagggcagggggcagggcaagctggagagagaattcgttctaggttgatgtgggatgatagtggctggtagggcgcttgtatcctattggaaatccatgatgagatcccattcattcccacccttctcttaacaatgtctccttaagtccaagtctcaagtcgggtgcccagtttcataccatccttcctctccctctcacaaccttcgggcaggaccaaccccctcagaggaacccctgctgccccagccctttcaggctctgtgcccaggatctcccctccactccctggaaattccacatttggccaggtgtggtggtgcacacccttgttcccagctactcaaaaggttgaggtggaggtcgaggctgcagtgagctgtgatctcactactgcactccagcctgtgcaagagagtgagaccccgtctctaaataataataataataataataataataataataataaatttaaagaaaaagaaaaaaaaaaaaaaaa

SEQ ID NO: 248 - DNA, 1247 bp, Homo sapiens
ccacgcgtccgggcagatgccatccaggatgtacaaggtgcagccaaggcaggccatgcaggggccgggcctgtctgcagctggtggatgcctgtgggcatggctttctctggggaccccattcctgtcagtagcaaccctggcagtgtccggagcggctctagacaactttggtcataggaactctggaggtgggttctggtcatctgaggtggctactcaacaggtttgaggccccacagcaacagaagtccaggacccactaggttgcctcagaagccctaagactgatgagctggagcgcgcatttgagagaagcctcgcacccactgtgtactggccccgctcaggccggcctggcacaccgttgcctgctggcggctctcatggggaagcgcctgggcactggggattgcttgtggcccactcaactcttggggcagtggcccgtaaccctagtttgcctgaggcccttatgtccccttatgttcctggtactggagcttgagctcttgcctggaacgctgcagctgcacccaccctgcttgatcccacctgggaggccaggacactgaggagctctgaacccagcccacagggaagcagaggaaggtgagcccccgccgccccccagcccttcccatcccttccctgctccctggtggtctaaggacccaagctccctagacttcctcttccaccgtctgtacgtttcaaattacactggtgtaggcctgtactgctggtggggctgggcccctaaacgccagaaagtgaatcttaagaagctctgccctaaactgagaaccacatgctgagggaagggctgaaaggtgaaggctcagcctccctcacatgggtcctgggttacattaggtaccgggctgattgataggcatttggccatggttccttttcgtctacctttgggggccttctcaggcccagaacaaggctgttgttactatgtggaaaagctgaccagtgctgcacactaggggcacacacctttccatgagcagctcctgccctgtggcgacagccagcgtgcacccagacgctggtgccatggcgaagcaggcgttcaagaccatggagaagccaactcctcatttagaaaatgaggccccctcagtgccaaacccccctttttataccaatcagtatcctctgttcattaaaactggcttccaaaaaaaaaaaaaaaaaaaaaaaaaaaaaaaaaaaaaaaaaaaaaaaaaaaaaaa

SEQ ID NO: 249 - DNA, 621 bp, Homo sapiens
  SITE (32): n equals a,t,g, or c
  SITE (54): n equals a,t,g, or c
  SITE (451): n equals a,t,g, or c
agcagagaccagcaatgagccctctatatggnactgttccttggggtgttcagncagctacctgtggcaggttgattacattggaccacttcattatggaagggacaggatttgwtcttactggaatattcttactcaggatatggatttgcctttcctacatgcaattcttctgccaagagtaccatccatggacttgcagaactgccttgtcgactgccatggtattacacatagcattgcttttgaccaaggaactyactctacagacagaaatgcggcaatgcattcgtgatcatggcgttcactgktcttaccatgctccccttgatcctgaagcagctggcttgagagaacaatagaatggctatttgaagtcataattacaatgccaaccaggtgacaatactttgcagggctagggaaaagttccccagaaggctgtatatgntctgaatcagcatctagtatatggtactgtttctcccataggtaggattcataggtccaggaatcaatgggtgaaagtagaagggacaccactcaccattacccctagtgagccactagcaacatttttgcttcatattcccatgacattatgttctgctggcttagagc

SEQ ID NO: 250 - DNA, 866 bp, Homo sapiens
ccacgcgtccgcggacgcgtgggttggaagcgaacaggccgcccgccttctgggcagcccctgcttacggcgcctctaccatgcctggctggcagcagtggtcatctttgggccgcttctgcagttccatgtcaaccctcggactatcttcgccagccacggcaacttcttcaacataaaatttgtgaattcagcctggggctggacatgcactttcttagggggctttgtgttgctggtggtgttcctggctacacggcgcgtggcagtaactgccagacacctgagccgactggtagtaggggcagccgtgtggcggggagccggccgggccttcctgctcatcgaggacctgactggctcctgcttcgagccactgccccagggtctgctgctccacgagctgcctgaccgccgcagctgcctggcagccggcaccagtggcgaggctacaccgtctcctccacaccttcctgctcaccttttgctgcctgctcatggcagaggaagcagctgtgttcgccaagtacctggcccatgggcttcctgccggcgccccactgcgccttgtcttcctgctgaacgtgctgctgctgggcctctggaacttctgctgctctgtaccgtcatctatttccaccagtacactcacaaggtggtgggcgccgcagtgggcacctttgcctggtacctcacctatggcagctggtatcatcagccctggtctccagggagcccaggccatgggctcttcccccgtccccactccagccgcaagcataactgaaagaaataaaaaccatcgggcctgaaaaaaaaaaaaaaaaaaaaaaaaaaaaaaaaaaaaaaaaaaaaaaaaaaaaaaa

SEQ ID NO: 251 - DNA, 3057 bp, Homo sapiens
  SITE (712): n equals a,t,g, or c
  SITE (1252): n equals a,t,g, or c
  SITE (1453): n equals a,t,g, or c
  SITE (3041): n equals a,t,g, or c
  SITE (3048): n equals a,t,g, or c
gaacagtggaactcacactcctgggcttctagaagatctaagtaagaatggtaggctccctgagattaaacttcctgtcaacggttgcagtgacctggaggatagcttcaccatcttgcagagaaagacctcaaacaagaacctctcgatgaccctacttgsatagacacatcagaaacatctctttcaaatcagaacaagctgttctcagacattaatctgaatgatcaggagtggcaagaattaatagatgaattggccaacacggttcctgaggatgacatacaggacctgttcaacgaagactttgaagagaagaaggagccagaattctcgcagccagcaactgagacccctctctcccaggagagtgcgagcgtgaagagcgacccctctcactctcccttcgcacatgtctccatgggatctccccaggcgaggccttcttcttctggtcctcccttttctactgtctccacggccactagtttaccttctgttgccagcactcccgcagctccaaamcctgcaagctcaccagcaaactgtgctgtccagtcccctcaaactccaaaccaagcccacactccaggccaagctccacctcggcctggaaatggttatctcctgaatccggcagcagtgacagtggccggttcagcgtcagggcctgtggctgtgcccagctctgacatgtctccagcagracagntcaaacagatggctgcacagcagcaacaaagggccaaactcatgcagcagaagcagcaacagcaacagcagcagcagcagcagcagcagcarcagcagcagcagcagcagcaacagcactcaaatcagacttcaaattggtctcccttaggacctccctctagtccatatggagcagcttttactgcagaaaaaccaaatagcccaatgatgtacccccaagcctttaacaaccaaaaccctatagtgcctccaatggcaaacaacctgcagaagacaacaatgaataactacctccctcagaatcacatgaatatgatcaatcagcagccaaataacttgggtacaaactccttaaacaaacagcacaatattctgacttatggcaacactaaacccctgacccacttcaatgcagacctgagtcagaggatgacaccaccagtggccaaccccaacaaaaaccccttgatgccatatatccagcagcagcaacagcagcagcaacagcaacagcagcagcagcagcagcagcagccgncaccttcacagctycaggcccccarggcacacctgagcgaagaccagaaacgcctgcttytyatgaagcagaaaggagtgatgaatcarcccatggcttacgctgcactttcattccacggtcaggagcagcatycagttggacttycccgawccacakgscccatgcagtcytccgtgcccccaggctcargtggcatgnkctcaggagccagtcccgcaggccccggcttcytggscagccagccccaagcagccatcatgaagcagatgctcattgatcagcgggcccagttgatagagcagcagaagcamcagttcctgcgggagcaaaggcagcagcagcagcagcagcagcagattttggcggaacagcagttgcagcaatcacatctaccccggcagcacctccagccacagcggaatccatacccagtgcagcaggtcaatcagtttcaaggttctccccaggatatagcagccgtaagaagccaagcagccctccagagcatgcgaacgtcacggctgatggcacagaacgcaggcatgatgggaataggaccctcccagaaccctgggacgatggccaccgcagctgcgcagtcggagatgggactggccccttatagcaccacgcctaccagccaaccaggaatgtacaatatgagcacaggcatgacccaaatgttgcagcatccaaaccaaagtggcatgagcatcacacataaccaagcccagggaccgaggcaacctgcctctgggcagggggttggaatggtgagtggctttggtcagagcatgctggtgaactcagccattacccagcaacatccacagatgaaagggccagtaggccaggccttgcctaggccccaagcccctccaaggctgcagagccttatgggaacagtccagcaaggagcacaaagctggcaacagaggagcttgcagggcatgcytgggaggactagtggagaattgggaccattcaacaatggcgccagctaccctcttcaagctgggcagccgagactgaccaagcagcacttcccacagggactgagccagtcagtcgtggatgctaacacgggcacagtgaggaccctcaacccagctgccatgggtcggcagatgatgccatcgctcccggggcagcaaggcaccagccaggcgaggccaatggtcatgtctggcctgagccagggagtcccaggcatgccagcgttcagccagcacccagcacagcagcagatacccagtggcagctttgctccaagcagccagagccaagcctatgagcggaatgcccctcaggacgtgtcatacaattacagtggcgacggagctgggggttccttccctggcctcccggacggtgcagaccttgtggactccatcatcaaaggcgggccaggggacgagtggatgcaggagcttgatgaattgtttggtaacccctaatcaagagaggccccaagatccacaactcgagtggttaaagcttaaaaagtgaaaaagaaacaggatgttgacccatccttgttttttgtttttttgacccacgtaaactgagcaaaactgcagctggctgacaatggaagatccaggtgccaatccacagccccaccaggcctcatttcacctgattttcacacagcaatcgagatgagacgccatgcagatcccggctgcgagagagggagacacccggaggagcaggtgggaagatgaagccggccagagcccctctgccagcatgccctgtgatcgcctggcccagcaggaactgnttcaccnaaaaggact

SEQ ID NO: 252 - DNA, 5279 bp, Homo sapiens
  SITE (1371): n equals a,t,g, or c
gcggccgccgagcgtcgagctcagcgcggcggtagcggcggcggcccaggcagccaacgatggcggcggcggcggcggcgggcgcgggcsckgagatggtccgcgggcaggtgttcgacgtgkggccgcgctacaccaacctctcgtacatcggckakggcsctacggatggtgtgctctgcttatgataatgtcaacaaagttcgagtagctatcaagaaaatcagcccctttgagcaccagacctactgccagagaaccctgagggagataaaaatcttactgcgcttcagacatgagaacatcattggaatcaatgacattattcgagcaccaaccatcgagcaaatgaaagatgtatatatagtacaggacctcatggaaacagatctttacaagctcttgaagacacaacacctcagcaatgaccatatctgctattttctctaccagatcctcagagggttaaaatatatccattcagctaacgttctgcaccgtgacctcaagccttccaacctgctgctcaacaccacctgtgatctcaagatctgtgactttggcctggcccgtgttgcagatccagaccatgatcacacagggttcctgacagaatatgtggccacacgttggtacagggctccagaaattatgttgaattccaagggctacaccaagtccattgatatttggtctgtaggctgcattctggcagaaatgctttctaacaggcccatctttccagggaagcattatcttgaccagctgaaccacattttgggtattcttggatccccatcacaagaagacctgaattgtataataaatttaaaagctaggaactatttgctttctcttccacacaaaaataaggtgccatggaacaggctgttcccaaatgctgactccaaagctctggacttattggacaaaatgttgacattcaacccacacaagaggattgaagtagaacaggctctggcccacccatatctggagcagtattacgacccgagtgacgagcccatcgccgaagcaccattcaagttcgacatggaattggatgacttgcctaaggaaaagctcaaagaactaatttttgaagagactgctagattccagccaggatacagatcttaaatttgtcaggacaagggctcagaggactggacgtgctcagacatcggtgttcttcttcccagttcttgacccctggtcctgtctccagcccgtcttggcttatccactttgactcctttgagccgtttggaggggcggtttctggtagttgtggcttttatgctttcaaagaatttcttcagtccagagaattcctcctggcagccctgtgtgtgtcacccattggtgmcntgcggcagtatgtacttcagtgcacctactgcttactgttgctttagtcactaattgctttctggtttgaaagatgcagtggttcctccctctcctgaatccttttctacatgatgccctgctgaccatgcagccgcaccagagagagattcttccccaattggctctagtcactggcatctcactttatgatagggaaggctactacctagggcactttaagtcagtgacagccccttatttgcacttcaccttttgaccataactgtttccccagagcaggagcttgtggaaataccttggctgatgttgcagcctgcagcaagtgcttccgtctccggaatccttggggagcacttgtccacgtcttttctcatatcatggtagtcactaacatatataaggtatgtgctattggcccagcttttagaaaatgcagtcatttttctaaataaaaaggaagtactgcacccagcagtgtcactctgtagttactgtggtcacttgtaccatatagaggtgtaacacttgtcaagaagcgttatgtgcagtacttaatgtttgtaagacttacaaaaaaagatttaaagtggcagcttcactcgacatttggtgagagaagtacaaaggttgcagtgctgagctgtgggcggtttctggggatgtcccagggtggaactccacatgctggtgcatatacgcccttgagctacttcaaatgtgggtgtttcagtaaccacgttccatgcctgaggatttagcagagaggaacactgcgtctttaaatgagaaagtatacaattctttttccttctacagcatgtcagcatctcaagttcatttttcaacctacagtataacaatttgtaataaagcctccaggagctcatgacgtgaagcactgttctgtcctcaagtactcaaatatttctgatactgctgagtcagactgtcagaaaaagctagcactaactcgtgtttggagctctatccatattttactgatctctttaagtatttgttcctgccactgtgtactgtggagttgactcggtgttctgtcccagtgcggtgcctcctcttgacttccccactgctctctgtggtgagaaatttgccttgttcaataattactgtaccctcgcatgactgttacagctttctgtgcagagatgactgtccaagtgccacatgcctacgattgaaatgaaaactctattgttacctctgagttgtgttccacggaaaatgctatccagcagatcatttaggaaaaataattctatttttagcttttcatttctcagctgtccttttttcttgtttgatttttgacagcaatggagaatgggttatataaagactgcctgctaatatgaacagaaatgcatttgtaattcatgaaaataaatgtacatcttctatcttcacattcatgttaagattcagtgttgctttcctctggatcagcgtgtctgaatggacagtcaggttcaggttgtgctgaacacagaaatgctcacaggcctcactttgccgcccaggcactggcccagcacttggatttacataagatgagttagaaaggtacttctgtagggtcctttttacctctgctcggcagagaatcgatgctgtcatgttcctttattcacaatcttaggtctcaaatattctgtcaaaccctaacaaagaagccccgacatctcaggttggattccctggttctctctaaagagggcctgcccttgtgccccagaggtgctgctgggcacagccaagagttgggaagggccgccccacagtacgcagtcctcaccacccagcccagggtgctcacrctcaccactcctgtggctgaggaaggatagctggctcatcctcggaaaacagacccacatctctattcttgccctgaaatacgcgcttttcacttgcgtgctcagagctgccgtctgaaggtccacacagcattgacgggacacagaaatgtgactgttaccggataacactgattagtcagttttcatttataaaaaagcattgacagttttattactcttgtttctttttaaatggaaagttactattataaggttaatttgsagtcctcttctaaatagaaaaccatatccttggctactaacatctggagactgtgagctccttcccattccccttcctggtactgtggagtcagattggcatgaaaccactaacttcattctagaatcattgtagccataagttgtgtgctttttattaatcatgccaaacataatgtaactgggcagagaatggtcctaaccaaggtacctatgaaaagcgctactatcatgtgtagtagatgcatcattttggctcttcttacatttgtaaaaatgtacagattaggtcatcttaattcatattagtgacacggaacagcacctccactatttgtatgttcaaataagctttcagactaatagcttttttggtgtctaaaatgtaagcaaaaaattcctgctgaaacattccagtcctttcatttagtataaaagaaatactgaacaagccagtgggatggaattgaaagaactaatcatgaggactctgtcctgacacaggtcctcaaagctagcagagatacgcagacattgtggcatctgggtagaagaatactgtattgtgtgtgcagtgccagtgtgtggtgtgtgcacactcattccttctgctcttgggcacaggcagtgggtgtagaggtaaccagtagctttgagaagctacatgtagctcaccagtggttttctctaaggaatcacaaaggtaaactacccaaccacatgccacgtaatatttcagccattcagaggaaactgttttctctttatttgcttatatgttaatatggtttttaaattggtaacttttatatagtatggtaacagtatgttaatacacacatacataygcacacatgctttgggtccttccataatacttttatatttgtaaatcaatgttttggagcaatcccaagtttaagggaaatatttttgtaaatgtaatggttttgaaaatctgagcaatccttttgcttatacatttttaaagcatttgtgctttaaaattgttatgctggtgtttgaaacatgatactcctgtggtgcagatgagaagctataacagtgaatatgtggtttctcttacgtcatccaccttgacatgatgggtcagaaacaaatggaaatccagagcaagtcctccagggttgcaccaggtttacctaaagcttgttgccttttcttgtgctgtttatscgtgtagagcactcaagaaagttctgaaactgctttgtatctgctttgtactgttggtgccttcttggtattgtaccccaaaattctgcatagattatttagtataatggtaagttaaaaaatgttaaaggaagattttattaagaatctgaatgtttattcattatattgttacaatttaacattaacatttatttgtggtatttgtgatttggttaatctgtataaaaattgtaagtagaaaggtttatatttcatcttaattcttttgatgttgtaaacgtactttttaaaagatggattatttgaatgtttatggcacctgacttgtaaaaaaaaaaaactacaaaaaaatccttagaatcattaaattgtgtccctgtattaccaaaataacacagcaccgtgcatgtatagtttaattgcagtttcatctgtgaaaacgtgaaattgtctagtccttcgttatgttccccagatgtcttccagatttgctctgcatgtggtaacttgtgttagggctgtgagctgttcctcgagttgaatggggatgtcagtgctcctagggttctccagggkgggttcttcagaccttcacctgtgggg

SEQ ID NO: 253 - DNA, 931 bp, Homo sapiens
  SITE (234): n equals a,t,g, or c
  SITE (490): n equals a,t,g, or c
  SITE (906): n equals a,t,g, or c
gaattcggcacgagaaatactccagtaaaatgaattaaattagcatgttaataagagtgataatatttaaaagttttagtcaatcttgcatttccatacttgcattatctaaactagttgaacttttcagtgttttacttgatatattgcattcttgagcattaggcttctaggtgatttgttaaactcatagcaggttttagtacacagtgctgtttatgacagaaaaaattntatcctacctctggaaataattgtactttctgtggatcagataaaaacttatagaaactccctaatggaaaatattggaagcataaccagaaaaggagtcagctttttgtttccaaggagcaacagggaaaacctttaactacttataatcccgtatagtcaccatcaccacgagtattggaaaatctgttttctcttttactaagtgtctgccggtcacttatgtatmcccaaagccagaaagwtatttttatcncgggaaattccagaaaggaaacattttgtgtaatatkgattcatttctgtctcaccaaagatgtgttttccmcgtagcaaagaacatcagccccacgttatrgggamcaagcgagtcccmaatcgtaccatctgctgagcctgagaaaggatatggacaagtcagtcagcattcacaattaagagaaaaacatctgtgctttggaaaatgttcttcaaggatagagaattgtgccctatgtccaccaaatttgcatgagatctttataagattagacagccagtggataaggccccttatctttcttcatggatggctgaggaaattctccgccttccctgacatcagctgcataactgtatttctgcctcgtggaaataaagtagatgatcaggcaaaaaaaaaaaaaaaaaaanaaaaaaaaaaaaaaaaaaaactcga

SEQ ID NO: 254 - DNA, 1162 bp, Homo sapiens
ggcacgaggaaaagtaaaaggcccccatgaatggacattaagatacttccgatgtgttttgttttctattgctgcagtatttgttactgtacttgtgatggtacatgtgcatatattgctctaaaacaaatttctagaagttgaattccaaacagtgactgttccagatgtcttattttttaggaccccaagcctcttaaattcaggtctttccgttattcccttaccttctcccttatcccttcaaatctttgcccactgccatcacattaatgccttctttgaccttattttatctgttatagtaatgagctgccctgttctttctatctttaatctccccactccaccttgtccttattatctcagctagtttaattcttaaaagtgagtatattaatccttggaatctttcttttttatatatatataagactgatatttcagttagtagcttctgattataacttcccaaattgaggctttcatttccttagaacaaggaactgccctggctgggcagtttagtcaaaggcttgtcagggtgtttagtagacagttgtgcaagtggagctattcacagggactgtattactatgttcctttgttactaaaaaaaaattcttgcagtccctgtagttcgcaacagatactctgactcatatttctctacataggagaaagagtatggactttggagtgatacatctatagctcggttaggatctagactctgctcccaaactggtagtgtattttggggtgcactgctatgtttctgagccttcatttcttccttataaagagtttattagtttgtagccaggcgcagtggctcaccctgtaattccagcactttgggaggctgaggttggtggatcacctgaggtcaggagttcaagaccagcctggccaacagggtgaaaccccgtttctgctggaattacaaaaattagccggacgtagtggcacatgtttgtaatcccaactactcaggaggctgaggtgagagaatcgcttgaatccaggaggcggaggttgcagtgagctgaaattgtaccactgcactccagcctaggcgacagagtgagactccgtgtcaaataaaaataaaaaaaaaacaaaaaaaaaaaaaaaaaaaaaaaaaaaaaaaaaaaaaaaa

SEQ ID NO: 255 - DNA, 807 bp, Homo sapiens
ggcacgagggtgaaatccctgtcttaatcaatcaatcaataaacaaacaaatacacatactacaataaatgtacttatttatcttgttatacttgtgcttttattttagcagttctgaaaatggcttccttgtaagcgaagtctatctatatttaaaattttaatagatattagtaggtaaaaacatttttaaaaacttgattactaataaaaatttaaaatgctacaccaatttatatttctaccaataatttatagtaatgtggtgcatcctatcttaccaggagtggatgctgccagtcattaaatttttgccatcctgggccaaaaatgatatctaattttgtttcctttctatgaaaattggtattcagacatattccaatgtttgtagctatttacaatgcattcttgctgtattggccattcatatcttttttattattaattgttttctttttaaaatcagttcataaggcttttcaaaaattcttacagaggctggggatggtggcttgcacctgtaatcccagtgctttgggaggccaaggtgggagaattgcttgagcacaggaattcgattgtagcctgggcaagatggcaagacccctgtctttacaaaacattaaaaaatcagcatggcatcatggtgtgtgtctttagtcccagctacttcagaggctgaggccacagtatcccttgagtccagtagttcgaggtggcagtgagctatgatcctgccactgcacttcagcctaggtgacaaaatgagaccctgtctctaaaaaaaaaaaaaaaaaactcgag

SEQ ID NO: 256 - DNA, 2284 bp, Homo sapiens
ggtttgacaaataaattgcaaggaaaaaaaaccaacaacagatggacagaatacctgtgggttaaaagaaacttaacttatcgcttaattcattgcaatatgtggcccttactatttgcaatatgtgtatctgttgcatacggtctgtcctgtatccgataggctggaacagtggaacaaacaaaacatacacgtatcttttaccttcttgataaaattgtttagtgattcctaaagctcagatgcagtattgtcacctgatgattaaacagacacatcagcaatagcaaaaacagagtccagggctcagcctcaggactgctgattctgaacttgacggggtgaaagtgtagcacaggagtctgcattaaaaacaaaaatctggcctcatagctactgtgttggttgttgcttctaggccttttcagtgggcagaataagaactttattgttttcaaaagatgtaactgtaagtggaacaatatcctccgatcctcctttttccttttttgataacgacacagcattcctctgtgtggatataccgtgtgtcttaggccatttgggctgctattttgtatcttagactgggtaacttataaacaacaaacatttatttcttacagtactagaggctgggaagtccaagatcaaggcattggcagatttggggtctggcgaggacttgctgtctgcttcatagatggtgccacctagctgtgtccccacaaggcggaaaggggcaaacaagttccctcaggccactcttacggggcattaatccctgacttaatcacctcctaaaaagggtgtcctcttgacactatcacattatggattagggttcaacctatgaattacgtaggcacagacacattcagatcctggcactacatgtaggatattcagttagcccctggttgaggggcgtttgtgttgatactggttttctgctattacacataaccctttaatgaattgccttacgcatgcatgtttttgagtgttcgtcagtctctctttggaatagactcccagaagtggaattgctgagtcaaagggtaaatgcatacggaattttgattgatacggccatttcccatccatgggggttttactgttttatattcccgccagcagtgaatgagtacccttttttccccaacagagtattttgtcaaatttttcaatttttgcaggcttatagatgagaagtgatattatctcactgtacttctaattgcatttctctcttttcatgtggttaagagccatttgtattttctgtgaactatttaacctatttttctatagaatttttggtctttttcaaccattttcagctctttgtatactaggactattaaccctttgtaatgtttgttgtacatatttttcccaatttgtcatttatcttttcacttggtttctgcaaagatttactttatttctgtgttaaatgtgttgattttttcttattgcttctggattttagagtcataggaaggttttcttcattcccagcttttacaggaatttatcgtgtttttttcaggcagacttttatagtttctgtttttacatttaaatctctctatccatttggagtttttcctggtatagatgtgaagtatggctccagattgtctttttccacatgctatccagttaccatttcatgcttttcaaacgccatcctgcatggaaggtggacaggaattacctttcatttagagatgagaagatgggaacctagaaggagatgtgagcagcccaaggtcaccagctcacgtggagcagtgctagggcttgagcagagctctgctgctgattctgggcttctgtgaagagtgattcatgctcagtgagcctgtaaatatgatcttacctgaacaagagagtttttctcatgacccacgaggaaacacttccttgttactcacagtagagacctggttagaaagtgctggagagggctaggtgtggtggctcacgcctgtaatcccagcattttaggaggctgaggtgggcagatcatttgaggtcaggagttcgagaccagcctgggcaatgtggtgaaagtgaaaccccatctctgctaacaatacaaacattagccaggcgtggtagcacgcacctataatcccagctactcgagaggctgtggcaggagaattgtgagcctgggatgcagagtttgtagtgagctaagatagccccagtgcactccagcctgggcgacggagcaagactgtctcaaaaaaaaaaaaaaaaaaaaaaaaaa

SEQ ID NO: 257 - DNA, 4043 bp, Homo sapiens
cgaacagacagacttgaggtatgtcgagagtaccaacgtggcaattgcaaccgaggagaaaatgattgtcggtttgctcatcctgctgacagcacaatgattgacaccaatgacaacacagtcactgtgtgtatggattacatcaaagggagatgctctcgggaaaagtgcaaatactttcatccccctgcacatttgcaagccaagatcaaggctgcccaataccaggtcaaccaggctgcagctgcacaggctgcagccaccgcagctgccatgggaattcctcaagctgtacttcccccattaccaaagaggcctgctcttgaaaaaaccaacggtgccaccgcagtctttaacactggtattttccaataccaacaggctctagccaacatgcagttacaacagcatacagcatttctcccaccaggctcaatattgtgcatgacacccgctacaagtgttgttcccatggtgcacggtgctacgccagccactgtgtccgcagcaacaacatctgccacaagtgttcccttcgctgcaacagccacagccaaccagatacccataatatctgccgaacatctgactagccacaagtatgttacccagatgtagaattttcatcactaaacaatcatgctaaagaggaaaggacagtgtgcttggttagagtaaaggacgaggtcattagccatattgtatatatcgtcaagcaacacacacaaaagttcctcagccacaagacatccacatattgcatgttaaccagaagaaaagacaacattttccggaaatccactgcacactgttgcctatacactttgtacatttaattgatatttgtgctgaggtgatattcctgtctaaaagaacaacattgtctttcttttctagcacagagttatgcattcaaagatgcatacctagttagtttccyatatattcatgccatcttgaaaagacagactatggtgtaaccatgattctattatgtattggtacgtctgtagaccaagatataattttttaaaaataagtttatttctttcaaggtttacaaataacaaaggtgcaccttgtatttaaaattgccattatagatgagagcgtgcatgcacagtcatttttgtttaagagtaatatttttaatgtaatagattgtaagacgtggtgagggagggatctgacagagatgaatgtgccaagcaaaaccacaactgtgtatattttaaagcacatcatggctttaagtaccatgttgttaaggattctcatgaagtgccatagactgtacatcaaattagagtattatttcttcagtgttattgttttcagagccacattttgttgcatatttgctagtactaatcagtcaaagggcaccattctttttttttttttttgaaaccaaagctgtctcagaaatggccaatttaactttacagtaacaatagacagcacaacacaaactctctcaatacagataaactcacacatactggagatatatatataatagatatatataaaattattttaatgcattgtagtgtaatatttatgcatactatactgtataacatgttattcaaaagggattgccatttctgagacacagtaacaaaaaaatgaggaaattattttgcttctatttatagcctctgtcaaaagtcaaaagactataaatgctttgcaaaaatggtttcacgtttgcttaaatgcttcatcacagtcacattcaaaatagtgactctaaacaaagaagaaagcagcactgtcatcagatgcatgataaaccaaaatatgaaaatgggaaatgtttaattaacctagtaattgggtgggttaagtacatgggtgaattttatatgtgatttttgttttgttttgttttgttcagattaactgcttatagccttagaaagccttttacaaaattaaaaaaaaaatagatgtgcattcagtttttaagaatggaatcatccaaaggaattcctttttttgaggtttggatgttgcagctagtaaaggatatttttgctctgttcagcagttctaaaaattgctgaagtaggggccaggtcactggtagttatagtatggaatgggagaagtgaaagttcagttatagaactttccatacttccaagtttactgcaagtttttatgcttgagagagatgctttctaatataagactgatgtgttgattttactgattgtactgtacatctattaaagccttagattattacattacgggttggaacccataccaatgtaatttcaatcgtgttaagaaagtaatggtgacttcacatgttattgtagttagttacattatagaatattacttatttttcttgttaaaatgtagtttttcatttcctacatttattagattttcattttctattaacaattgaataccatttcagtttatagacttgttttattagattttaccaatgaatttttcaaaatacaaaaaaaagtagtttttccttcataacatactcagttttgaattacatgtagtgtcacatgaatattcgtattgttaactaaatgatttatattttactgatttaatattacagtgtaagaatgtcagtcattgttagttcttgtctagttttcattaaaagaacaaagatcttttatatggatatcttataaatatataatcattgctaagtaagaagttaagttgttgctatcgcaacaatcctggcagacaattgagtaatattttgatgatttattttgtttgtaattagttattataagaagatctagatcctagatattagaataaaatttattttctactgtatccatttcaaatgttaaaatattgtttaatatttttgaaatccctgagtatcaggccttgttataaataagctgcataatcaataaatagaacaagggactttttgttgataatccaaatactcaaagtttacgtaatgaaaattatagcgtgtgtgcaaactcttgagggttgattatgctgcaatttagcatgttggaacgtctagggagaaggttgactttttgcacttctgtatatagtcaaaagagagaaacctgtataatagtaagatcttattttgaataaaaacgtctataattacaaggagttttgttaaggctaatacaatgacagactgagcaaaattgcttgcaaaagtggcacagagttagcactccataccccttcaaacatgttgctttgctttcttgtggacagcttgtagtttgccaggattttttcagctggaaagatacgccatcctttcaaaccctcatgactgacaaaaactccatggggccaaatctgcctgaagatcattaccaaaaatagcaggtacttctaccattaaggtgaaatcatggatcagatattccttacatttttcaaaactactgcatgtttaaaacttcaacaaaaaaagagagaaagaactatactaagaacatatattattcagatcagtttctgccaatttcagtggtttattgttcacaaaaaaatcttcaaaacaagtattgactttcacaaaatttaaatcataaacaggcaaaccaaacagcacactgtagctatagttgttatgtgattgttttttaattgctgtaggatcctgttctttcagcaggtgaaaaataaaacgcagttcaaatttcatggttttaattttcaactcagaagcactcaaaaatgcaaaatgtgataatgggcacttgtttaaaagaattagtgtatccagccttcactccagctggttaaaaatgttgcacttatcagcaaccctaccactttcatctgctgaaaggacaaatgtgcttggttttactattatgtaatcacaacttactttctgcttgtagttgcttaaaattatgtattttgtcttgggctgcaatttgttttatgcttattttattattactgcagtagttgaccttgctgtatggaaaaataaagtgaaattgccctaataaaacttctctttcttaagtaaaaaaagggaa

SEQ ID NO: 258 - DNA, 4044 bp, Homo sapiens
cgaacagacagacttgaggtatgtcgagagtaccaacgtggcaattgcaaccgaggagaaaatgattgtcggtttgctcatcctgctgacagcacaatgattgacaccaatgacaacacagtcactgtgtgtatggattacatcaaagggagatgctctcgggaaaagtgcaaatactttcatccccctgcacatttgcaagccaagatcaaggctgcccaataccaggtcaaccaggctgcagctgcacaggctgcagccaccgcagctgccatgggaattcctcaagctgtacttcccccattaccaaagaggcctgctcttgaaaaaaccaacggtgccaccgcagtctttaacactggtattttccaataccaacaggctctagccaacatgcagttacaacagcatacagcatttctcccaccaggctcaatattgtgcatgacacccgctacaagtgttgttcccatggtgcacggtgctacgccagccactgtgtccgcagcaacaacatctgccacaagtgttcccttcgctgcaacagccacagccaaccagatacccataatatctgccgaacatctgactagccacaagtatgttacccagatgtagaattttcatcactaaacaatcatgctaaagaggaaaggacagtgtgcttggttagagtaaaggacgaggtcattagccatattgtatatatcgtcaagcaacacacacaaaagttcctcagccacaagacatccacatattgcatgttaaccagaagaaaagacaacattttccggaaatccactgcacactgttgcctatacactttgtacatttaattgatatttgtgctgaggtgatattcctgtctaaaagaacaacattgtctttcttttctagcacagagttatgcattcaaagatgcatacctagttagtttccyatatattcatgccatcttgaaaagacagactatggtgtaaccatgattctattatgtattggtacgtctgtagaccaagatataattttttaaaaataagtttatttctttcaaggtttacaaataacaaaggtgcaccttgtatttaaaattgccattatagatgagagcgtgcatgcacagtcatttttgtttaagagtaatatttttaatgtaatagattgtaagacgtggtgagggagggatctgacagagatgaatgtgccaagcaaaaccacaactgtgtatattttaaagcacatcatggctttaagtaccatgttgttaaggattctcatgaagtgccatagactgtacatcaaattagagtattatttcttcagtgttattgttttcagagccacattttgttgcatatttgctagtactaatcagtcaaagggcaccattctttttttttttttttgaaaccaaagctgtctcagaaatggccaatttaactttacagtaacaatagacagcacaacacaaactctctcaatacagataaactcacacatactggagatatatatataatagatatatataaaattattttaatgcattgtagtgtaatatttatgcatactatactgtataacatgttattcaaaagggattgccatttctgagacacagtaacaaaaaaatgaggaaattattttgcttctatttatagcctctgtcaaaagtcaaaagactataaatgctttgcaaaaatggtttcacgtttgcttaaatgcttcatcacagtcacattcaaaatagtgactctaaacaaagaagaaagcagcactgtcatcagatgcatgataaaccaaaatatgaaaatgggaaatgtttaattaacctagtaattgggtgggttaagtacatgggtgaattttatatgtgatttttgttttgttttgttttgttcagattaactgcttatagccttagaaagccttttacaaaattaaaaaaaaaatagatgtgcattcagtttttaagaatggaatcatccaaaggaattcctttttttgaggtttggatgttgcagctagtaaaggatatttttgctctgttcagcagttctaaaaattgctgaagtaggggccaggtcactggtagttatagtatggaatgggagaagtgaaagttcagttatagaactttccatacttccaagtttactgcaagtttttatgcttgagagagatgctttctaatataagactgatgtgttgattttactgattgtactgtacatctattaaagccttagattattacattacgggttggaacccataccaatgtaatttcaatcgtgttaagaaagtaatggtgacttcacatgttattgtagttagttacattatagaatattacttatttttcttgttaaaatgtagtttttcatttcctacatttattagattttcattttctattaacaattgaataccatttcagtttatagacttgttttattagattttaccaatgaatttttcaaaatacaaaaaaaagtagtttttccttcataacatactcagttttgaattacatgtagtgtcacatgaatattcgtattgttaactaaatgatttatattttactgatttaatattacagtgtaagaatgtcagtcattgttagttcttgtctagttttcattaaaagaacaaagatcttttatatggatatcttataaatatataatcattgctaagtaagaagttaagttgttgctatcgcaacaatcctggcagacaattgagtaatattttgatgatttattttgtttgtaattagttattataagaagatctagatcctagatattagaataaaatttattttctactgtatccatttcaaatgttaaaatattgtttaatatttttgaaatccctgagtatcaggccttgttataaataagctgcataatcaataaatagaacaagggactttttgttgataatccaaatactcaaagtttacgtaatgaaaattatagcgtgtgtgcaaactcttgagggttgattatgctgcaatttagcatgttggaacgtctagggagaaggttgactttttgcacttctgtatatagtcaaaagagagaaacctgtataatagtaagatcttattttgaataaaaacgtctataattacaaggagttttgttaaggctaatacaatgacagactgagcaaaattgcttgcaaaagtggcacagagttagcactccataccccttcaaacatgttgctttgctttcttgtggacagcttgtagtttgccaggattttttcagctggaaagatacgccatcctttcaaaccctcatgactgacaaaaactccatggggccaaatctgcctgaagatcattaccaaaaatagcaggtacttctaccattaaggtgaaatcatggatcagatattccttacatttttcaaaactactgcatgtttaaaacttcaacaaaaaaagagagaaagaactatactaagaacatatattattcagatcagtttctgccaatttcagtggtttattgttcacaaaaaaatcttcaaaacaagtattgactttcacaaaatttaaatcataaacaggcaaaccaaacagcacactgtagctatagttgttatgtgattgttttttaattgctgtaggatcctgttctttcagcaggtgaaaaataaaacgcagttcaaatttcatggttttaattttcaactcagaagcactcaaaaatgcaaaatgtgataatgggcacttgtttaaaagaattagtgtatccagccttcactccagctggttaaaaatgttgcacttatcagcaaccctaccactttgcatctgctgaaaggacaaatgtgcttggktttactattatgtaatcacaacttactttctgcttgtagttgcttaaaattatgtattttgtcttgggctgcaatttgttttatgcttattttattattactgcagtagttgaccttgctgtatggaaaaataaagtgaaattgccctaataaaacttctctttcttaagtaaaaaaagggaa

SEQ ID NO: 259 - DNA, 711 bp, Homo sapiens
gtgagaaaagcagtttgggtgacaaatcctgtgtggcacaagttggatcgcttcctagaaataagcaacacctctcccaaaaagcagcccacaaggcaggggcccagcagcccagccatcactcatctttgaggaaatgagttggtagcctctgtgcactgtttggtggccacatcacaggtgatgtcctgttcacatacctgcttgtatttaaagccctcagtctgtcctgttgtgtggggcgaagtgatggactctgccaggtggacatgctgtgggtggatgttcccggcgtgtgccgggcctgaatggacaggggccacttcacagcatgtcagggaaaatcactgtcacacaattccaatggattttgtgctctttttgaaaaaaaaaaaattctttagcgtaaacatgaattttttttcaatgtagcccctggggaatgaatgaaattttgagcttcttcaatacgtaaaattaaatttataccactgagggagagaccctttctgaaagaagtatggccaaaagcactttaatgctgctgacattgttgtttttatgttcatttgctggagcgcaagacgtgctgacacagtgagttttctctgatgtatttaaggtgatgtatttgcttgagttactcctgtatcattgctcataatattggaaactaaaataaaacctagttggaaaaaaaaaaaaaaaaaa

SEQ ID NO: 260 - DNA, 1113 bp, Homo sapiens
  SITE (119): n equals a,t,g, or c
  SITE (121): n equals a,t,g, or c
  SITE (1098): n equals a,t,g, or c
aattcggcacgagggaagaccaggcagcccagctgaaggcagtaagctcggctcacagtcgcaggagagttctggggtacacgggcaaaggggcttgagaaggcccggaggcgaagcgnangagaagcaactgtgccccggagaagagaagctcgcccattccagactgggaaccagctttcagtgaagatggcagggccagaactgttgctcgactccaacatccgcctctgggtggtcctacccatcgttatcatcactttcttcgtaggcatgatccgccactacgtgtccatcctgctgcagagcgacaagaagctcacccaggaacaagtatctgacagtcaagtcctaattcgaagcagagtcctcagggaaaatggaaaatacattcccaaacagtctttcttgacacgaaaatattatttcaacaacccagaggatggatttttcaaaaaaactaaacggaaggtagtgccaccttctcctatgactgatcctactatgttgacagacatgatgaaagggaatgtaacaaatgtcctccctatgattcttattggtggatggatcaacatgacattctcaggctttgtcacaaccaaggtcccatttccactgaccctccgttttaagcctatgttacagcaaggaatcgagctactcacattagatgcatcctgggtgagttctgcatcctggtacttcctcaatgtatttgggcttcggagcatttactctctgattctgggccaagataatgccgctgaccaatcacgaatgatgcaggagcagatgacgggagcagccatggccatgcccgcagacacaaacaaagctttcaagacagagtgggaagctttggagctgacggatcaccagtgggcactagatgatgtcgaagaagagctcatggccaaagacctccacttcgaaggcatgttcaaaaaggaattacagacctctattttttgaagaccgagcagggattagctgtgtcaggaacttggagttgcacttaaccttgtaactttgtttggagctggcacctcttgaaataaaaaggaggatgcacgagcaaaaaaaaaaaaaaaaacncgagggggggcccgg

SEQ ID NO: 261 - DNA, 982 bp, Homo sapiens
  SITE (970): n equals a,t,g, or c
agcgccaggctgcctactggtaatctgtgtatagtatataaacatgtaaaaataggttgtattktactctatgtatgatgctaatcaatgaacactttatttattttacagagaaaacttatctgtgaactttactatatatctgtttattttactttattttttttttaaataaaaagggttttaaatgctatgcagtcattagtagaaaattttttaggactctgcctgctctgtaactatcttaatatgatctggcagaaactcgcatgtatccaagtaaagtagtttagctaaagaaaggttcttcattgcttttctgttcacagttgtggctctgttttttaagaatgtaacttgtttttagattatacttgcatctgtgactttactaccagccacgttgacacaaaacaggttctggttcaggtaaagttgcgtcagtcacctgcagcagaaatccctcttcattcctcttctctgtgttcattcctcttctgtgctgttctgaagcttctaccaatactctttccatattgtctttttcagtgaagagaaatgcattcaagattaggtccctcctgtctatccagtttcaggattttatgttgttttatacacagttatttcagtatagaaactggctttattgccaagtgtttttttaaacatgttttaactctcatatgagcaaactgtccaacttcagtttttcataagattaaacttcttacgatcaaatttgtctcttgcaatgatgtgatgagttgccaaataattgagattattttaaaatgttttgttcatattcttgttttataattaaaatttacattcagtgtgtatgggtttttttttttattttgactcttaatgtaaggtggatatttctgtcattttacatggtttcttactgagattttatatataaattataaaatgtttaccaaaaaaaaaaaaaaaaaaaaanaaaaaaaaaaaa

SEQ ID NO: 262 - DNA, 778 bp, Homo sapiens
  SITE (445): n equals a,t,g, or c
  SITE (655): n equals a,t,g, or c
  SITE (690): n equals a,t,g, or c
  SITE (699): n equals a,t,g, or c
  SITE (733): n equals a,t,g, or c
  SITE (746): n equals a,t,g, or c
  SITE (771): n equals a,t,g, or c
gaattcggcacgagtctttatgcactttcctgtttcgttctcaccacagtgatgatctcggtcgtccacgaacgagtacctcctaaggaggtgcagcctccactaccggacacattttttgaccattttaaccgggtgcagtgggccttttctatttgtgaaattaatggcatgatccttgtaggactctggttaattcagtggctgctcttaaaatacaagtaagtcaagtaaaaaaaaaaaaaaaaaactcgagggggggcccggtacccawttcgccctatagtgagtcgtattacaattcactggccgtcgttttacaacgtcgtgactgggaaaaccctggcgttacccaacttaatcgccttgcagcacatccccctttcgccagctggcgtaatagcgaagaggcccgcaccgatcgcccttcccaacagttgcgcanctgaatggcgaatggcaaattgtaagcgttaatattttgttaaaattcgcgttaaatttttgttaaatcagctcattttttaaccaataggccgaaatcggcaaaatcccttataaatcaaaagaatagaccgagatagggttgagtgttgttccagtttggaacaagagtccactattaaagaacgtggactccaacgtcaaagggcgnaaaaccgtctatcagggcgatggcccactacgtgnaaccatcancctaatcaagttttttgggggtcgaggtgccggnaagccctaaatcnggaacctaaaggggagccccccgantttagag

SEQ ID NO: 263 - DNA, 1234 bp, Homo sapiens
gcaaagcctcttctaagaatagctgtgaagggagctggaagctatgagatcagaatgaataataatttttgcatttcacacaaaagccaggtaggaagtaaagcataatgggggcctcttggatgccaggtgtttaacacctgatggcatctaatcctcacaaaaaccttcactggtgccaccatgcccagatgagacatgagagggtctgagaggctgaggaacctgcccgttgtctcaccacaaatgctgacccagccaactgctcaccctggccccccgcccccagcccccaaacccagtcctttctacaacctgctctctctccaaatagcagtagtcagaggctgtgctgaggcctcccagaaacctttcccctatgtggatgtaaccttctcgagacctgcttttggagttcaacctgtgctgaaggggcagagaaaaatcctatgtcatgaggggcacttgagataagcctcataggaggagagaagcttctccctgtgtggaaggaggcagcacacaggccacagagaggcgcagaagggacaactgaggccaagagaggcggaaggtccccagacgggttttctaaaatatctttctctgaatagcatttttacttaaatttgatatgcaaatgcagataattggtattcatgtaaatatttactgcttaaaacagaaagttacttgtaataggccaggcacagtggctcacgcctgtaatcccagcactttgggaggctgaggcaggcagatcacgaggtcaaaagatcgagaccatcctggccaacatggtgaaaccttgtctctactaaaaatacaacaattagctgcctcaggaggctgaggcaggagaatcacttgaaccagggaggcagaggttgcagtgagccgagatcgcaccactgcactccagcctggtgacagagcaagactccatctcgaaaaaagagaaagttacttataatagaaagcctgttcaaatgtggcaagtgcaacgtattcttttggaggctctaaacccaagcctgcaggtccctgatacgtcttctttgccatctagtggtagccattagaactgcatgtgtgggcccggcgccgtggctcacgcctgtaattcccgcattttgaggggccgaggtgggtggatcccttgagcccaggagtttgagacagcctggacaacatggcaaagcctgtcaaaaaataaaaaaaaaaaaaaaaaaaa

SEQ ID NO: 264 - DNA, 876 bp, Homo sapiens
ggcacgagctggcccccatcgccgtctcagtgcggcgattcttcctggtggaggcctccgtctacgcctacaccatgttcttctccacgttctaccacgcctgcgaccagcccggggaggcggtgctgtgcatcctcagctacgacacgctgcagtactgcgacttcttgggctccggggcggccatctgggtcaccatcctgtgcatggcacggctcaagacagtcctgaaatacgtgctgtttcttctgggtacactggtcatcgccatgtccttgcagctggaccgcaggggcatgtggaacatgctggggccctgcctctttgccttcgtgatcatggcctccatgtgggcttaccgctgcgggcaccggcgccagtgctaccccacctcgtggcagcgctgggccttctacctcctgcccggcgtctctatggcctctgtgggcatcgccatctacacctccatgatgactagcgacaactactactacacccacagcatctggcacatcctgctggccgggagcgcagccttgctgctgccgccacctgaccagcccgccgagccctgggcctgctcgcagaaattcccctgccactatcagatctgcaagaacgatcgggaggaactgtacgcagtgacgtgacactggcctggggacagctgctgctctgatgactcttcagccaggagctgtatcgaggggagcgcctggtccagccctggacagattgatttccagctgaataaattggcctagataccctcaaaaaaaaaaaaaaaaaaaaaaaaaaaaaaaaaaaaaaaaaaaaaaaaaaaaaaaaaaaaaaaaaaaaaaaaaaaaaaaaaaaaaaaaaaaaaaaaaaaaaaaa

SEQ ID NO: 265 - DNA, 822 bp, Homo sapiens
ggcacgaggctttgggcagttatggcagtatggcattagctgagaggtgtctgccacttctgggtcaatggaataataaattaagtacaggcaggaatttggttgggagcatcttgtatgatctccgtatgatgtgatattgatggagatagtggtcctcattcttgggggttgccattcccacattcccccttcaacaaacagtgtaacaggtccttcccagatttagggtacttttattgatggatatgttttccttttattcacataaccccttgaaaccctgtcttgtcctcctgttatttgcttctgctgtacaagatgtagcaccttttctcctctttgaacatggtctagtgacacggtagcaccagttgcaggaaggagccagacttgttctcagagcactgtgttcacacttttcagcaaaaatagctatggttgtgacatatgtattcccttcctctgatttgaaggcaaaaatctacagtgtttcttcacttcttttctgatctggggcatgaaaaaagcaagattgaaatttgractatgagtctcctgcatggcaacaaaatgtgtgtcaccatcaggccaacaggccagcccttgaatggggatttattactgttgtatctatgttgcatgataaacattcatcaccttcctcctgtagtcctgcctcgtactccccttcccctatgattgaaaagtaaacaaaaccccatttccaaaaaaaaaaaaaaaaaaaaaaaaaaaaaaaaaaaaaaaaaaaaaaaaaaaaaaaaaaaaaaaaaaaaaaaaaaaaaaaaaaaaaaaaaaaaa

SEQ ID NO: 266 - DNA, 513 bp, Homo sapiens
ggcacgagctgcacccagccgaactgtgtcttctagttctttttttaggaccttaaacattgtttacttgattgaaatttaaattttatattacatttgtaataaaactagaaagcatagataagctatcaatcaaaatcacccaaatcctgtgactactactcactgcaaacattttaatgtgcaatttgtacttaattctttactttgtaatacatacaaatatgtccagacactgtgacatatgcttgtgaacttttcaaaggtgatatcctgctgtgtattatattttgttcttttcatgtggcacattacaaatgccctgtaatacagataattatcaaatacttcttagcattcttttatgtataaatgtaccatagtagtaaatttcttccttcacattgagactttttttaaaactataaacagtactctgaattgctataaaatatgttctatatcaattcattcaaataaatatatagaagttgaaaaaaaaaaaaaaaaaaa

SEQ ID NO: 267 - DNA, 888 bp, Homo sapiens
  SITE (99): n equals a,t,g, or c
ggcccggctaatttttgtatctttagtagagacggggtttcgccgtgttggccgggctggtcttggactcctgacttaggtcatctgcccaccttgtgnctcccaaagtgctgggattatggtsatgagccaccatgcccagcctgcataccttttttttattgttgccttttgtttttatgcctgtagcttttacattacattaaacagtttttgaaaattgtcagactgttaataacattagttttatcttgtttgaaaattatttagtaaggagaaagaaaaatacaaattcatgttttaattgatagttgtacgagcctcatagcaatatttccatgtgctatattcagttattgcttaaacaattttgtaattaacacttatatgtcaggatctgttttctcaagtaaacttcggtttttccaccaaaatggtgtgggtttttttttttttaatatattgtaatctgtatttcctactactgccgtgtcattggagaaacagtaaattaaacctgaagaactcctgaataacttaacttcttcgtttagaaatgcttgaaaatagagttgcaggccaggtgcagtggctcacgcttgtagtcccagcactttkggaggccgaggtgggcggatcayttyaggccaggagtttaagaccagcctggctaatatggcgaaggtccgtctctgctaaggatagaaaaaaattagctgagcgtggtggcacacacctaatcacagctaataaagagtctgagacacaagaattgcttgaacccaggaggcagaggttgcatgcagtgagccgagattgtaccactgcactccacacttcgcgacagagccagattctgtctcaaaaaaaaaaaaaaaaaaactcgag

SEQ ID NO: 268 - DNA, 1064 bp, Homo sapiens
  SITE (116): n equals a,t,g, or c
  SITE (309): n equals a,t,g, or c
aattcggcagaggtcttgcataatgaaatccttttttggctaagtatttaattcgaacatatttgcctttttaaaaagtgcttggcctaaacttattgtaactgcatgaaataagncatttgcttaaaacttaacattgtaaaattgttctctctgaaatgagtgcagaatttaaatcatggccaaatgtattactattaccctatttacagtaatttsctttgcagaaaatatttctycatcatggaactgtgaaatcaaattgaagatcttactggtaaaaatgacaaattaacaaaaggactaagnacaagtggtgcccaaacaacctttttattctgcagttccatcatcataatagaccagttaacccaggagtcctaatgttttaaaacatcattgtggtgatcttgtttattctatctcactaaggatatccagtttcctaagctcttactggctagcaatttcgtcttaattttattgctaaatgttcaaattttgcttccaaactcactttatttttgcagatgtgtacatctgctaartactaattttatgtaaatgattttgttgattatctttccacatcttaaaatgtttctaacagctttgagattttatctcaacaggctctctctgaccccaaagtagtacttaccttcgtgactactgacaaagtcacaaaatgcaggcgatgtcatgtatttcggtacaactaaatctaggaaacggttttttcattgcattactgcatattttcattttcatttaaattatgtcccctttttctcttgcttgaaacagtgctcctcgaactttgtcttccagcacattttaaagagaaccaattaaagaacaatcacacattctgcttattaaaggctatttaaaaagaaacattttgtattagaaaatggccaactttaaaacactattttttacactcataaaaatgttttttaaatcgccttgacaatcatcagcttttgaaatgtgaattcctattgccagagtaaaggtctcgtttttataccaccaaaaaaaaaaaaaaaaaactcgag

SEQ ID NO: 269 - DNA, 1282 bp, Homo sapiens
attttacacttaatttataatatttattgagtatattatgtcctcaacaagtaactataaaatgaaatacttaactcggtgaagactattttatgcaaagtttttttttttttttttttttttagcaatttcagtgtaatgaaagaatttaagctttgaatttataatttgctgtggtggggttaatttctgtcagtatttgagattgtattatcagtcttgcataatgaaatccttttttggctaagtatttaattcgaacatatttgcctttttaaaaagtgcttggcctaaacttattgtaactgcatgaaataagcatttgcttaaaacttaacattgtaaaattgttctctctgaaatgwgtgcagaatttaaatcatggccaaatgtattactattaccctatttacagtaatttgctttgcagaaaatatttcttcatcatggaactgtgaaatcaaattgaagatcttactggtaaaaatgacaaattaacaaaaggactaagacaagtggtgcccaaacaacctttttattctgcagttccatcatcataatagaccagttaacccaggagtcctaatgttttaaaacatcattgtggtgatcttgtttattctatctcactaaggatatccagtttcctaagctcttactggctagcaatttcgtcttaattttattgctaaatgttcaaattttgcttccaaactcactttatttttgcagatgtgtacatctgctaartactaattttatgtaaatgattttgttgattatctttccacatcttaaaatgtttctaacagctttgagattttatctcaacaggctctctctgaccccaaagtagtacttaccttcgtgactactgacaaagtcacaaaatgcaggcgatgtcatgtatttcggtacaactaaatctaggaaacggttttttcattgcattactgcatattttcattttcatttaaattatgtcccctttttctcttgcttgaaacagtgctcctcgaactttgtcttccagcacattttaaagagaaccaattaaagaacaatcacacattctgcttattaaaggctatttaaaaagaaacattttgtattagaaaatggccaactttaaaacactattttttacactcataaaaatgttttttaaatcgccttgacaatcatcagcttttgaaatgtgaattcctattgccagagtaaaggtctcgtttttataccaccaaaaaaaaaaamagaagtaagagaaaaaaaaaaagtcgac

SEQ ID NO: 270 - DNA, 1154 bp, Homo sapiens
ggcacgagcttctaagagcagccatcaggtccttgagagctgcttgcctctctgctgacttgacctcgttgagaatgcttggcatccctgtctccatggtatcaccatgcatgcctcctgctttccaaactccttcacctccagcccttagcagtggctgactcataggaaggtgcttgagtgttctttcctgaattctggatctgccttccccaaatgcacaagcatcagccatgccttccacattcaggaaggtttgatcaagccagcagggaggtgcaggtgaaggtgaacctcaggcagagctaggaagcctgaaaatctcctcagtcgtcctaacgtggagcttaaaagagtggattctatttcaaatcctaactgtgccattcaatagctatatctttgggtctgtagctaaacctctgtggtgctcagattcctaatctataaaatgagaaggctaaatgtggctatcccagtacagctcttttgtgtgttaaatgagagaagtcagaaagcactttgcacagggcttttctgtggaaaggcccagtaatattagtccttgatgtcattttaccattatacttgttaaagtctaaagttgttcagcgtttttctttacccttatcaaatgtcactgtgagttaacagctcttgaaaaagtagaagcctggggtaatcatttcacaatgtttatgtatatcaaaatctcacagacgtaccttaaatatacacaatatgtatttgtatatattatacctttctaaaatattataccttgatacaattatacctcaatacagctgaaaaaattagaatttttttttttttttgagacagagtcttgctccgtcacccaggctggagtgcagtggcgtgatctcagctcactgcaacctccgcctcccgggttccagcgattctcctgcctcagcttcctgagtagctgggactacaggcacacaccaccatgcctggctaatttttgtatttttagtagagctggggtttcattatgttggtcaggctggtctggaactcctgacctcgtgattcgcccgcctcggcctcccaaagtgctgggactgcaggcgtgagccaccgcaccgggccaaattatagaaaattttcataaaaaaaaaaaaaaaaaa

SEQ ID NO: 271 - DNA, 1810 bp, Homo sapiens
ggcacgagggtgtgatgtcgtttttacatagcacctttatacacgatataaaaaagtaggttttttgcatcaactgcaaacatgttttgtactctgtggatcggaatcttggtgaggaagagcattgcatcccgcaaaaggctgatgagtcagttagctggagagacagtgccatcattctgggttgcagttctggtgaagtaagtaggatgttaacactgcagatggaaatggttttcagattgccacatggaataatagtatggaacgtgaaatttcaggaataggaggagattcttttattattttcctccttccactttgtacatttttttaatagcctgcaactagttacatttatctttttttttttttttacatttttatccataatacaagtaacttgactaaagccagtgtctgtttcatgtaaatatattaacaggtccaaaatcaccaactaaaattagctttatactgactttttctaaagtcagtccttgtctcacccaaatattttaacaagtccaaaaatagcacatagctacttggaaccatattaaaatctcattataacatgaatttcaggtattccatgttgtagacttctccttgaaagataatgacattgaaaaatgctcttaagagagttgttaattctgtttcccaaaacttcctggataaaacaattctaccttaatgctattaagactatggtaggtggtttttttcttaaagtaacaagactgacgtataaaatatgaatgcgacatttaagatgaaagtgttcataggcacacctcgctttattgtgctttgctttattgcgcttcgtagatactgtgtttttactagttgaaagtttatggcagccctgtgaaaaataagcctgtccgtgctgtgaagcgaacagcatgtgctcacttcatggctctgtgtcatgtttcggcaattctcgcagaatttcacactttttcattattatctgtgactgtgatctgtggtcagtgatcttgttgtttctaatgtaatcgttttggggcattacaaaccatgcctgtgtaagatggcggattagtacattctcacaccgctataaagattctacctgagactgggcattttatgaagaaaggggggttataaagatactacctgagactgggcattttataaagaaaggagggttaattgactcaaggttctgcatgtctggggaggcctcaggaaacttacagtcatggcagaagatgaaggggaagtgaggcacatcttacatgatggcaggagagagagtgtccaggagaaacagccacttttagaactatcagaactcatgagaactccctcactatcatgagaatagtgtgggagaaactgtgcccacgccaatcacctcctaccaggtccctccctcaacacatggagattacagttcgacatgagatttgggtagggacacagagccaaaccatatcaaatggccaggttaattggtaaatgtcgtatcttctgactgctccactgactgactgttctcctatgtctccctctcctggatctccctattccctgagacacaacaatattgaaattttaggcgaattcacaaccctgcagtggcctttatgtatttaagtgaaagacagagttgcacgcctctcactttcagtcagaagctaggtgctcacgcctgtaatcccagcactttcagaggccaagtggggcggatcacttgaggtcaggagttcaagaccagcgtggtcaacatagtgaaaacacctctctacttaaaaaaaaaaaaaaaaaa

SEQ ID NO: 272 - DNA, 1345 bp, Homo sapiens
  SITE (1014): n equals a,t,g, or c
ggcacgagcctctctgggatggtcattctcctagcacatccatgtattcaccaacctggaatctcccttaacctgtttgcttcagaatttttattgacttttcagtacataggtataattgattaaatcactggccattgtgattgagctcaatctccagccccttctctttcccagaaagtggcagtaggatgagttgaattgggggctggtaagttcctaaccctctcatcatgtggttgggttcctcctgggtgactaagggcctatgctgaagctatctaagggcttgcaaagagacacctctagcataaacttaggtatgatcaaaaggggctcgttagaaataacagacactcctatcaggaaatcccaagattctgaggacctgtgtgcaagaaactgggtctttgtagaccaaatatatatttttcattataccacaatgctccataattaatactttcttattctacctagtcttcctgggagatctcccagagaaatccacatgtaaacccaaactctcacagtagactttggattttgattttctttcctcttgagtttttccacttgtgtagaaattacctcaggtacaccatgtgaattctgaattcattatttctactctgccccaactgttttttcctcctatgttctctttctccatttgtgttgatatcagcctaagccagagacacatgattctgaattctgtcttccctcttatccattcagtaaccaattcttacctattttgcttcctttgtaattcttaaatttaacctgtttccccatccctcaccattactaggtatatccactcaaacctattttccacacactggctaggttgttttcctagaatatgaatctgaccatatcatttctctgcttaacagcttctactggatcttcattagccagaagaatatttaggtttctaagctggacgtgcagagtcctcaacagttttggttttgattctaccatgtctttgagattcaactnacataacacttcattgagaaagcccattttaggctggacacggtggcccacgcctgtaatcccagcactttgggaggctgaggcgggtggatcagttgaggtcaggagtttgagaccagcctggccaacgtggcgaaaccccgtctctcctaaaaatacaaaaattagccaggcatggtggtgggcacctgtaatcccagctactcaggaggctgaggcaggagaatcacttgaacccgggagggggaagttgcagtaagccgagattgcaccactgcactccagcctgggcagcagagccagactccatctcaaaaaaaaaaaaaaaaaa

SEQ ID NO: 273 - DNA, 1831 bp, Homo sapiens
ttttttttttctggtgttggagtcttatttagaaaacaggataaatgacgctgttatcaaaagttgcctggggttctgtatttcttctctgccctccaatccccgactgctatgatgtttactacagtgaacccagcccatggtaaacacaggcttcacctgttcttgtttgttagccttgactgtgaggcaggacttccctcgcttgaactgttacacatacgatgtgtgtgtcacatcacatattgtgcagctgttggttttcatgtagtgccctgcgatggaaattagatatatttcatgtatttttccattgaaggtggagtttttcaatgatcatgtgttttgtcctcctaaacagtataccaaagtttgtttttatagttgaggattgtattgataaccactggggttccgcattgaagcaggaacaaattgcctctttttctggccttctctgtgggacctctgcttttgtgaagcaactatttatttgaagaccagggtatgggcacttttgccttctctcctctctgacttttgagggtattgagggcgcccttagtcatagtctcgactccgccattgccttctcctcggcgtcctcacaactcttaattgggcctagtgaaaatgggggcaggtgagaagtccattttgagaatcagcatagtaaattacatttctaatcccagaggacttaatattttcttttgtcaccccagaggtgaaaaatcagcagttgaagcctgacaggcctgcagtggtgaccaggaacagaagcagccttcctgttagtagatgggggtacttctgtggtgggcagaagccttactaaaggggaagacagactttgaagtttctagacgagaaggaggctagcttctagcctgggtggccattattccaaaaggtcattgtttctcactagaccccagggcaccagatgaatttccaagtttaaactctttcctgcaggtgattactttgaaaaaggttggtccagaccattttgatcaagaacctgtatatgtgttgtgttagaggcatctgcctcaagtctatgtacagtgtttgctgcgggtgtgttccaatattcattttacctctgcttgggggttttgtgtgttcccctccccccatgccctgcctacccccttttccctgaaccacgtccttttgaataatttccagatggatttctgtagccataccaaagccagggtgttttcattcatgcggatactagtatttatagatgtctgactacctaacttaatttttgtttttgaacttctaattggggccagtgtaaggtcgatcccagaggctgatctgcaaatcaagctacatgtatttgtgtataagaccctgtgttcaggactgggtgacttttctaagaaatatggggtttagaatggggttgactgtattttttaacctaattctggagagaagattgtattttttacagttttttgggtttggcttccttctcacatttctttagctttgaatttttactaaataaatttcctcctgattaawtttttttttctcatctgggaatttgaaatctcggtgcttactgttacaccaatttgtccaaagagttgaaatcactttaatgccagaacatggtaaatttgcagccatttcaagcaggtggtggtctttttttataacatcgttaacgggtaccattaaatattctgagaggtgaatgtaaaatataaaaggtataggkttttttttttttttaaagaaaacaataaactttcaaagagaaaaccaaaaaaaaaaaaaaaaaaaaaaaaaaaaaaaaactcga

SEQ ID NO: 274 - DNA, 1139 bp, Homo sapiens
aattcggcacaggttgggtgcctacccaccagtctcatgtgtgagtgtatctgtataagtgtgtgtatgtgtgtgtactcacgtgtggctctccctctgccactgagtttctgtgaccaggcccacctggtcactaagggaggggactgatccctggggtttcctcgttcctgctgtggagtgagctggggcttggtgagcaggccagcagagggaggctgtatggtgcatgtgtgatatgtgtggttgtgtgtgtgcgtgtgtgtgtgacagtatccaacccaatttcctgcctgtctgttgccccttcccatctccttgaccaagcagcttgagggaggggggatgcccagacagagcccccagtacccagccctgttcagcctgcatgacagcccctccctcaccagaccttagtgtcagtagtagcgatgggggagacaggggtgggggatgattcagagctgtgactgcagggcgctgacaccatttagctggcacagtttagattaaaattagaaataatttaaagtacagacaaaaagataaagccaaggatgcctctgcccccagggaatggtgatgggggtctccagctgggggaggggttcacatctggggagcagaatctttcttagaggcttgagctggccttcagagaaaatgcttaggcctttcagccaggagacacagagtaccttgctacctttgccatttcttcctcccaggatatctccaggcctcagttttttcagctgtgtaatgggcacaatagtaatgtgagaatcacctgaactgtaaggcacaagagattaaaaaatgtcactcttcagtctgggcacggtggctcacacctgtaatcccagcattttgggaagccgaggcaggtggatcacttggtcaggaatttgagaccagcctggccaacatggtgaaaccctgtctgtaccaaaactacaaaaattagctgggtgtggtggcgcgcacctgtaatctcagctgctcaggaggctgaggcacgagaatcacttgagaccaggaggcagaggttgcagtgagccaagatcgtgccattgcactccagcctgggcgatagagtgagaccctgccacattaaaaaaaaaaaaaaaaaactcgag

SEQ ID NO: 275 - DNA, 618 bp, Homo sapiens
ggcacgagataaagatagactcttttctcttttttggtagcatcttatatgaacaagcctcacagtgctaatgagtaccataatgttcagtctatggacaatatgtgttggcctgcccccagccagatccctcctgtatccacaccagtaactgaactttctcgaatttgttcccttgttggaatgccacaacctgatttctcctttcttaggatgccacaggtatagtatactactgttctatttatataaattatttaacattaagcttaaataaattggttgaaaatgtttagctagaaaaaataaaatggggcctatttttcttaactttatgagcagcatagatttatgcttcttaccctagctctaatatttatacataaccaaagccctaagagaagctgacagggaggaactggggcagcaggtatcctggcaagattcctcaaactaatagagccagggatcttggcctacagtagcaattttcaaactttttggtctcagaaacttcacactttttttggaggaccccaaagagattttgtttacttatatccatatttactgtgtttgaaattaaaacaaaaaaaattgaaaaaaaaaaaaaaaaaa

SEQ ID NO: 276 - DNA, 1121 bp, Homo sapiens
ggcasagctcaggggctacatgcagatacttcattggcagtggctcttatgtgtaaagtactttccatttggtcttatttttatccacatagtttccttgaacaaaggagaaactacatataggagaaactgaggctcagaaaggtacaaggtgacttagcaggtcatgtgcaaaatctgttatagaactcaagtcatttgattcttgacctgggctcttttctgaatgcagtatttaccactcatgttgccaaacaactaaacaaacaaacagacaaaaactcagttgttcaatgagtgttacaggagattttgttcttcttagttgctctggatccttctgttggccacccttgtggggctgctgctccagcggcttgcagctagactgggagtggttactgggctgcatcttgctgaagtawgtcaccgtcagtatcccaaggtgagcaatgtattgtcctgtttgtctctcacccatgccataggaatctgtgtgtctggyggtatgtgctggcctcattctatagtgagacagtcaaggacttgggggtcagtggccctgaagacagacrgtaccaacggaaatactgtagctcctcctgctgccaggccatgttttccccctctttcaaaatctaacttgagactcgcatttcctagaaggttttcttagaaaaactgtgttaccattcactctggcttccagtatctagcaatgcccagcccaaggggaggaggatgctctctctaagcacttttattcatacctccatgttactccatcagtttgcattttatatatgttctttttttgtttgactttgccatcactttgaaaaagtaattttttttctttttagtacaaactatatgtggcaagatctttggatttgctaataattatttttcagtttcccctcccaccgggggctacactgtcctctgcagcttcttctggacattttgggcctttcttaccgttgcctaaggcaagaatgaacactatgtctggaagatatttttaacttagttttgtctcttgttttgtttcttttcctgggtgtgagcaaaaagtatccttatctgcttttcaaaaaaaaaaaaatcttgataataaa

SEQ ID NO: 277 - DNA, 1233 bp, Homo sapiens
gtctgaggcagtctcatgacactggcatttgtagtcctagccctctggccaaatgggaggrcacatgttcttgtacacatgtgctggctcctgttccttaagagctggcagtgtcagcatatgggtggcatctaacaggtaccatagaaactggatgtatgtgttctcattgcctgcctgcaacctagaattcctgcccaggaggagttcttcaaacgctatgaaagatgttcccaccccctgccatgcagctacactaaaaggacatattgatttctctccagaattgtgtttatgctgaccactaaatatcaacttattaaaaaaaaaaacttacgtggttttaatttttttttcgctcccccctcgcccacaggagaactaatgacagttgccagatggatgagggagtttatcgcaaaccatcctgactacaagcaagacagtgtcataactgatgaaatgaattatagccttattttgaagtgtaccaaattgcaaatgaattatgtgaatgcccagagttacttggatcagcatttaggaaagtaaaatatagtggaagtaaaactgactcatccaactagacattctacagaaagaaaaatgcattattgacgaactggctacagtaccatgcctctcagccagcccgtgtgtataatatgaagaccaaatgatagaactgtactgttttctgggccagtgagccagaaattgattaaggctttctttggtaggtaaatctagagtttatacagtgtacatgtacatagtaaagtatttttgattaacaatgtattttaataacatatctaaagtcatcatgaactggcttgtacatttttaaattcttactctggagcaacctactgtctaagcagttttgtaaatgtactggtaattgtacaatacttgcattccagagttaaaatgtttactgtaaatttttgttcttttaaagactacctgggacctgatttattgaaatttttctctttaaaaacattttctctcgttaattttcctttgtcatttcctttgttgtctacattaaatcacttgaatccattgaaagtgcttcaagggtaatcttgggtttctagcaccttatctatgatgtttcttttgcaattggaataatcacttggtcaccttgccccaagctttcccctctgaataaatacccattgaactctgaaaaaaaaaaaaaaaaaaaaaaaaaaactcgag

SEQ ID NO: 278 - DNA, 426 bp, Homo sapiens
ggcacgaggaggtggaaggccatacagaatggagccgtgagtatggccagcctccagctctcagccaggaggtccccaaccccaaggaaggaagaaactggaaattaggaactgcttcctcatttaacaaggtgcttcttttcatgtgatgaggccctgtgaagaagggacaggatatacagacgggggcagctggagacagttatgatgagtgccggctttgtgtctgagcattctgctcccatggacatccccaacaacagcagggaccaacctatgtcactgtcaaagggcagctgagaagggcctgagccccagggacccctcacctgatgggaatgagagtgtggggagcttgcttcttggctgaatggtctgctggggtctggcatagaaagcagatggcttaaaaaaaaaaaaaaaaaa

SEQ ID NO: 279 - DNA, 3244 bp, Homo sapiens
  SITE (343): n equals a,t,g, or c
ggcacgagcaaagggggaaaaaatggccattatgttgcaagcctgagtacatcttacctggatgccatgcccttcgtagcctggttttgtttttgtgtctttagcaccatwcactttagtattttggcctcccggaaagaaaaccagccttctagacttgccagattgaaatgacacagtgatctgcccatcaactttttatcatttcccttcactttaattgggtcacaacacaaatgacttagaaaatgtgagcgcactagattataagaagccttagcagacagtgtctgaggattaaagttgcttttctgctawgkttcaggtggttaatggaatgaangggttgcctgtcctgtagctatatcgagaagtttactgactttcttcggctctttgtgagtgttcacctaagaagaatcgagtcttactcccagttccctgtggtggagtttttgacacttttgttcaagtacacatttcatcagcctactcatgaaggttacttctcttgtttggatatctggacgctgtttttggactatctgacaagtaaaattaaaagtcgtcttggagacaaggaagcagttctcaacaggtacgaagatgccctggtgctcctgctcacagaggtgttgaatcgaatccagttcagatacaaccaagcccagctggaggagttggatgatgagactctggatgacgatcagcagacggagtggcagcggtacttacggcagagcttggaggtggtggccaaagtgatggagctcctgcccacgcacgccttctccacactgttccctgttcttcaggacaatttagaagtttatttgggattacaacagtttatagtcacttcagggtcaggacacaggttgaacatcacggcggagaacgactgccggcggctgcactgctccctgagagacttgagctccctgctgcaggccgtgggccgcctggccgagtactttatcggggatgtgtttgctgcacggttcaatgatgccctcacagtcgtggaaaggttggtcaaagtcactctgtacggatctcagataaaattgtacaacattgaaactgctgtgccatcagtattgaaacctgacctcattgatgtgcatgctcagtccctggctgcgctgcaggcttactctcactggttagcacagtattgcagtgaagttcaccggcagaacacgcagcagttcgtgacactcatctctactaccatggatgcaatcacacctctaatcagcaccaaggtccaagacaagctgctgctatctgcgtgccacttactggtctcactggccaccaccgtgcggcccgtctttctgatcagcatccctgcagtgcagaaagtattcaacagaatcactgatgcctctgccctgcgacttgtcgataaggcccaggtgttggtgtgccgagccctctctaacatcttgctgcttccgtggccaaaccttccagagaatgagcagcagtggcccgtgcgctccatcaaccacgccagcctcatctctgcactctcccgggactatcgcaacctgaagcccagtgctgttgccccacagagaaagatgccactggatgacaccaaactgattatccaccagacactcagcgtcttagaagatattgtggagaatatctcgggggagtccaccaagtctcgacagatttgctaccagtcgctgcaggaatctgttcaggtctccctggccctctttccagcttttatccatcagtcagatgtgactgatgagatgctgagcttcttcctcactctgtttcgaggccttagagtacagatgggtgtgcctttcactgagcaaatcatacagactttcctcaacatgtttaccagagagcagttagccgagagcatcctccacgagggcagcacaggctgccgggtggtggagaagtttctgaagatcctgcaggtggtggtccaggagccaggccaggtgttcaagcccttcctccccagcatcatcgccctgtgcatggagcaagtgtatcccatcattgccgagcgtccctcccctgatgtgaaggccgagctgtttgagctccttttccggacgctccatcacaactggaggtacttcttcaagtccaccgtgctggccagtgtccagagggggatcgctgaggagcagatggagaatgagccccagttcagtgccatcatgcaggctttcggacagtcctttctccagcccgacatccacctttttaaacaaaatctcttctacttggagactctcaacaccaagcagaagctgtaccacaagaagatcttccggactgccatgctgttccagtttgtgaacgtgctgctccaggtcctggtccacaagtcccatgatcttctgcaggaggagattggcatcgccatctacaacatggcctcagtcgactttgatggcttctttgccgccttcctcccagagttcctgaccagctgtgatggtgtggatgccaaccagaaaagtgtgctggggcggaatttcaagatggatcgggacctgccctcattcacccagaatgtgcacaggctggtcaacgacctgcgctactacagactctgcaacgacagcctgccccctggcactgtgaagctctaggcctgctactgcctggggacacggacttctgctgctgccacctgcgccagccctaccttccaccacagatgtctcccagatgggccttggtcacactccttggcttctcccaccgcaagcaacgctgcctgcctctgccgctcctccacatcttgccgctgcccagcagagctggcttctgggtccacctgagcactggacggtgctcccagggcgttggagcaggcggaggggtgtgtggccaggtactaggaggcaccaggaaatcccgcggggtggcccatgcagaccaggcgcacgtggctcatggggcagaattgccaaggacagctcacgacagtgccaccttctcaccattccagccaaggagagatgtgacgttggaactgctctggcacttctgtcaagcctcccccgccccaattgccttgagatctctgctctttgtcagagatttgcaaagactcacgtttttgttgttttctcatcattccattgtgatactaagaaactaagaagcttaatgaaaagaaataaaatgcctatgttgttgttctagaaaaaaaaaaaaagtcgagcggccaagaatttagtagtagtag

SEQ ID NO: 280 - DNA, 894 bp, Homo sapiens
  SITE (824): n equals a,t,g, or c
  SITE (831): n equals a,t,g, or c
  SITE (852): n equals a,t,g, or c
  SITE (876): n equals a,t,g, or c
  SITE (890): n equals a,t,g, or c
  SITE (891): n equals a,t,g, or c
gtgcagagtgatggacagcaggtggcatcttacattgtgatttgtggtgcacagttaaaacacttcccttcgtttcagaaggagacaatgtgaatacttggaaattatagtgaataagatgcctcccaaacttgaggaaaaggtcagattctaagagctaaacgttaagatgtaatgttccagaacaaagaggcccagagtcactgaacggggccccagggctcctagcttgagtgtaatctgagtcagcttatgaaaaggccccaaagaagaaagtggaatgtgtgctgggcacatgggacagccatggcactgagactttggaagtggccttgccagcgctgtcctgtctttctggcccacagatgagggctcctgattgtggaaggccacggaagggacctgaacacgatggcacgagacaagttatctcctgtgactgctcctctccagcaaccctcagctcaggctagactttccccctgtgttgagaatgccctgccctgtgtggaagcctgatgcatttagtgacagtgtgttagctttgttagtttctagtctggccagcaggctttccatgtgatctgccattggcttgcttcagtggccagtggagccaggggtgtccaccagagtcttggacacagacttctgaggtggcagcgggagggagcctgctccctgccacacacgtacaatttctaatccatacaggcctatgtagtatatacacacatacgcagagccttaggaattgtgaaaggccaatcaaaacttggggccctaatttcactctgccaaaaaaaaaaaaaaaawaactcganttttttnttttcggtaccccaatttcgncctatagtgatttgtattacaatnctttttttcgtcgnnttt

SEQ ID NO: 281 - DNA, 1778 bp, Homo sapiens
ccggtccggaattcccgggtcgacccacgcgtccgggatccaattgtagttgtgaactgcttgaggtctctagaggaaattctgaaacaggaaggaggcgttgtcatcaataagcccattgctcaccatctcttaaatcgaatgtcaaaactggaccaatggggccaggctgaagtattgaactttctgctacgctaccaaccccgcagtgaggaagaactatttgacattctcaatctgttggatagtttcctcaagagcagtagcccaggtgtggtgatgggagctaccaaactttttctgatcttggcaaaaatgtttccccacgtacaaactgatgtccttgtgcgggtcaagggacctttgctagctgcctgttcttcagagagccgtgagctctgttttgttgctctttgtcatgtacgccagatcttgcatagtttaccaggtcactttagcagccactacaaaaagtttttttgctcctactcggagccccactacatcaaactacagaaagtggaggtgctgtgtgaactggtgaacgatgagaatgtgcagcaggtgctagaggagcttcgagggtactgcacggatgtgtctgcggactttgcacaggctgccatctttgccataggtggcattgccaggacttacacagatcaatgtgktcaagattttaacagagttgctgggtcttcgacaagagcacattaccacagtggtggtgcagactttccgagacctggtttggktgtgtcctcagtgtactgaagctgtatgtcaggccctgcccggctgtgaagagaacattcaagatagtgaggggaagcaagcacttatttggctacttggtgtccatggggaaagaattcctaatgctccttatgtgttagaggactttgttgagaatgtgaagtcggaaacatttccagctgttaagatggagctgctcactgcttygctgcgccttttcctctcccgacctgctgagtgccaggacatgctaggacgtttgttgtattactgcatagaggaagaaaaagatatggctgtacgggaccgaggtctcttctattatcgcctcctcttagttggcattgatgaagttaagcggattctgtgtagccctaaatctgaccctactcttggacttttggaggatccggcagaaagacctgtgaatagctgggcctcagacttcaacacactggtgccagtgtatggcaaagcccactgggcaactatctctaaatgccagggggcagagcgttgtgacccagagcttcctaaaacttcatcctttgccgcatcaggacccttgattcctgaagagaacaaggagagggtacaagaactccctgattctggagccctcatgctagtccccaatcgccagcttactgctgattattttgagaaaacttggcttagccttaaagttgctcatcagcaagtgttgccttggcggggagaattccatcctgacaccctccagatggctcttcaagtagtgaacatccagaccatcgcaatgagtagggctgggtctcggccatggaaagcatacctcagtgctcaggatgatactggctgtctgttcttaacagaactgctattggagcctggaaactcagaaatgcagatctctgtgaaacaaaatgaagcaagaacggagacgctgaatagttttatttctgtattagaaactgtgattggaacaattgaagaaataaaatcataacagagwmaaaaaaaaaaaaaaaaagggcggccgc

SEQ ID NO: 282 - DNA, 2498 bp, Homo sapiens
ccacgcgtccggtgtgctgcaaggagctaaggccttcagtgtccccttccttacccaggtttctcacagaatggattcccagcgggaacttgcagaggaactgcggctttaccaatccacccttcttcaggatggtctaaaagatctcctggatgagaaaaaattcatcgattgcaccctaaaagcaggtgacaaaagtcttccttgccacagattgattttgtcagcttgtagtccttacttccgtgagtactttttatctgaaattgatgaggcgaaaaaaaaggaggtagtgctagacaatgtggatcctgctatacttgatttaatcatcaaatacctgtactctgccagtattgatctcaatgacggaaatgtgcaagatatttttgcattggccagccgctttcagatcccctcagtgtttactgtctgcgtttcttatcttcagaaaagacttgctcctggtaactgctcctggtaactgtctagccatcctaagattaggacttcttcttgactgcccgagactcgccatttctgcccgtgaatttgtgtctgatcgctttgtacagatttgtaaggaagaggactttatgcaactgtctccacaggaactgatctcagtcatttcaaatgacagcctaaatgtagaaaaagaagaagcagtatttgaggcagtgatgaaatgggtgcgaacagacaaggaaaacagggttaaaaaccttagtgaagtgtttgattgtatccgttttcgccttatgacagaaaaatattttaaggatcatgttgagaaagatgatataattaaaagcaacccagacctccagaaaaaaaatcaaagttctaaaagatgctttcgcaggcaaactcccaagaaccctagcaaaaatgccgcgaaagactggggctggtgaggtgaatggtgatgttggtgatgaagatttacttcctggttacctgaatgacattcccaggcatggaatgtttgtaaaagacctcatcctcttggttaatgacacagcagcagtggcttatgaccccacggaaaatgaatgctaccttactgcactggctgagcagattcccagaaatcattccagcattgttacccagcaaaatcagatatatgtggtaggaggactatatgtggatgaagaaaataaggatcaacctctacagtcatacttcttccagctcgatagcatagcatctgaatgggttggacttccacctctgccttcagccaggtgtctattcggtctgggagaggtggatgataaaatctatgtagttgcaggcaaagaccttcaaacagaggcttcgctggattcagtattatgctatgatcctgtggctgcaaaatggaacgaagtaaaaaaactccctatcaaagtctatggccataatgtgatttcacataaagggatgatatattgtctaggaggaaagacagatgacaaaaaatgtacaaacagggtgtttatcttcaaccccaaaaaaggagattggaaagatctggctccaatgaaaattcctcgttccatgtttggagtagcagtccataaaggcaaaattgtgattgcaggaggtgtcactgaagatggtctttcagcttcagttgaagcttttgaccttacaacaaataaatgggatgtaatgaccgaatttccccaagaaagaagctccatcagtttggtcagcctggctggatctctgtatgcaattggtggttttgctatgattcaactggagtctaaagaatttgcacccactgaagtcaatgacatatggaagtatgaagatgataaaaaagaatgggctgggatgttgaaggaaatacgttatgcttcaggagctagttgcctagcaacacgtttaaatctcttcaaactgtctaaactgtgaacaaggtgacaaaacataatagattgggaggtggtttgtttggtgaatggggctttaatttattctgttttttaaaagcttgtacagacactcatgtagaaattattcaagaagttattgtctaagagatgagcagtaggtaagaaaacctcagtcattgactcttcaatgtaatgatcagagtttaaaaccattttctaataataaattaaatcttcagttgaacaaattattttgtgaatctgtttcactcaatggattgtaaagaaggctcctaaatttgagttgtttgctaatcatttcatttgcatcattagggtatccttaaactgattttctattacaattggaagtggagaatatgtgcatctacactaaaaaaatgtttaagatatcaaaaacctctcctcgtgcttcaaaatgacaggaatcctgtgcattatactaagaattacatgccataagatgacttcagaaatcctacttcagaagtgtaataaatggatggggaaatcgtttgatggggaaaagtctcttgtaagtaaaagtagtcaaattcaaatggcaaaaaaaaaaaaaaaaaaaaaagg

SEQ ID NO: 283 - DNA, 195 bp, Homo sapiens
ggcacgagctcatgagtgttgatgctcagtacattttaaaagagctagtgcaagcttgcatttaacgtctatcatgatgttcctcttgatatttgtgtggtacctccagccttatccttaacattcctttacacagccctcatggaataaacagcacaaaacagcaacgacaacagcaaaaaaaaaaaaaaaaaa

SEQ ID NO: 284 - DNA, 1262 bp, Homo sapiens
  SITE (1041): n equals a,t,g, or c
ggaaaaaaacagaaattgaagatctgccaactgccatgcctagcataataaaaatgggcttccttccccccacatcccccatagggtctcgctctgtcacccgggctggagggcagtgatgcagctgtggcttaaaagtgggcttctcttgtccttcatcctcattcttccttgagcttgctcagggcttcctgctccacgtggggcctcacaacacgctgtgtgtggtgcccagtgagtactgtgcactcagaacaaccatgtagtgtctagcaactcagagttgtgtgctgtttttgatcctttactaaggatcattttattaaaatgatcatctttgagtttacaaagtatttaaatatagtgaatgtacaaagttggtaccaagttacctttatttcagaaagaagcatagactttctttaatatggaaaaatctgcctctttaaaatatttggtgctagggcaaacaccattgtcatcagtggaataaaggaggaggcccacgtatgtctcgggtcaggcagtgccccaggaggacgctccgcccccaggaggacgctccgcccccaggaggactctccccactgggctgataccaggcttcgtgagggtcggagccttgtgcyrttgtccagtgtccccagcaccgagcgagtttgagtccatcagtcagtggatgccattttgaaggtgcagtctggtttcatggttagctgccataacatatgccaagtatcctgctcacatttacgtctctgaacaaatacgcatcagtctggtttcatggttagctgccgtaacatatgccaagtatcctgctcagatttatgtctctgaacaaatatgcattctgctttgttgtgagttccagacaagcactttaaccaaattggcaggcagtagagatagggaaggagtaattgaaaagtattagaaaataaaatgatccaggccaggtgcggtggctcawgcctgttaattccagcagtttgaaaggcccaggtgggtggatcccttgaggttaggatttcaagaccnccttggccaacatggtgaaaccccatctctactaaaaatacaaaaattaattcgcgtagtggcacacacctgtaatcccagctactcggaaggctgaggcaggagaatcacctgaacccagatagcggccgttgcagtgagtcatcattgcaccactgtactccagcctcggcaacagagcgagactccatctcaaaaaaaaaaaaaaaaaaaaactcgag

SEQ ID NO: 285 - DNA, 1371 bp, Homo sapiens
  SITE (1155): n equals a,t,g, or c
gaattccagtgctaagtccactgctaataacagaaacagttaaagctgattgtgtgcttctacgtgccaggtccttactaggcatgtcaccttcactcactctaacttcacaacgtctctataagatagccagttattttgtgcacatttagcaacaagaacactgaggttctgggagattacgcaatttactctcatgataaaacttatatgtggcatagctaggatttgaacccaggtctctctgacattagcacttgtttggggttttgtttgtaccatgctgcttctcttggtttccttctgctaacttaagaatgcaaggaacctataatccaaaaccatactctaaacattaaatctcataacttgtaacttatgtcaccgatttggtgagcaaacagaattaagtagtccagggccaacagcagaatcttcagggacagaaaccagataactccaattaggtgggctaaacggataaattccacatcaaaggaacctttactaggaaaatatccggtgaccttcagcctctgataagacttcatctcatcatttctcctgtcccaacacccctacacttcaactagcttcaaatattctgtatccacaccaaagactgattcaacactttgcaatcacaaacccaaaggcaagttctctgggattgcatcagtatgaagattttattttgcaaagttacttccctgaccagcctccctgctgcagacctcttcaaatttcccagattaagaagacattcgaagtgacaattccaggccttatcatgttcaacaaactggtcacaatgtgtcagatgaagggcaagatcaattctctgggcctcttgcttctacatctcttatagaaagttaccatcatcaaaatctttcgcatcactcaaatcatcaacaatagttagaagaacaatarcacacacaaaaaaattagtagcaaagataagccagtacaagtaagtgtgacacagtccaaaccaacctgggcacattctcacaatcccttggaaatgactttacctgaaggctacgtgactcatttaactcggcactaagatggaaaggtctagggctctacagaagttcctagtaggaaaacttcattcttttccaagccaggtctccagggcctggntctgacatggttaccacttccacggagaagctgacaacagctggtcacattcttttctctaccctattcctccccatcaggtgaagatagctaactgccatgtatcttatctaaggaggctaacttgcagcaatgatgtggcatgacaagtgaaaagtaatggggatcttgaacagggaattcgatatcaagcttatcgataccgtcgacctcgag

SEQ ID NO: 286 - DNA, 2345 bp, Homo sapiens
aattcccttgaaggagcaggggaaaacaaacaatgccttatcagaggaaaatcatgagatgactccagatcatcagaaccctctgatgctggggaaagtagcccttttaaagaagtgggactttctgttccatcagtagacagcaaatggctcctaattgttttcagaaaacatgagtggcatgacagacaatgagcaggagcattgtagctgcatttgtctaatcctccctctgctaatcctttggtgactcacacagacagggtgaaaggggacccaggccagtcctcagcagagatttactggctgagccagcagcaggtctctgattaaccaagccttcatcagtcgagggaacagactccaagacacatccctgtgtgcgatgagccactatcataaataattaaagccacatgcatcttggcatataaataagtggagagtatttatggtgtggcagataaggccagggtcactcctttagggggatggcaagaaccaggaaggttaagagaataaaaatgctcacattgtgaatcccccagggggtctcctcattctgattcccttctttgtcccatttaaaaatgtgtaatgtggggtggaattgcatgaacataatgctacctgacttcaccccttatttccccatccccccagtgatggattaagcacaaatgtgcttttctttctgtacttatgtatttattataaacagtgggatctttctgatggaaatgattaggatgctggtcctctccttgcttctcactttctatctgctttcaatctggtccatagcatttttcctagcatgtcaggctgcaaggatatttagagatcacctggtacaatcccttatcagatgcttgcatccccacacctatgttcccagcaagggctctgcatttgacattgtctttattctgcatttatttagcctttccagggattccgaaagagcggaataaagatgctcctagtttgcaatgtatacagaacccaaagccggaattccgacaaagtcttgctctatcgcccaggctggagcgcagtggcacaatctcgggtcactgcaacctctgcctcctgggctcaagcgattctcctttctcagcctcccaagtagctgggattacaggtgtgtgccaccacacccagctaattttttgtatttttagtagaggtggggttttgccattttggccaggacactggtgtgtcttatgtccttgaaacaaatccagatggcgttgaagctccctctcatcaccaaatgcttggggacaatgctcacatttatatggcaaattgttaccatgtttagacttaatgtgagttttcagatttgattgatctgcacacctgaaaatacaatactgacactgatatggcttctcaccagtatgggatctcatatgtttcttgagttcagaaggatgtcgaaaacccttcccacactcaacacaaacatgaggaaaattcttgctgtgaacggccaacaaatgcctgtttaacagtccttgttctgcagtttcatagtcacagtatttgcacttgtgcatcttcggctccttgtctcttaaaataagtttattggaactcagtggactagcctctctgtatcttcgtgtgtattctgtaaattcatgggttttgtcgactttgtttatgagcttatggctttctaagtggttatggaaactcactttcttgttagttgtaaagtcacaatctgtacactgatatttttttctcattaaatgatcaggatgattcttcatgtgtctttttaagaatcccctggatttaaacttttttgtgcaaatatggcaagggtacactgtgaggggctgtccatcaggacctattataacagctgtttgccactgcctggtttctccccttctcctctttttggctttttgtttaagtactttatttgtattaatgccgtcacaaatttgaaggtactgtgctgctgtactacttctgctttctaatgctgagtccaaagtatttcctgatgcttgacaatcttcataccttcgggaaactcttctttcatctccatatgccgcagcctctgtgaacataggatataataattgttgatatacagggacattttgtttctccttgctctaagataaacttcagtctccttcacccaaccgtctcttgcgtccttcacccagctagcatctatgcatatgcaagatgcaaagcctctctcagttactcccaggcctccacagcgccccatgattgacactacactgtcatagtgaagaacattctttggaattcgatatcaagcttatcgataccgtcgacctcga

SEQ ID NO: 287 - DNA, 1015 bp, Homo sapiens
cgcagaagaaaaagagcataaaatttacttaaatagatgtctattcagttacagttatgagaggactccattaagttacacattttttgaaaaaacctaactcttaaatgagccaagcatacatcactaagtattctatttaagaggattcaacgtttagagaatcaagaagtaccagtggctgcattctcacaatttcctgcaagaatgagtctctcacttatctactttagtgtctcatttaccacttttggtgtgaaaagttcccatgatttatacatacctagactcttactgctaaagattctttacatactttgatgataatgattataatgataacccatacatagtgtttaatgcatgccagacactgctctaaggtttttgcatttaacgctcacagggatgcaattgtcctcagttttcatttacagatgaggaaactgactcatagagagttaagtaatttttttcaagggcatgtagcttacaaatgatagaacaaagattggaccctggacaatctggttccagggtcctgtcttaaacattaccttttcctgcttcttacagaaattattaaatgtttactgtttacaaggctaatatttatgaagtcattagaaatgatgttggaaaactgctttgaatcacataagtagctattaacaaatgaggttctagtagaatttgacaataatgacatggtaggtgccatttggctaataaaggaaataaaatgaagccctgaaatagattttttaaattactttcattatggttttgctatgcacatcttgtgttaagtaaagaatgttgcatggtgctattgggcaggggtttttttgtgctttttaaaactttatttcaacataactatgcttacagaaatacagtcatattggttaatagaatgcaacttaggtttaacttataatacacaatttggaccaaaaagttggtacatggtttaagattggaattcgatatcaagcttatcgataccgtcgac

SEQ ID NO: 288 - DNA, 1708 bp, Homo sapiens
ggcacgagcagaagtgaccatctcaagcatccggcctatttcagaaagagccacaaaccggagggaagtggagarccggagctcaggcctcgagtctagtgaggcgcgtcagaaattcgcaggagccaaagccatctcatctgacatgttctttgggcgggaggtggatgcggagtatgaggccaggtctcggctgcagcagctctcaggcagcagtgccatcagctcttcagacctctttggggacatggatggagctcacggagcaggaagtgtatctctggggaacgtgctgcctacagcggacattgcccagtttaagcagggtgtcaagtctgtggctgggaaaatggctgtgctggccaatggtgtgatgaattccttgcaggatcgctacggttcctactgatccgagctctgtgactcaggcttacgatggtgacggcaacaagaactccacagttcccaggctggggatgctttgccttgtggaagctggggaggatttgttacttcgtatgtgtggtgtgtgtgtggggtggcctttgaggcgctcactcctgtgaggggaatggtcagtaccagcccttgtcctctgcctgtggactgagccctttattccctctcacaccaccctccgtgtgttagactcttgtccttctgtcctgcccccacagctgctgctcacttatcctgccatactgggaaagggggttcccccacgatggcttattctgggtccagactttccccaggtagggaaagcggaaggtagaaggctttttttgctggctctagggttcttctagttcgaggccttgggtccccatcctctggaaccagggggaggcctggaaggagttcactgtagacccgtcccatggggaaagaggctgcggacttgctgctgctgctgctgccagtggcctcttctgggtgccaggagaggggaaggacctttgtctgggcgttaccaagggctggaaactttacctggtacctaaaggtttcatttggtatcagaccggagacccttgggttctcccgtctcaccacccctttctacagtaagcacttggaagattgtttcagggtgtctcagggtccctctgtaccatctgctgtggaatgcaggaccctctgtgacattctttatcccttcttccccgggttggtggccatggagggtcttgtctgctgtgattcgactctggatgctgtgagcttgatgctggccagggaagcagaggatgtgagaggcagaggcaggctcctggggctgagctccttcctctgcatcattctgggcttggcctggacagcacccgccagtgagagctgtgggcctcaccctctggcagctgagccaagcactgtcattcttggtgccatcttcccctgccgcaccggcagtctcagcccagcccccacctttgggttgtaggttgggctcccaagcaacacagaccactcttccccttgcccctcccccagagggacttgactttctttctggactgtttgtattgaaacaaagtggtgtcaaaataaagcccctgcagggcctggctccctgttggtctgagtgaaaaaaaaaaaaaaaaaaaaaaaaaaaaaaaaaaaaaaaaaaaaaaaaaaaaaaaaaaaaaaaaaaaaaaaaaaaaaaaaaaaaaaaaaaaaaaaaaaaaaaaaaaaaaaaaaagaaaaa

SEQ ID NO: 289 - DNA, 540 bp, Homo sapiens
attcggcacgaggtttcagggtgtctcagggtccctctgtaccatctgctgtggaatgcaggaccctctgtgacattctttatcccttcttccccgggttggtggccatggagggtcttgtctgctgtgattcgactctggatgctgtgagcttgatgctggccagggaagcagaggatgtgagaggcagaggcaggctcctggggctgagctccttcctctgcatcattctgggcttggcctggacagcacccgccagtgagagctgtgggcctcaccctctggcagctgagccaagcactgtcattcttggtgccatcttcccctgccgcaccggcagtctcagcccagcccccacctttgggttgtaggttgggctcccaagcaacacagaccactcttccccttgcccctcccccagagggacttgactttctttctggactgtttgtattgaaacaaagtggtgtcaaaataaagcccctgcagggcctggctccctgttaaaaaaaaaaaaaaaaaaaaaaactcgaggggggg

SEQ ID NO: 290 - DNA, 1494 bp, Homo sapiens
  SITE (1434): n equals a,t,g, or c
  SITE (1439): n equals a,t,g, or c
  SITE (1479): n equals a,t,g, or c
  SITE (1490): n equals a,t,g, or c
  SITE (1491): n equals a,t,g, or c
gacaggactgacaacaattttcctctcaccaagtgacctcagttctctgccaccactggccttggtggtggtgggccttggggtggaggcagaagggcacgtgggtcgtgttgacagttttgtattacctgtgtttttttctttaatagctatcatggcttgcttaggctgtatgcctgtttctgaggaatttatgaagcagttgtcctttggacaaatctataactttcttttcctagccaattatactcaaagaactaggggattatagagargttaggcatattttgttgggtgtcaggagatgctgaacagagggcttgtatatctgtacattgctctttctccactgtgaggtccatcctgccttaatttgggttcctgcagcctcagggcattctagggctctcttagatcctgctggactgagtcccctctagaaaagaagcaggaacaggctaaccaacagcagactgttagaagttggtggagggcactgacaggagtaccagccagctgttcagctaggatcctgggtccccagagctgacagcctcataggaacagacttacagtaactcagtgtgagctggatgcatacttaggtgccagtgcattcctttagtgggtgctgccctcccttcctgagttgggggcctgagtgagcacctctgtacagggcacccctctacagagggaggtagctggtatgtttgtcagtggagacttgcttctccacctgccacgaggcgggcatccatccggcagtagactcctagctcagggtgctcctgtgatggctgccttgcaacagagagaggatagcccaggaatggcagctccctcctttctcaccagtttccttcttccgtcctccctaccccaggtgctcagcagggagaccccctttcccgctatatcttcaggaaggctggggagatgctgggcagacacatcgtagcagtgttgcccgagattgacccggtcttgttccagggcaagattggactccccatcctgtgcgtgggctctgtgtggaagagctgggagctgctgaaggaaggttttcttytggcgctgacccagggcagagagatccaggctcagaacttcttctccagcttcaccctgatgaagctgaggcactcctccgctctgggtggggccagcctaggggccaggcacatcgggcacctcctccccatggactatagcgccaatgccattgccttctattcctacaccttttcctagggggctggtcccggctccaccccctccaagctcagtggacactgggtctgaaaggaaggagtcttttgcttcctttctcctttttacaaaaacaaacatagaagaaaataaatgcactttatccactccccaaaaaaaaaaaaaaaaaaactcgagggggggcccggtaacccaattcgncctanaagtgagtccgtattaaaaattcattggccggtcgttttnaaaaagtcggnnact

SEQ ID NO: 291 - DNA, 1504 bp, Homo sapiens
  SITE (1462): n equals a,t,g, or c
  SITE (1480): n equals a,t,g, or c
  SITE (1486): n equals a,t,g, or c
  SITE (1493): n equals a,t,g, or c
  SITE (1494): n equals a,t,g, or c
aacataagctggagctcgcgcgcctgcaggtcgacactagtggatccaaagaattcggcacgagactagttctctctctctctctctctcttgtaaattgcccagcctcagtcaggtatgtctttatcagcagtgtgaaaacagactaatacatatttgttccttttttttctcattatttatggttgcagtttggtggttttctttagtgatgttgtttgaatcctttcttctttgtgtgtctgctctaccagtgagttttatattttcatacattttcatgatggtagatattgttcttttgcttcccaatgtargactcccttaagcatttcttgtaggaccacaacaaacaagacccaaacaaacagtcttttgcttatctgggaaatacttttttcccttttatttatttatttatttttttagcaatggagtctcactctttcacccaggctggagtacactggtgtgatcatagctcagtgcagccttgaactcctgggtcaaatgatcctcctgcctcagccttctgagtctctggaattacagatgtgagccactgttccaggctccttcatttgtgaaggatagctttgctgggtatagtatttttggctttttttttttttttttttttaacttgtagtatacatctccttttctcctagcctgtaaggtttctgctgagaaatcctgtcagcctgatggagattctcttataaatgacttgatgttttccccttgctgttttcagcattttctctttgtctttcgacaattttaccataatgtgccttgragaagacctttttgagttgtatttatttggtaatctttgagcttcctgtrtttggaagctttcaggaagttttcagttattattttattaaataggttttctatgcctttacccatctcatctccatccagaactcccagaatttcagtttttggtcacatatgtgtcccatatgtcatgtagccttgcttcattcttttttctttctttttgtctgactgrattattttaaaagactattcttcaggttcagaaattctttgttttgcttgatctattctattgttaaagctgtcaattatcttttgcatttctttcaatcatttattccttccagggtttgtgtttggttctttgttatgctgcctatctctgttgaatttctcattcagattatgtattgttttcctgatttttttgtattcattatgtgtgttctcttgtatctccctgagtttctttaataacattattctgaatttttttcaggcatttcatagattttcttttcattggaatctgttgctggagaattattgtgcttctttggagatgttatgcttcctttttcayatttcttycatccttatgtgcggcacraragtacwwmtagagcggccgcgggcccatcgattttccacccgggtggggtacgaaatnagtgtggaagtattcccnttaaanccccccnnaagtcccggt

SEQ ID NO: 292 - DNA, 1759 bp, Homo sapiens
  SITE (699): n equals a,t,g, or c
  SITE (741): n equals a,t,g, or c
  SITE (777): n equals a,t,g, or c
  SITE (1643): n equals a,t,g, or c
  SITE (1673): n equals a,t,g, or c
  SITE (1677): n equals a,t,g, or c
  SITE (1726): n equals a,t,g, or c
  SITE (1751): n equals a,t,g, or c
  SITE (1755): n equals a,t,g, or c
gcgggtccgcatcatcgagccgctgctggtcttcctcctcgcctacgcagcctacctcactgctgaaatggcctcgctctccgccattcttgcggtgaccatgtgtggcctgggctgtaagaagtacgtggaggccaacatctcccataagtcacgcacaactgtcaaatatacaatgaagactctagccagctgtgctgagaccgtgatcttcatgctgcttggcatctcagccgtgggactcttctaagtggggcctgggattctgggctggtgctgggcaacctcatcttcatcctgttcttccgagccctcggtattgctggcaccctctgctttcccactctccttcctgtcccgcccctccctgcagctcatctccctatstgaagtccacatctttgtcaattcctaaagcctcctcttgttgctcacctgtcccagccctgtwagacctcagcccagatamttggtcccatcsggtcccamgtcctycactcccaacgctttgctcccactggcctccctcccgctgtaggcgtagtcctgcagacctgggtgctgaatcagttccggctagtccctctggacaagattgaccaagtggtgatgtcctatgggggcctgcggggggctgtggcctttgctctcgtcatcctactggataggaccaaggtccctgccaaggactactttgtngccaccactattgtagtggtcttcttcacagtcatcgtgcanggcttgaccatcaagccactggtcaaatggctgaangtgaagaagaatgagcatcacaaacccaccctgaaccaggagctgcatgaacacacttttgaccattttctggctgcartggargacgttgtggggcrccatggctaccactactggarggacaggtgggarcartttgacaagaaatacctgagtcagctgctgatgcgacgatcagcctaccgcatccgggaccagatctgggatgtgtactacaggcttaacatccgggatgccatcagctttgtggaccaggtgggccagcagcttccaggtgggccagtggtgggtgggcagatggtcagcagagcaggacagaaaggggtggcaagcaggctggccctgagcagggagttgggaattcctagctggctccatggtctggtgaagtggcagcggcaggaagcagctgggtctggtgctgacattcagagtctggcaggcagtccagagaggtgggaaacagctggactctggggtcagctcaaccattatcacttccaagcttgtgaccttgggtaagcacactctctgagcctgtttccttagctgtaagaaagcaggcataagaggctgggcacggtggctcacgcctgtaatcccagcactgtgggagcctgaggtgggtagatcacttgaggtgaggagtttgagaccagcctggcaacatggtgaaaccctgctctactaaaaatacmaaaactagccaggcatggtggtgcatgcctgtaatcccaactactctggargctkargcaggagaatcgctaaaatctgggaagcgggctgggcacggtggctcacacctgtaatcccagcactttgkggggccaaggcgggtggatcatgaggtcaggagttcgagnccggcctggccaacatagtgaaaccccgtntaanactaaaaatacaaaaactagccaggcgtggtggtgggcacctgtagacnggggggtcttggtagaaaaaaaacngggnggaa

SEQ ID NO: 293 - DNA, 2406 bp, Homo sapiens
  SITE (35): n equals a,t,g, or c
aattcggcacgaggagaactagtctcgagtttttncttctaccttttttttgttaaagagttacatctctcacaggaggaaagaattcaagagtctatatgattagttacagagaatattttcatcccctctccctgaatagaaaagcaggggtcaccatttgtatccttacccttgaggtgtttttgaagatgctgtaactcttgaagttgagctgaggcagaaaggttggaaaaatgcagccctctgggwattgtggggagggatgtgatgtagtaagagggtgttttgtggtgctaggattcccacgccaccaacttgcagctttataasagcgctaccaagaaccaccrctggggaaaaggttcttattcattgtttctgttggaatgtgatcttgctttctggattttaggaattcaggttactcagtataaaactctgagaaatcagtgtgacttagtccttcacctcctaagataaagtgaatatttctttacaaaataattcatgtccttaatgttaaagatgtaattttattttcaaaacatctataacatgactttcagaagcagttcatttttccaagattcctcacattatactagataaataataggccctcagttaatacccttcagttattgaattaatctagtttgtggaatgaggtgtatcctgccaacttccctctgctcccaagtacactctgagaggtaaaatgctctgggaaatggaacaagaatcgagtggatgctgactctgtgtgcccacctcctcaactgattgataatggttgaccttgggcaagtcacttctttcaatgcctcagttccccatctgtcaaatggggttaataatactgacctacctcacaggggtgttgttgtgaggcattgtaaatcaaagttaatagaatacttcagggtcctctgtggaggatgtcttgagccagagtttaagcctgacacacaggctttggtcctcactgagctgtctccaagactggaactacttagtgactcggcaaattttctgccccccacccctcatcaaagctgctagttcagatgttgacagtgttttcatgaatgttggaatcttactagtccagacttacttaggatgttgttggggaaggcacttgggattttctgtgtcttgcattcacagagggaggccatttcagattcaagagcattggattagggaatcgtgaggcagggatgctactgcgtatttctctctgcaggttggggattaaagttcctttccccatgggtttgaagcagactcagactgtctcaggatcaaagcaaccctcaatggttttgatttatgtcattgcttaccactccccaaccaatcccaggacagctgggtcactgtacccctttgtggtatctgtacctgggcctctccttcctcatagggaccagctgattgaataaatgtgaccaccttatttccaccccccacccccaaaagctacattggaattatttttcctagaaatgtgtataacactcagaattgggcattgatccttaaagcttcatcccattcaccgtattcaacatctgtcatctcttagtgtctgcagtctgaacctaaccttgaccttttttccctctggtttgagaaaactttggacactatttctacttggccaggtgtgggctcaagagccttactctttccatctcagtttaggggcgcagcagctcctcttcccaatagggctctttctgctttccctctccttggccctagatttgtaatccatgaaaaagcacaaggtcctggctccttgcggtcacattctggttctctgtgttttgtggactctgctctcactgttcacccagcactagcagtaccagatggttctgtggagtcctggggaatggagagagcacagtctgactccctgccaagtagccaggagttgacttgcccatggtccgctggctttcccaccacttcctacaggatgggatctaagagactcaagagctgggtttctttcagcactctgtactgtcccaaatagcaaacaaatcactttgtagccagatttctgaatggaaatgagaaattgaattctccatggacttttaggtttatgggggagttttagctgtgtttcttggttttatttcagccaaacatgtctgcttttgattttttttttaaagtataagtggtctatatatatgttcaccttttaaatgtaaatgtttaaaaagtaagcatttatgtgtttccataactgacatctgatgcagacctcattctctccccctcttctaccctcctcttttcccccttttcatactcttgtattggttctaataaatggttgcttttcaaaaaaaaaaaaaaaaaaaaaaaaaaaaaaaaaat

SEQ ID NO: 294 - DNA, 1377 bp, Homo sapiens
gcacgagttgactcggaaatcttcatcccaccctccaaaaggttactattggcattctttttaagcttctttgttcatatgatagttcgggagaggaacagagattcagatagagagacagcggaagacacagaaagagacaaagagagaaatgccttctcctctcttgagttccgtgaatacaaacactttccctactcctctttgcagtcgtagacccgttgcagggagattctcagtgccagttgtctggattttgtgaaggtgctcagggtatatagtgcagtggttcagaattgggggtgattttgccccccctccccagagacatttagtgaggtctggagaaattttgggggctgctacagacatctagtgggtagaggtcaggggtgctattaaacatgctgcaatgcatgggacacccccaaacaaagaactacctggcccaaaatgtaaatggtgctgaaatggaggacccctgatctagttggaatggagacagagcattactggaacatagtgagttgccaggtttaactcatcttcacataagtaccattgagcaccaactgtatacagaacatagtgccatgcatttcacagaacgcctggtttaaggagcttcagtctataatgggaagaggaaatgggaaagcagtgcttatccaggagacactgttggacaccatccatatgtgttctgaaccaacatcacaacagccatattatgagacaggcatgattcatacccattttaaagataacctgaagcccaaatcactcaactataaggtggtagaggaaagatttaaacctggagctaagtgattccaccacccatgttctcatgatgctcttgattaggcagatgaacaaatatacaaataattatgatacaggacatagtaagagcagtgctacaagagagatgcaaatagagcttagagcttagggtgggattaacagactacatagaagaggtggcttttgacatgcattttgggtgagctgtaggatgaggggaagaagtttcagacatggagatgcatgaatgtatatacacagagaggccacgcgtggtggttcacacctgtaaccccagcactttggaaggttgtggagggcagatgacttgagcccaggagttttgagaccagactgggcaacatggcgaaactcatctctacaaaaaatataaaaattagccaggtgttgtggcagtgcctgtagtcccagctacccagtaggctgaggtgggaagatcacttgagcccaggaggtcaagctgcagtgaactgtgatggcatcattgtactccagcctgggtgacagagcaagtgaagaccctgtctcaaaaaaaaaaaaaaaaaaaaa

SEQ ID NO: 295 - DNA, 2043 bp, Homo sapiens
ggcacgagtagtacagacgtgtaaatccttccaccccgacccgcacacacacccacactgctgccctggcgggggccatgggggtgatgaatgaccctccaacagccccacatgggttgtttctgtttctttggcttttctcgctccgcagtggagggtttactaggatttaagcttttgagtgcattgagaaccaagacagggcctggctccaactctgtgggccagaggtgggggactgctaggtcgagtctgcagcttcgccagtttcttggttgggacactcctctggcagccccagcaccaccacaaccccttgcagtgtgccccagtcccctggattcgctggactgcaaaaaggagcaccagggaaagctcagcaaaggctcaggaggcctcccgggtcctcgggagatgaagcatccgtgcctaggaaaaggggacagagggcaaggagagaagtgagagctacaattccagcattggagaagcgaggggcggggcgtcaaaggcactgcttcaggacgcgcttgctgaaacgactccaacagctagttcacagcccagcttgtacgttggttaccatagctactgctgtcactgtagctgctcccgtagggtcgttgattcctgaacgtatcacatctcacctgcccccttcctcgtgggacgtgtcaagttgactttaaagcctaaggtggcttgtggggactgcaccagaaagtgtctaaccttgtgttccccgaaatcctttctctgacttaggaaccagcgccccctgctggagaagttttttcattttgttagccgacttctggtagcttagcaaagagaccagctgactgtctctcggcccagcccaccacgccgagtagcttgtgtggatgcagtcctgtgagggtgtgcataaccgttcccaggtgtacgcacgcgcgcgcgcgcgcacagacacacacacacacacacacacacacacacacagtaaccacgggtaggcaccaggggctttgtacattcaggagctgcagagaggaaaggtctcccatgtaccagagaaggaaaagtctgatcccgaaacagcttgaacgaaaggtggttaacacgtgaccaatccccatggcagacagcgggctggtgaacaggaagagcacagaatctctgtggggcgatgctgcagcggctgaaaccacgtcaagtcccccagagcccggcattctatgtaagcatccacctgtgacgccgtggagcaggatcttcattcatctcaccagagcaacagcccagtcctgaggatgggagggacgtgacttagccttgggattccacgctcgccgccctcccttggccgccctactccccagtttcctggcgatgagccatttattgtgtctcacaccagcctcatttccaactccgacttcctacttagaatgtggcagtggctttgtgagtgagaatcctgatgagttttccagtggcctctgcagaagctggcccccttctaagggcatagctaacccccttcccactcctgagtcactgaattcgaggagggtggggcagggaaagggctggcccccctgctgaaatcttgattctgcatttgaggaaggtcagggtgccgctgggggagcagggagcggggagggaggaagaggggaatgcacatcttttgcgccactattaaggcacctgtcaccttacatctcaatctggaatcaaagtgccctgggttgagaagcagacctgggctctggtcacactttggtcactcattagctctaggaccagtcactaatctctgagactccattttctccagggaaacgaggcttgcccagatagactaacaaccctttagtgctccaagaagtgagaatttccgaaaaagatctgccggcccagagcactccctcttgccctaatcctggcagggtctggatgtatttaccaactctgatcttgcgtgcagggatgcttgctgatggatgaaagaccacaataaaacaagattagcagcaaaacaaaaaaaaaaaaaaaaaa

SEQ ID NO: 296 - DNA, 713 bp, Homo sapiens
ggcacgagttacgtgtctgttgtggtgtctatctgcaatgtgcagtcatatgtgtgctgttctcgtgtatgttcccgtgatcatgtgtatgtccacactctgtgttttgtatgtgtgtggtttggggctgcgtgtgtgtgtgtgtgtgtgtgtgtgtgtgatatttgttatgcgtgtgtttgtcagtgcgtgctgggtgtgcctgcgcccttgagttggcggtgaggctcacgggtaactcggtgggtgtctgtgtggttcgtgcacgatggcctgcaggcccctgagtctcagtgagcgtgggcctgcggctccgtgggaactgcaggtctgggtcctctgtgtgccccggggccaggccaaaaccaggctggaacccgccggcagggcccccgaggcgcctctgcctgctctctccgttcttgccggcggcagcgattcggactcccgctttcgacaaagtctcagctccgcagcagcacccggcgcggactcgctgggcgcgcggactgagctccgggtggaaccaggaccctcgcgccctcgccctcgccctcgcccgactggaccaccgcgagcaacgccgacgccaccgcagaccgcgggtcgcggggaagaggaaacgaaagcgcgggctccggagctgaagtgagaatgagcagaaagtgaaaagagaatccatcgggaaacagataaaaaaaaaaaaaaaaaaa

SEQ ID NO: 297 - DNA, 2791 bp, Homo sapiens
  SITE (355): n equals a,t,g, or c
  SITE (1007): n equals a,t,g, or c
  SITE (2028): n equals a,t,g, or c
  SITE (2029): n equals a,t,g, or c
ttttttttttggattagctaagaaaattttattttgctccgtgcgttcaaggagctcacacacatgcacatgcatatgcatgcacacacacacatacacacacactcacatgcatacacacacggctaatactgctcaaggcatggctcctgggcacagagttctggggccagaattctgctctgggccctcctcactctgtcatctcctgcactgcagtccagggtccagatagatttccgggatacagcaccttcacacctccaggccaggacccttgcttagtcccagtgcctgcaccaggtcatctccgagcccactcttcaacgtccttctcaaagacttgcggttgccngcggaacgcttgcgttccctagcagctaaggcacgaggactgctcttggtcactgactgcaccagaaggtccatgatctcatctgatgtatcactgggtaaactggagcctgggggttcttctggggatgcagtggagggccccactgtgggcatgattggggagctgctctggaccatgcctctgctgcggcgattgtgtgtggtgtcctcaggcctgctggtcagcagactcttcatactagcatgactgtcagcatctccccggcctggcccgctgctcactgctactgggacagaggggttgctgggggcttccccagccacacctgagaacttctctgtctcggtgatcatgcgtccccgggtcttgttgcgctcacggtatgtggcctgcttctgctgctgctgtagcactcgttcccggcaagtccgatactcaagcgcaaattcccgcagcgtgtggcagaactgcatgatgcgcacttcacgggccgctgcggggtgtagcccaggtagagcaggaaggcatggaacctattgcagacacggcggtgcactatccttagcatggcaacacggcgggcacactggtccaggaagtgggtgaggcgggcacgcagggctggggccagctcatgcttggccaartncgcaggctctcctcggctgcccggctccggcgctccagctgccccaggttctcagtcagctgttcaaagtccaccttggcacagcgggtcagggcagggatttctgaatagaggtcagaggactcaggccgggtctggagcactagggagcagagatggtgtagcagtgactgtcgacgcaccgtgtccttcacctytgacaccttctccaggtagctcagctyaaagccgctgctytgggagccattgaggaagttgcccaccgctaggagggtagccaggatgcagcggaaggtggcattctgtaccagctgttccatacccactttcaggtcaaacagtggctcagcaatttcccgctccatgctgtcatagtccagcttgaaggcccaragttgtagacgagcagcgaggccgccaatggaggcaagagtcatcaggaagttctcggctgggcccaggggtatgtcagggttggccagctgggcttcctcaatcttctgccgctcttcctccgtgggcatcatggtcagtagcttctcaatgccatccttgctgacagcaaactcatcaaagttgagcagagcagccttaatgacatgcacaggtggcagtgtggttaggccgatgttgatggcgttgctgcgcttggggtccagcactgtggtcattgtccggcggccctctccagctttcttggagggcagcacctctttggcacgagactcaaagaggtgttccagtcgggccgtgtccactgagacagggtccagtgaagcccagagggtggcgcagggcccaaagcggcttgcagagactccatggcccccagccagcttcagctcacgccagaaaagttttactgtcttcctcttagtggggagggctgagctgtcaggcactgaatggggaagaggggcagccagaggtagaggtggaggtggtgggaaggggcctttgatgggtgggggaggtggaagtgggggaggggggggtactcccgagagcaggggcagtgggnntgagggagctgggatgtctttcccagcctccacagactctacattcagcatgtcctggtcttcatcctcccctagatctgaaaagtccaggtccccaatagagagcctgggtgcacgggtagggagctcccagatgggctcagccttggggcttgctggtatcagtggctccttgggctctggtgcaaggcttcgctgggcccggagcaggacacagggggcagggctctggggtgttctggctgcaggggctgtctctggggagtcccagagttgccgggcawctaaagaaagggaaggagctgtcartgccatgccccctgtggggcaacaaarcaacaggcaggctctgcctgctcacccacctactcacctgggtgtccacccgcctcattgggcatggccccggcaagtgtctctgcccggccctgggccagcgcaacctgcttctctgtttctgctgccgccacattctccaggaaccgggctctgagggaaggtgcttgtcactgacagcgtctgacacaccccagcccaggtgtacatgccttgctgagcccctggacaccacccccaattgcaggcacgcacagacacacagggaacagtccatgcgctgagcagaccagaaccacaccccccccaaggccmscccctcttcagtcctccacatctggggaggattactaccaacccagcattcccaggtgaaaacacagggagaggatctacttaacatctaacttgcaacctcgttcatgt

SEQ ID NO: 298 - DNA, 2017 bp, Homo sapiens
taagctggagctcgcgcgcctgcaggtcgacactagtggatccaaagaattcggcacgagcagcgctacgttgtcctggaaacagccacctctgtccacggtccccgccgatggatacattctggagctggatgatggcaacggtggtcaattccgggaggtgtatgtggggaaggagacaatgtgcactgtggatggtcttcacttcaacagcacatacaacgctcgggtcaaggccttcaacaaaacaggagtcagcccgtacagcaagaccctggtcctccaaacgtctgaggtggcctggtttgctttcgaccctggctcggcgcactcggacatcatcctctccaatgacaacctgacagtgacctgtagtagctatgatgaccgggtggtgctagggaagactggcttctccaagggcatccactactgggagctcacggtagatcgctatgacaaccaccctgatcctgcctttggtgtggctcgcatggacgtgatgaaggatgtgatgttaggaaaagacgacaaagcttgggcaatgtatgtggacaataaccggagctggttcatgcacaacaactcgcacaccaacagaactgagggagggatcacaaaaggggccacaattggggtcctyctcgacttcaatagaaaaaacttgacattttttatcaacgatgaacaacaaggtcccatagcatttgataacgtggagggcctcttcttccctgcggtcagcctgaacaggaacgtgcaggtcacgctgcacaccgggctcccagtccccgacttctactccagcagagcatcaatagcctaaggatgtgccgtggaggcgccagctgcctgttcttacctccgcctgcgagagccacagcaaggagctcagccagccgtggtggggtgcagagttggcaggagtgggagaaggaggagagaaaagctggtcctctgcagtctttacacccacagctctgcccttttccctttcaacctctcctccgctgtcatgcctgcttccgcttccatgtccaacaattctaaccaacaaaggacctagacagcccaccaagtcacttggttcccactcccagattttgcttttatttaacttaattttttatgtaggtgagttatattttctttcttttctgatcaggttattggtgacttactggactggcaccgccagragaaaattctcctgctaacttttyttcttaagctttctgtcaaacaatgaggttgtagggggaggtagggaagaatgagctgaatttgtagcatacagcttacctgctagaatgttcttaccctcttacctctcctgtagcgttagctctgcagagctaagctttgggagaatgaatctatcactgagaagttttactactcattgaagcacaaaaatatccgctacacaggttcacatcagggtaggatcgttaggatggctctataattaggacaggccagaaccctggccactgtataaaattggaaagtctctaagacacaggcaaaccaggggacttaatgatttggttcgtttatttaataaaagcttttaattgagaacctactattgaccaggcactgttcaagacactagaacattatgttctagacactgtggggacacagtggtgaacagacaggcatggtctctgcccttcggagcttatattccagtaggagaaaaagcaaaaataaaataattataaatggtcatatgtactagaaaggaaatgggcaagggtcaaagagactcatgggcaagatctttcaggcttcctagaatgatgctaaaaatccacacattctggccatagcaccagaaatgtaccaactcaatgccttttcagctgcactatttaattatggtacctgctgccactcatcacagagcccttcttggtagaaatgatgtcagcattcttatttgctgatgctgctatgataccacgccttaaaaattgacagttgaaaaaaaaaagaaaaaaaactcgag

SEQ ID NO: 299 - DNA, 1273 bp, Homo sapiens
aaagtttctatatccatctttacttattggtagcttagtcttatacttagccttttcttacagaataataaatatctattaagcatgtgtagaaaaagggtaatgaacacatgttcattgactccagaagaaactacaactacaggactgtattctttacactgtgccaaactttattcctaaaagctacattagattttgccattcccagactttaaaacctttgtcacctataggaaaacatacagacttcgggggtcataaaacaggtgtattatctgctttaaaaaaatcactttgtttctatttcccacctccattactcttctactccataggtaaattctgatgtttctgatctgaatccttttatttgtatgtgtgcttgtaagacatgtagatttattttgtgtgcagacaaatactggatgtgcctgtattttaaatttgtaatacttgtgttatgctctagacattatttattttgacctcagcactcttttaaagatctgtctatatcaatggcatacatctggattgctactcctaactgctgcatagtattctgtagacagcacttgcttcattttatttattctatgtattggtgactttacattacaaggccttttttaataactgaccccatatttttaagttatctcttggaattacacttcatgcaccttaaatcctagctgcatgaagcccatcattcctgcatgaaaacagtgtccttttttatattgccatggctttgcacatgctgttccctaggatacttccagtcttctaatgactgcttcctcacgactcaactcagatgtcatttccttgatgaagacttaagcagctatttcatgcttgagctagttgctctgtactctgctcacacagcacttatttttatcttgggaatatagaagcctacaattccacctagcagtctatatttctgtctagattccttgaagacagcgactagatagatctcaggcatctttgtattctttactctagtttggtgaattgcatatagatggcaatcggtaaaacattcattgaatgaatgaagtgtgtggagttccttaaagtgaaataccatataagcaaaaatgattctcgtaagtaagaaaaggttgggacacaaatacaaatgtcttataaaactgagagaatggcatacaggaagctgaatcctaaaatgaattgaggcttgtaaagatactaagtactggaacatgttcagatcatgaaaaaaaaaaaaaaaaaa

SEQ ID NO: 300 - DNA, 1879 bp, Homo sapiens
gctcgtgccgaattcggcacgaggatttcctgacatctgcatgtacctcgtggaattcagccagcttcatgttgcaaatcagaaagctgaccccaagactgcaaatcaatgaaggtattggcattgttaaggwcgtagcgtagacaacagcagtcataaataattaggcaggaacttaacccaaatctagttctttgaccacctctaccaccagaacccagcagacactcacatctcctgataagagttgctggactcgatgtttttgttttgcattttctcctctccttccccacttactcagagaatttaaagtctgtagagtcagcacagccccatcagtccaggaacttcccaccaccagcccttgactgtcccattaactgacatggtcagatttccagctccccctactccctgctgtgaaacaatccctctccctgtgagaggaaactgtggagcgtttcttatcgaaggttaaatggactctgctcataaacctcttactgagatgcttcctgatagccaggctggccagagaggggtgcaggggttagatagtaagtggtggtcgtttgtggtcagttacctcaattctgttcattgcagtgcccgtaaaccatgtagaaagctcccagcactgaaaggcaggagtgttagcatctcgctttatccaccataacgtaaagaactgcggtgtgataacagccttcacggggccacggtggaaccaagacagcaggcgaggccatgcctaaaacaagtggtctggcacgggcactggccagctgctctctccaagcaggtggcccagatcccacccacgtggactttctcatcaggtgcagcgcctgccactctcagycwctgggtgtgtgactctcctcttcatctcagcattctccatcacttcccctccagaaaaacggatggaaggaagccytctgtgacactgcttctgagaagaagcatttccgggaccgatatcatctgtctggtctctgtgaacagcaaggaatcttcttgaccgttcttgggcactggaggctggctaggagttcagtaataaacgtggccttcgtgctgtagggcagagtggatgcagtttgtagctttcagagtgtctcattgagtctagatcattgaaccaacacttaaccaaatgtcccactcccatcacactaggacttgtcattccatgcccctctcctagtggtcatggtttcatatgggcatacaactgctactgaagttatatagccttgaaaactcagtgcaggttgcccttaattttccccaaacccctccatcggcaagtctagttgccctttagcacctaaagatctgcaccccaaaccaatgtcaccataaagagggcacgaagaagagtgggtgtgatcccaacggggttttgtaactgaagaagcccagtgtgagcttctcatcttttcatatacctctaacccccggtactcattgaatcattgatgaggtatctcaattgagatttgcaaggactttgataccatttgaaatggaaaaattttgaacgggctttaacatgtttaagaaatatggatggggccggccacagttgctcacgcctgtatcccagaactctggaaggctgaggcaggcggatcacctgagatcaggagttcgaggccagcctggccaagatggcaaaaaccccgactctactaaaaatacaaaattasccagcgtggtkgcgtacgcctgtatcccagctactcaggaggcaggagaatcgcttgagcctgggaggcagaggctgcggtgagccgagatcgtgtcactgcactccagcctgggtgacagagactccatttaaaaaaaaaaaaaaaaaaaaaaactcgag

SEQ ID NO: 301 - DNA, 2520 bp, Homo sapiens
acttttctttcttcattaggaaatcttattgcacaggaaccacccccacccccaccccccacaccttcccaaggcagcatcccagtgagatagagtgggaaaggtcccagagggctcactcacctctaggcccagagaggctttctcctcactttatacactgcaaaaacagaagaattgtgtcaataacaccctctgtagtggagaaacttaaaaagctggttaggaagctctcgtgtatatttagagacaattacaagaaagctggacttgccgctgtggtctcaggagaaatgagtgttcttgatgacaggcaaagggacatcttagttgtccagaagcggcactcttccctggaagccgccatgttaataggattactaagcctggctccagacagtgcctgctcatggctgccagttcttaccgatcacatctgtcactgccaccgtatatcatctgccagtgcatcagcttaaggggaggtcacgagtgcaaaagaacctgacccttgacaatgagggagaagggacatggaccacctgtctgggaattcctgggaatcactggcagggtggaggctgggctggggattagccgcggtgtgcgtgaatggctctgtctccagcaagtctctctccatcaaaccccaggtctgccccataagcaagatctttaacagatggatgtctccatgaggaaaacccaaggcgagaagcccaagccatggcggggttgcttgacgtcctcatggagtcactctgccccacatgctcaaatcttccctctggccccacatccctaggagggcctgacccctgtaaagatacaggaggcagctccctggcctccaaatggcccatggagatggcagtcgggagacagggttctgtgtttgctgcggtgaagggaggagaaggcaggaggaaaaaggatggcttctagccctgaagaggactccagcatcccaggcaccgggtgcttctggctgcagttttccctatggaggcccctcagcctccagccctaacataaatgtcggttaaattcagttttcaagcctctctcccttttcagtgtcagagcagtagatggtccagggcattggaggcctcgaccactctgcattgcagattacagtgacttcctcggggttgccccatcttggtctcctgtggtttcttcatcagctttttttttaccagcatctctcaaataacaatgaaagatagatatgcccattaatgtctgattaaggagcaaaggctggatttctggccacagcgcgctgcactctccctcctgcctcagccggggtccgtcttagcagtttggaaaggggaaaaagatgccggtcctcactgcttaagttttgtgtccaggcggccgctcagaactagtggatcccccgggactgcaggacattcggcacgacctcgtgccgcgccccactgcacagatgaggaaccagaggctcagaggagtgaagttgccttcctgaggtcacacagcatgaaagtgatgagctaggatttgaatctgggaagttgggctctagagccagactgtactgccttctgccacactgtactgccttctgtgactgggtggcacctccagggcacatttacacaaggccctgaatctgcagaggctgtttctcaagatgcccgtcatggtgtggcctgggccagctctggcttccacaggtccctgactgtcctcagagtggaacatgctcaacctcccgcccactgctctctcttctgcccagatttcaggggtgccggtccccaaggcctgccccctttctttaagactgaactcaagtctccttggaaggccccggtgaagctcccagagactggttttcttgggatgcaggcagaaggggaccctccctggccaacacccaggagcccagcagaagcacccacacgtagaaagaggctcactacagccagaagtgcagagtcagagtcctgggaccatcttgttctgcaaggtgaccccaggctccccaggacaggggagagggatcgtcctcattcagactctagctggggcctctgtactggcttctccctgggtggggttgcctgttacatagctgtgcctcagagaaagggtcctgcattttctggaatgttctctgtgcttacccctctgtgtgcccctccattgctcctctacaagcaattaggtgattcaaaagagcaacttaggctgggtgcagtgactcacacccgtaatcccggcactttgggaggccgaggcgggcagggacaggagttcaagaccagcctggccaacatggtgaaaccctgtctctacaaaaaatacaaaaattaaccagacattgtggcatgtgcctgtaatcccagctactcaggaggctgacacaggagaattgcttgaaccaggaggcggaggctgcagtgagctgagattgtgccactgcactccagcctgggcaacagaacgagactctgtctcaaaaaaaaaaaaaaaaaaaaaaaa

SEQ ID NO: 302 - DNA, 968 bp, Homo sapiens
ggcacgagaggcagcgatggcgatttttagtgtgtatgtggtgaacaaagctggcggcttgatttaccagttggacagctacgcgccacgggctgaggctgagaaaactttcagttatccgctggatctgctgctcaagctacacgatgagcgtgtgttggttgctttcggccagcgggacggcatccgagtgggtcatgcagtgctggccatcaatggcatggacgtgaatggcaggtacacggccgacgggaaagaggtgctggagtatctgggtaaccctgctaattacccggtgtccattcgatttggccggccccgcctcacttctaatgagaagcttatgctggcctccatgttccactcgctctttgccatcggtcccagctgtctcctgaacagggaagctcaggcattgagatgctggagacagacacattcaaattgcactgctaccagacactgacagggatcaagtttgtggttctagcagatcctaggcaagctggaatagattctcttctccgaaagatttatgagatttactcagactttgccctcaagaatccattctattccttagaaatgcctatcaggtgtgagctctttgaccagaacctgaagctagctctggaggtggcagagaaggctggaacttttggacctgggtcataggctgaacctgttatggacccccaaattctgagagttcctgcaacaagaatactgctgttgacactccagtggaaatcccagcagccttgttagtgcacttgaaagtgggagaatgctgaccctgatgacttgtactgattcctgagccttaacactgtgctctttccttctgtatataccatggtcttactttccaactctgtacagatttatttatggaggagctaggtccataaatgttgtaataaatattcctttgatcttggtgtttgcaaaaaaaaaaaaaaaaaaaa

SEQ ID NO: 303 - DNA, 1235 bp, Homo sapiens
ggcacgagcaaggctgtcaggttgttttgggggaagagggggtcatggatggctgagcagagagcggggaaaatgcaggctgagtggggcgacctcctgcctgccaggagccccctttcaggacacagcgggggtctcacacttgctgtccccatccatggcccgagggggaacctggtggtctcttctgagcttttggacttggggatgccaaacacgtgctcaccctcacactcgccccggcccgctgcgcccctaattgccaaagggtagggaaatggcgaagccagccaccaggtcgctggtgacagggccagggttatgcaggaaggtggtgcggcattgccttccacatatgtaagtctctgggcggcgccctcccagctccctgcctctgtttccccatgtgggccgtggggaactcccagagctacctcttgggggagcgtggtggcagcgatgatggggagacgcctggaagctcacagaacttgggtctggctggctcctgcccgtgacgccttgcccagcagcaaggtgcgcaacatggctgccagccccgcctcccacccccaccccgagtcctgagctcactttcgccttctccatcccctgccgtgggggccacagccacacctcaccgcccagtccagctgtctccagaaggggacaggcagtccgcggtctctggacaatcaactcaaggtacgcccactgcaaggcctccctcccaccgcggcccctgcctggccacctggcctctctgcaccagggtgacaaggggtctcgtctgccccttaatgctccagggcccagtcctaaggagctgagggtctgaggacgcagggagggtggaggtgtcctgaggctgatggacagtgaccgccactggcccccaacatgaccacacgtgggtgctgaactcggggcgccgtgcccaccggcatggtcctcccgagctccgacagcattacctcacccggccccatctgttgccccggtccagccctgatggcgcgcgcctggtctgtctgattcccctagccgccaccccacgtttctgtaccgggtctctgcagtgttaaacggacgtgtaaatagtggtaaatagtgaaagcctgtccttccctaaatgtaaagccatctgtccggcgtaaggacgacaccgtcagctgtccgactcgcacacatttaataaactgagctcttgcattgccaaaaaaaaaaaaaaaaaa

SEQ ID NO: 304 - DNA, 2311 bp, Homo sapiens
  SITE (2301): n equals a,t,g, or c
  SITE (2311): n equals a,t,g, or c
catacgcaagtcacatgaccatttaaatgtgcaaatgtaagaagattcaatgtgtttacatcaaatgacatattttattgatttattgcagattcagtgcatatgagccaaattgttgagtgtgtaagagctatattgtgtattttattaaattaatatatagttgtgttgcaaaaatatttgggcttatattgtaaatggcaagtgttgccttggtagctgtcgaactctatgagttttgttttttcctgcttccttttccccatggagtgtgggaagcagtgcctcagagcaaagtctcttgtttaatgtatagtctaccaagtactacagtacataatctgttcaaaatgtgtttgagtgagctgatggagctaactgaaaggtcaaaaattacatccatcagtcatggttatgtgcaagtccttgtagaagcttttattaaagtcatgctaaatcacaagaattgacatttgtaccaatatctgaaacttcttcatgttttttcaataacatacagcttctgcctgtgtagatattatgccatcagttggttctcaaaagtattttaagtgcttcagatgtgtgttcccattatattttgaaaacatgaaaaatgctttaatgcatgtatgtaccagcagtggttacttgcattgtgtagtgtttttcaagaggtctgggtcttaacaaaatgttttcctttatctcagtgctcttctgcctctttttgttggtgtcctttgagaacaatacaccttctattccttcatttggttacacctttccttgtgacatttagcgagtttcaaacttacttccatatgaggctaagaaacctcaaatttcaggaattgggaaaaataaaattagcacttgcagaagtagcagcagatgggaaaatgccttgattgacattttctttcagcatttaaaatttttggcattttacagcttcatgacaaacagttttgtgcccataccttagaaaatgtggtgctgagttaaataaaggctgtttgagcactggagcagaaaaatgcattatttgcaaactggtggataattttgtgccttctcttctggccaccaagccagtgtagaaacagcaaaaatgtcataaaaattcttatatttaaaacaaaaacaaaagcaaaaacaaacattgaattaaattaagttttgtaattttaaactttaaaaacttctactgaaaatatttccgccaaatgccatcaatattttagactgtacctcgtttgcaaaactgctttgagagggaagagtggacaactcccatcagccttattctcttgagaactatattttggttcctagtaacagcctttccaaagctctactcttggtttttattactcataaatgtttaaattagaaaagaagggaccttgtacatgtgaaacctaattgactctctatattttggacaatttatgtatctgaaatgtgttgtctctgttatatgatgttatttttgccaggagactacaggttgatttagcttgatagctgaaatttgatggaaaactgatttccatttagtcttaccaagtgttgcttctctcttactagacagatatccacttagtaaaatctaaagcagtatgtaaatgaaaccagcaaagagagtagggtttattttataaacattcttaatgctaagtaaccagttgttcaatttattatatgtgtctgaggacattaaaacaccataagrttgtaataattggttgtgccaatgtgtgagggatttacctttaggctctctgtcaccagtgatttactagtgttagctgtttaacacattatctgtatttagtagtgattatttatttacaagttggtggtaattcagcagtcaggactctaagcttttatagttgaattgaggaaatctcgcttttattcatttagctggcaactgcctttattgcagacctctggtgcttggctttcaaggaagcctatgagatgccaaaatcacacctttagagagcaccttgctctaataggtgatgcatgagcaaacagtgagatttgaaggggttttaacataatttagaatgtgaaaaaaatatcaattcatatctttcaagtactaacccctcaaaaaagcccacacatacaaaatatgtgatgtgataccactttgtcttttaggtctttaagtaactgaagttaagcacagaaaaaaaaatcacttcatggaaatttcagtaagaaacccaaacttctaaaaattgcttgcagatgagctaaaaaaaaaaaaaaaaaaaaaanctcgggggtn

SEQ ID NO: 305 - DNA, 2311 bp, Homo sapiens; identical to SEQ ID NO: 304
  SITE (2301): n equals a,t,g, or c
  SITE (2311): n equals a,t,g, or c

SEQ ID NO: 306 - DNA, 1057 bp, Homo sapiens
ggcacaggatgaggacaactgtgctgacaacccatgttcttgcagccagtctcactgttgtacacgatggtcagccatgggtgtcatgtccctctttttgccttgtttatggtgttaccttccagccaagggttgccttaaattgtgccaggggtgttatgaccgggttaacaggcctggttgccgctgtaaaaactcaaacacagtttgctgcaaagttcccactgtcccccctaggaactttgaaaaaccaacatagcatcattaatcaggaatattacagtaatgaggattttttctgtctttttttaatacacatatgcaaccaactaaacagttataatcttggcactgttaatagaaagttggggatagtcyttgctgtttgcggtgaaatgctttttgtccatgtgccgttttaactgatatgcttgttagaactcagctaatggagctcaaagtatgagatacagaacttggtgacccatgtattgcataagctaaagcaacacagacactcctaggcaaagtttttgtttgtgaatagtacttgcaaaacttgtaaattagcagatgacttttttccattgttttctccagagagaatgtgctatatttttgtatatacaataatatttgcaactgtgaaaaacaagttgtgccatactacatggcacagacacaaaatattatactaatatgttgtacattcggaagaatgtgaatcaatcagtatgtttttagattgtattttgccttacagaaagcctttattgtaagactctgatttccctttggacttcatgtatattgtacagttacagtaaaattcaacctttattttctaattttttcaacatattgtttagtgtaaagaatatttatttgaagttttattattttataaaaaagaatatttattttaagaggcatcttacaaattttgccccttttatgaggatgtgatagttgctgcaaatgaagggttacagatgcatatgtccaatataaaatagaaaatatattaacgtttgaaattaaaaaaaaaaaaaaaaaa

SEQ ID NO: 307 - DNA, 1948 bp, Homo sapiens
  SITE (1913): n equals a,t,g, or c
ggcacgagctcgtgccgtttaaatgagaagtactgactttgtaattaaaaacaaaaactattttaaaatgtgctaaattttggacctatctcagcctgagaaggtttttttctaaaaaggttcaggcatctttttattttcctactgctctccttacctgtgcacacctcattgcctgtatctgtgatgcctctatttggagggaacctgggttatgcctgggcctggtttactcccataacatgggttgctgtacttgcccacttaattgtgagctctatccatccaggaaagtaatctgttccttattttgaatagcgtgttcttagaagttcatgggttctaattgaaggaaactagagggaccccttccatccttcagcaagggtccccaaagataggcagggtgcccagagaatgcctcaactgctgagaactccaccctttcaggtccaatgcaggctcatctccagaaaagctgggttagagttgtctcactgtttgggttggaatattgtgatttctaggagtggaaatgcacttgctaatttagctatctcctctttataagacgctcatggaaataaagattagccataaaatacctttaatgagcttccaaattttatctgcaaggaacccagggcctgtggcattatactggtttgtagaagactcctgtggtgtctgcagaaactttctctggtgaatatctagaatttccattactttgaatgtgtacatgttattaatcaaggaattaatcatccccattctctttgattgaaagtcacattaccttggaaggacaaggtgttgtcaaatgggcaaggcagatcatatgttttcttttactggactccttatttttctaattacagcctgtgtatcctgtgctagagagcctcttgaaattaacttaatttactatcacacttgtaacatacccatttatttgggcctgtgaatatgtgtgcactccatttgattacatctaatgttctccctaaataaagagtacaattaattcattagaggatggtttgtttccaggggtaagtgccagtttatgatgattccatcaacacttgcaccacattaatttatttccaatttaatcagtgtttaaattgaactgggatcaggcagaacaaaacacatggttttgcataattataatggagcaaatggaaatagtcatagcacttcagcattagaaacctcactgcagaagcacagatgggttaggagatgttgattaaaaaagatgtctaggaataaatcctctgtaagcactgtattaaaatccaagtgcctgcaggacaagcgactttgcattaattactaaaaaatttcttattctgggtatagctttctgtagaaatcctacagattgagtaaactgtggaggcactccttttcatgctccatttaacttaaattattagctggttcagaaagttgtttcttcccagacttgtctaggaagttcaatatttagcaattacccctttgtgcttctcgaaccttctccaagccagtgtcgttgaaggacagatttgccatgtgggaaggtgggctaccttggaaaacagatttttggttcggagcttgtctgaaactctctagattaagaattgtggccgggcgcagtggctcgcgcctgtaatcccagcactttgggagaccgaggtgggcggatcacctgaggttgggagttcgagaccagcctgaccaacatggagaaaccccatctctactaaaaataggaaattagctgggtgtggtggcacatgcctgtaatcccagctactcgggaggctgaggcaggagaatcactggaacccaggaggcagagattgtgttgagccgagattgctccattgcactccagcctgggcaacaagagcaanactccatctcaaaaaaaaaaaaaaaaaaaaaaaac

SEQ ID NO: 308 - DNA, 622 bp, Homo sapiens
  SITE (5): n equals a,t,g, or c
  SITE (18): n equals a,t,g, or c
  SITE (23): n equals a,t,g, or c
  SITE (33): n equals a,t,g, or c
  SITE (34): n equals a,t,g, or c
ttccngctcgtataaaantgganttgtgagcgnntaacattttcacacaggaaacagctatgaccttgattacgccaagctcgaaattaaccctcactaaagggaacaaaagctggagctcgcgcgcctgcaggtcgacactagtggatccaaagaattcggcacgagctcgtgccgcgcccgttcaacgtccggagcatcggtgcagtttcgagggtaaagcctttggcgcggtgatgtggacttttgttctctaactacaactcccagcatacgtcacccctcacgtgggcgctaggtcaccagtgaaaagttgtgcagagcccaacatgagcttcatttccaagctgccacctatctctgcctcctgcgtagcatccggaaacatgtggccctacatcaggaatttcatggcaagggtgagcgctcggtggaggagtctgctggcttggtgggtctcaagttgccccatcagcctggagggaagggctgggagccatgaacatggagaatatccttggatgctgcattcataggagaattgaataatttctatcaatatgtatttatcattaaattttttttaagtttaaaaaaaaaaaaaaaaaaaaaaaaaaaaaaa

SEQ ID NO: 309 - DNA, 1647 bp, Homo sapiens
  SITE (89): n equals a,t,g, or c
  SITE (170): n equals a,t,g, or c
  SITE (603): n equals a,t,g, or c
  SITE (751): n equals a,t,g, or c
gatcactaccaattttcctgttttggggtgtaatgaaaattttaggctgtgccccaatttttagtttcttacgactatctttgattttngataggcatcttggagtagttttttgaatttttgactcattaattttcagaagggtgtctagactatttacactataagtngttcatttacctgagagtctaaacattataagttatcaaacaaaagatttatatgctggtcattccgtttctaaatcaaatggtaatacttgaagaatttttgctttaatggaaggcagcttgtgtgacagtgcgatcttaaaagtgtgcagatcccagtctcagtcaatcaatgtgggctgattgctgtggattgtaatagacagtcacatcatagcaatcttgcagataacgtttgctgctgtttattgtcagctttagcttctgctattttatttaaataatattatcttatttctccctatctttttttctccccttttcctttcttcatttctccctatctttaacttaacctgtcttctcccttttccacttccattttttttgttattttcttgataatgtagaaatattatgacatttatattgngttcttttaacttaatctcccacattttaaaaatcttagttctagagttaaatatattcagtgcttgcagctggtccttttgctctggtttatttgcctagtatttgctggttggctaagctttgactgtttttctttcttttatagncatcttagtcaaatttgtaatcgtttccttaatggaatggggtgttcaaaggccagtgtttatggaaactgactaggtaacatatatagtgaaattagcctgaatttggggggtagagttggactctggtcgggtagagtacaggcacttcttctaaagggacagctgcatcagtggattgttgtcatatggaaaaatgggcccaaaattctcaggtctgctcatagttcagtagaagctggagtggcyatgtgatgtctctgaagtggtggcagctaatagtttttwrggcacctaactcaaagctttaaaaacacagccaaacaaaaggtgtctgagctattacttttcaccttctttatagattctacatkkggtgcaagtttatttaatcctaaggtttttaaaatttattcaactacatgctgacacagttttgtttttttgaaaaacaattaaatctgtaatctgtctggtacttacttttcaatgtgtgaagtggagtcctgttttgggttttttttcctctattttattttagcatatttttctccccaaccttggcttcctttaaaaagccatacttgggccaggctcggtggctcaagtctgtaatcccagcactttgagaggccaaggcgggtggatcacttgaggtcgggagttcgagactagcctggccaacgtggcgaaactccgtctctactaaaaatacaaaaaattagccaggtgtggtggtgagcacctgcaatcccagctacttgggaggctgaggcaggagaattgcttgaaaacccgggaggcggagcttgcagtgagccgagatcgcgccaccacactccagcctgggcgacacagtgagacattgtctcaaaaaaaaaaaaaaaaaactcgag

SEQ ID NO: 310 - DNA, 598 bp, Homo sapiens
  SITE (550): n equals a,t,g, or c
tccaaagattcggcacagattgcaggtaagtgcagtggcataagcagaaggaagggaaggacatatttgggcacagtcattctgctaccaccaaaagcatctgcctattggtgaactttccacatggcttttctttcattttgctgctgcgcctttgctttgtattattggagctcagccttctccctttctattgtttttttttttctttatcgtatatacacacctaagtttttccatcttgcatcttcccacaatctcacttctccctctggctcctgccccgtctttctccttttgttcatactcagtctcaaaggaagagtctatagtcactatctccacttctccacctgccatttagctttccaccctctgcagccagaatttgaccctcagaactccactgaaactactctgtcaaaagctacaaattattgcctaattgtcaaagtcaatgggttatttttcatattcatcatatatggcatttaacattatagctctagattttgcccccaccttcctttatgaaactcaataccaaaantctcacacagcaactcaatagcaaaaaaaaaaaaaaaaaaaactcgag

SEQ ID NO: 311 - DNA, 1467 bp, Homo sapiens
ggcacgagttcatcttcatcttctcagcttgctccaaatggtgcaaaatgcattccagtacgagaccgtggcttcctggtgcagacaattgagtttgctgaacagcggatccctgtattaaatgaatattgtgtggtttgtgatgagccacatgtgtttcaaaatggccctatgcttaggcctaccgtatgtgaacgggagctgtgtgtgtttgcttttcaaaccctgggagtaatgaatgaagctgctgatgaaatagcaactggagctcaggtggtagatctactagtatccatgtgtaggtctgcgttggaatctcctagaaaagttgtgattttcgagccatatccttctgtggtagatcctaatgatcctcagatgttggccttcaaccccaggaaaaagaactatgatcgagtaatgaaagcactggatagcataacttctatcagagaaatgacacaagcaccatatctggaaatcaagaagcaaatggataaacaggacccccttgctcatcccttactgcaatgggttatatcaagtaatagatcacatattgtgaaactgccagttaacaggcaattgaagtttatgcatactccacatcagttccttcttctcagcagtccaccagccaaagaatccaattttagagctgctaaaaaactctttggaagcacctttgcatttcatggctcacacattgaaaactggcactccatcctgaggaatggtctggttgttgcttctaatacacgattgcagctccatggtgcaatgtatggaagtggaatctatcttagtccaatgtcaagcatatcatttggttactcagggatgaacaagaaacagaaggtgtcagccaaggacgagccagcttcaagcagtaaaagcagcaatacatcacagtcacagaaaaaaggacagcaatcccaattcctgcaaagccgtaacttaaaatgcatagccttatgtgaagtgatcacctcatctgacctgcacaaacatggagagatatgggttgtccccaatactgaccatgtctgcacacgattctttttcgtctatgaagacggccaagtgggagatgcaaatattaatacacaagaaggaggcattcacaaagagatcctccgagtaattggtaatcaaactgctactggttaaaggaccaccatttaattaacatgattcgaaagccttcctcgggttcaaagctggattttgaactgaagaagattataaaattatttattgttattataaacaaaattaaccctttgaatactgattttttttcttagtatttctaagtatctcattaaatacctaaaatggtataagatttatcaattgtagggttatggaatctagtaataaaatttcaacagcacttaaactgaagtttgggttgctcatacaataaacagattgaaaaaacaaaaaaaaaaaaaaaaaaaaaaa

SEQ ID NO: 312 - DNA, 1551 bp, Homo sapiens
caaagattcatgtgtggatatgtttctggactttcttttttgtcctgttggtctctttgtaagtctttaagtcactctcttcattctcataacttgaaggtcttgctatctgatagtgaaagtcttccactgtgttgcttctccaagagtctcttggcttttcctggtcctttgcatttcatttaattttagaattagcttgccaatttctaccaaaaaaaaaagtgatggaattttgatacatgggatgaataaattaattggaggagaactgctatctttacaagattcagttttacaatccttgaacgtggtatgttcctccatttaaccaaatgttttatagttttccgtgtagcggtctcatacatcttgtgttagatttagtcctagagaactatactaatataaatggtaactttttaaattttccttttttttttttttttttgagacagcgtttccttcttgttgcccaggctggagtgcaattgtgtgatcttggctcactgcaacctctgcctcccggattcgggcgattctcctgcctcagtctcccaagtagctgggatttcaggcacccaccaccatgcccagctaatttttgtatttttagtagagacggggtttcaccgtgttggccggactggtctccaactcctgacctcaagaggatcgggggacctcgacttccccaagtgctgggattcgggattgcaggtgtgagccactgcacctggcctaaaatgttccatttctaataaaatttttagaagagtccatttacatgatttactatttatatagagagatgtaattccttttttttttcctttttctttcttcttttttttttgagacagcatcttgctccgttgtcaggctggagtgcagcagcatgatctcggccactgtgtgatgtgttagagatactctttattagttaagaaaattcccttctcttcctaagttgctgaaagggtatgggtattgattttgccatgtttttttctgcatctatgaagctatataattatataatttttcatctttattgatatttatctttattcccatttattgatttggggatgttaagtcaatctgtctttcctgaaataaacttaacttgacagtgttatattattctacccataattatttttaagattttttttgcatctgtgttcatgagagattggtttctaattttcttatcaagtttggtatcaaggttatgctaaaaatcagctgggtgcagtggctcacgcctgtaatcccagcattttgggaggctgaggtggccggatcacctaaggccgggagtttgagaccagcctggccaacgtggtgaaaccccgtctctactaaaaatacaaaaattagctggctgtggtggcacaagcctgtaattccagctacttgggaggctgaggtaggagaatcgcttgaacccgggagctggaggttgcagtgaggcaagatcaggctgctgcactccagcctgggtgacggagcgagattcgtcccagaaaaaaaaaaaaaaaaaaa

SEQ ID NO: 313 - DNA, 1252 bp, Homo sapiens
ggcacgaggtgaggaagagagcagctcgcttctaactggactgcacgttggtgacagcgtcccaagctggtgacagacccactctgtaactttcagctagattcagccaccagatcccagaaacatgacccttgctgcctacaaagagaagatgaaggagctcccgctggtgtccttgttctgctcctgcttcctggccgatcccctgaataagtcgtcctacaaatatgaagcagacacggtggacctgaattggtgcgtcatttccgacatggaagtcatcgagctgaacaaatgcacctcgggccaatcctttgaagtcatcctgaagccaccctcctttgatggggttcccgagttcaacgcctccctgccaaggcggcgagacccatccctggaagagatccagaagaaactagaagcggctgaggagcgaaggaagtaccaggaagcggagctcctgaaacacctagcagagaaacgggaacatgagagagaggtgatccaaaaggccattgaggaaacaacaacttcatcaagatggctaaggaaaaactggcccagaagatggaatccaacaaggagaacagggaggcccacctcgccgccatgttggaacggctgcaagagaaggacaagcacgccgaggaggtgcggaaaaacaaggagctgaaggaagaggcctccaggtaaagcctagaggccaaagaactttccaggtcagccggacagctccagcagctccacgttccaggcagcctcgcccgccggtgcgctcccagcactggggtttggggggaggggggtggccaaggggcgtttcctctgcttttggtgtttgtacatgttaagaattgaccagtgaagccatcctatttgtttccggggaacaatgacggggtgggagaggggagaggagagagtttgggaaagggagatggagaagaactcaaggacattgcaaccctgcccggcgcagatctgattttcacatctctacctggacattgagcctccaggcaccatgttgaggagagatgaaaaccagggcggtagaacttcagggtgaaggacagagtcctgggtggggcagcggctgcagggcgcaccagagaacccagccagagggggtgtgagtaccagtggtgttgcttccaccctgcagcaggtgggatgaggtctgtgtgtgtgtgtgaaccatcattttttgatcatcatgaccaatgaaacattgaaaaaaaaaaaaaaaaaa

SEQ ID NO: 314 - DNA, 2516 bp, Homo sapiens
actagtggatccaaagaattcggcacgagcaggaccggcagccggcaagatgcgaccgccctgcccagcatgtcctcaactttctgggcgttcatgatcctggccagcctgctcatcgcctactgcagtcagctggccgccggcacctgtgagattgtgaccttggaccgggacagcagccagcctcggaggacgatcgcccggcagaccgcccgctgtgcgtgtagaaaggggcagatcgccggcaccacgagagcccggcccgcctgtgtggacgcaagaatcatcaagaccaagcagtggtgtgacatgcttccgtgtctggagggggaaggctgcgacttgttaatcaaccggtcaggctggacgtgcacgcagcccggcgggaggataaagaccaccacggtctcctgacaaacacagcccctgaggggccccgggagtggccttggctccctggagagcccacgtctcagccacagttctccactcgcctcggacttcacccgttctctgccgcccgcccactccgtttccctgtggtccgtgaaggacggcctcaggccttggcatcctgagcttcggtctgtccagccgacccgaggaggccggactcagacacataggcggggggcggcacctggcatcagcaatacgcagtctgtgggagcccggccgcgcccagcccccgccgaccgtggcgttggccctgctgtcctcagaggaggaggaggaggaggcagctccggcagccacagaaggctgcagcccagcccgcctgagacacgacgcctgccccaggggactgtcaggcacagaagcggcctcctcccgtgccccagactgtccgaattgcttttattttcttatactttcagtatactccatagaccaaagagcaaaatctatctgaacctggacgcaccctcactgtcagggtccctggggtcgcttgtgcgggcgggagggcaatggtggcagagacatgctggtggccccggcggagcggagagggcggccgtggtggaggcctccaccccaggagcaccccgcacaccctcggaggacgggcttcggctgcgcggaggccgtggcacacctgcgggaggcagcgacggcccccacgcagacgccgggaacgcaggccgctttattcctctgtacttagatcaacttgaccgtactaaaatccctttctgttttaaccagttaaacatgcctcttctacagctccatttttgatagttggataatccagtatctgccaagagcatgttgggtctcccgtgactgctgcctcatcgataccccatttagctccagaaagcaaagaaaactcgagtaacacttgtttgaaagagatcattaaatgtattttgcaaagcctaaagttatatatttaacagtttttatatgttgtatatttgtagaaaatcctatttaacaattaacgtggcagtcccggccgtcctgagagtcgggccgagccccgtgtgtttctgaagactctgggggtgggacacggcggggaggtggtgccccgcggaccccggggtgccaggcacggaaggcgggactctgggagaagcgtgcggaggaccgtggcgtcggcgtcccggatgtgtcggtcgtgcccggggaggccgggttcccctcgctgcgggccaggcttggctcctgattccctctctggtccctgtattggtcaacacttgagcgtacaatatcttgaacatgcttcttccaatgggttttgtttcccatttcctgcccctttcgccactcacggaccttgaggccagttgacggcccttctccccacgcctgtgtccccgcgttctgagaagtcctctgtcttcgtgtcactaggtccagaaagtcgcgccgggcagaggcgcaggcggggccggcagggccgaggaataagcgacaattctggtttttctcccctggccgtcgttcgccagcctccttcattttcctgagttcccgctgaagtatatactacctatgagtccaattaacatgagtattatgctagttctatcctactaaaaaaaacgtaaaaaaataactatatagaagctgttccagcaaccatagactgaagatacgaaagaaaatccatttatttaagacctgttccggtatccatgaggacataatttacctttcagtcaccacaaatttataggcatttgtatcctggactaaaagaaggggctgaggttgggtttgtcatcacagagggggtgggcctggaaagggtccttcccaagctgccccggctccggcggcccgggccggcagcctctgccagccagcgtcctcacggcctccccctcgcctgtttcttttgaaagcaagtgtagacaccttcgagggcagagatcgggagatttaagatgttacagcatatttttttttcttgttttacagtattcaattttgtgttgattcagctaaattatgaaaaataaagaaaaactcctttgataaaaaaaaaaaaaaaaaaa

SEQ ID NO: 315 - DNA, 2483 bp, Homo sapiens
ggcacgagcaattttttcacttctgtcctggcaacattggtggtgtttgcagttctgggcttcaaagcaaatgtcataaatgagaaatgcattacacagtatgaatattaatttccatttgccttttttcttagtttttatcttgttatttatacttttattgatacatgatagctatacatatttatgagatacatgtgatagttcgacacaaacatacaatgtataatggtcaaatctgggtaattgggatagtcatcacctcaaacattaatcatttctttgtgttgggaacattgctcattcattagcttataatggcatagtcgttcacaaactatacaccaaagaactcttatgtgctcatttgtatgttgttttatttttcagaaattcagagacgatcatgaaatttttgaaaatggggaacattagtcaggatattattccccatcatatcaacctttcaactgttactgcagaagattatcatttagtttatgacatcattcaaaaagtgaaagaagaagagtttcctgctcttcatctcaattcctgtaaaattgaagaagagctaaataaagctgttcaggggaccggcttagcttttattgcctttacagaagcgatgacacattttcctgcatctcccttctggtcagtgatgtttttcctcatgctggtcaatctaggccttggcagtatgtttggaaccattgaagggattgtcacgcctattgtggacactttcaaagtgaggaaagaaattcttactgttatctgttgtcttctggcattttgtattggcctgatatttgtgcaacgctctggaaattactttgttacaatgtttgatgattattctgctacactgcctctgctaattgtagtcattttggagaatattgctgtatgctttgtttatggcatagataagtttatggaagactaaaagatatgctgggctttgctcccagcagatattactactatatgtggaaatatatttctcctctaatgctattatcattgctaatagctagtgttgtgaatatgggattaagtcctcctggctataacgcatggattgaagataaggcatctgaagaatttctgagctatccaacatggggactggttgtttgtgtctctctggttgtctttgcaatactcccagtccctgtagttttcattgttcgtcgcttcaaccttatagatgatagttctggtaatttagcatctgtgacctataagagaggaagggtcctgaaagagcctgtgaacttagagggcgatgatacaagcctcattcacggaaaaataccgagcgagatgccatctccaaattttggtaaaaatatttatcgaaaacagagtggatccccaactctggatactgctcccaatggacggtatggaatagggtacttgatggcagatattatgccagatatgccagaatctgatttgtagctgggggaaaagtcagtgggttttatttggttcatttttaccaatgaacattggccctagtaggagaagcattaggcttcacttatcagagggcaatctcaggtgttccgtggctgtgatctttaatcctaacagtatatgtcagttcaacttgagcattcttttggattctttggtttacatttgtgcagaaaggattgcagacaaatcttaggagggctgaggtacatgtttgccaggatttttttttaagtacctttggtgtattttcaaatatttctatctcttaaaaaaatggtattacctcagtttctaataatttctgggtttagtagtgttgacaattaaaaatggtatacattaaaatttataagtttgccttcagggtaacttccagtgtcacaatgagcagttctgtaagtgggtgcctctcagcacatttctatgaatatattatgtagataggctgtattgattttggtagcattgacaccttcttaggcaattagttgaagaaaactgcaaaatattttcttatgtaatagctgtatagagcaatagcaatcaaagcatgagaaggcactaacgctgggatgaaagatgagattcagaggtgactgagaatcatgtgagtgatggctgtatattttgtgtaaaatatatgtgtgaaaatgaactaagagtgagttactcagcactctcaagaattatgcagattctgcatttttcttatgccgtgtgcctaaaaacctacttgatatttattgtggtttcaagattattcatagtatatttatacaatatacttgcaatgcatttaagtacttaaagtactaatttgaaaacttgaagcaagatggcattttaattaatatatttctgttttgcttctgttttatgcaaatataaatcatttttaagtgattgttaaaattgtaatgcattacattttaatctacaaataaacaaagtttaaaaatgaaaaaaaaaaaaaaaaaaaaaaaaaaaaa

SEQ ID NO: 316 - DNA, 1663 bp, Homo sapiens
ctcgtgccgtttctattcctctctcctctggttgtatactcagtaatgggattgctgggttgaatggtagttctgtttttagctctgaggaatcgccacactgctttccccaatggttgaactgttttacacacccaccagcagtgtgtaagtgttcccttttctccacaaccttgccagtatctcttaatttttgactttttaataatagccattctgactggcgtgagatggtatctcattgtggttttgatttgcatttctctaatgatcagtgatactgagccttttttcttatggctgttggctgcatgaatgtcttcttttgaaaagtgtctgttcatgtcctttgccttctttttaatggagttgtttgttttcttcttgtaaatttgtttaagttccatatagatgctggatatttgacctttgtcagatgcatagtttgtgaatattttctcccattccgtagttgggctgtttactcctgttgatagtttcttttgctgtgcaggagtgcttaagtttaattagatcctatttgtcaatttttgcttttgttgtgattgcatttggcatctttgtcatgaaatctttgcctgttcctatgtccagaatggtattgcctagattgtcttccagggttttttatagttttggcttttacatctaagcctttaatccatcttgagttgatttttgtacatggtgtatgtaaggaaggggtccagtttcagtcttccagagcagaactttctaacttgtgtgtgggtgttgtgccctgggcaggttaacagatccctccaactcgaggagtctgggtggctggagctctgcactggtcacctttggggtgagtagcctggccccaaagtgacatacaaacatcattttctgtgtgtgtcacagcctggagaaaggtgagaagtcccagatgatatcagtctaagagttttgtacttgacagaaaaagagaacaaagagccagtctggaggaaatcagcaagtgccttacatttttttcccaagctaggcttggtggctcatgcctgtaatcccagcactttgggaagccaacgtggaaagatagcttgaggccgggagtttgggaccagcctcggccaccgagcgagaccctgtctctacaaaaaataaaaatgaactgggcgtggtggtgtgcacctatcatatctagtctttggactagaaaaatctaaaatggtttggtaagactttgctgttgctttaaagcaatggtccccaacctttttggcaccagggaccagactggttttgtggaagacagtttttccactgataaagttgggggtatggtttcaagataaaactgttccacctcagatcatcaggcattcgattctcatacgcagcatgcaaccgagatcaccacgtgcacagttcaccgtaggttcactctcctacaagactccaacgctgccactgacctaacaggaggtggagctcaggcggtgatgttcgctcacctgctgctcacctcctgctgcgtggcccaattcctaacagaccacagacggatctgctggggactcctgcatataaagtaagtgtgtttggagggaaagtaactaatttaaagagattcccaccagccaattagaacaagaaaaaaaaaaaaaaaaaa

SEQ ID NO: 317 - DNA, 1531 bp, Homo sapiens
aaagagggggcctccttccctggaggccatctgatgagggtcgatgggccagtttgagaaccatttgtggcaagcgtttaaatcccaggctgctttttgccccagtacctggtatccagccatcgattgatgtgctacgagagaagatgaaccaattttattattagcctgaacaaaacataattaggaggagaaatttgcttctgctgttgcagttgctgcagcaaagaagttacataaggttcattcggatgacttgggaacaccttccctacttccctattcctgttcccgtttctctggcttgaaccaagtaaatagaggtccagagcctccactctgccttctagaaattcccaagacagaaatgtgctcaaggagcagatctaagaccctcagcctatagcggacatggaacaagggcacaaatcgaataagtcagtgcattgtcatgatgaacatgtggacaaaggcaagaaaagggagaagggacaagagagaggagcagactggaggagaaggaataaagagctgaggcatagctctgctcctgtgatgttagaggaagggaaggtggaaaaaaaaggcattgaattattctcagacaatttcagaaggaccagatggattctggaaggaattaactctgttatgtcctgtactagtatcattactacactctaagatgggcaaacgaaaggatttggagcattttggcagatactctttgggtgattgagagggggaggtaggaggtcatggctgttggggtgactatatgggggtcgcatttgggctgaaagttaagactctgtctcaaaaaaaaaaagaaagcaaagaaaatgtcaactactattttaagtaaacaaataatacaaattgtttctaatctttattttaggagatgttgcaaatatggaccagagactgcagaaagctagccagatcaaaggccagcagttaaaggcagtaactatagttaactcccagttgacccaatagaaggaagagccttgacccgagtaacacccagccactgatttttttttaatcttttctttttaactttgggatgcatcatggtgataataatgatgataaataatcagatttgccttgcttattagagttgacttggtctgctatttaaatgagtttctaattccctgctcacaccagactgacaaccgaaaccttctgggtggcaaagggaatcagcctgcctgggattaagatttttccatggttaatctccaaagtgaggaacctacgtgtgagtaattgagagctgacagcatttcgttggatcagttttgcctagtcagacagggagagggctaagccttggaaagacaatagggtaagacaagaggaagttgacagagtgtgacttctatccatttctcagccttgcttgcacaacctgccctagctcaggtgaagttggccctgcattctttgtctcttatttgctcatttccaacaaacctttcatttggtccaagggtaaaaagaaaaaaaaaaaaaaaaa

SEQ ID NO: 318 - DNA, 223 bp, Homo sapiens
ggcacgagatgagatccttggggtccaccctagtctctgacacctgggacaggggtgcttttgctactttggttgtggtcactcccccacacctgcctgcctccttcacggactcgaagtgaccttcctggaggaggtgggcagctcagactccacatgctggtggtgcctgaggtctgatggcctctaataaactgtgtcctataaaaaaaaaaaaaaaaaa

SEQ ID NO: 319 - DNA, 2015 bp, Homo sapiens
gaaaaatgcgaagactgctttatattttgtttgctcctctacactgttaattgatgaacataaatccaccagggaatgtgcaagatgtttaatctgccattccttttgttggtctcagttgctttatggtgcaagcaactgaaaacattgaatgtttatactataaggcctcgaaggcaaatgaaatacttcttttagggctcaactgaagaattagtaatttttcccaattgtggaggatttctaaatatttgtcagtattaagctaaaattaatgagtgaaaaaatgtatacagtctttacttcacttttaatttatgggatatgtactttattacatcatttttaataatatgaaataatttaaacacatagataatatacaacgtatacgatgtataaagagtagtgaaaggaaccacccaggttatgaagaagaagatctctaatattatcaaagccccaagaatagtttttctctattcaatcacttaccttgatccccagggtagcatcaatctgactttgttgcttcccattgtctttttttaataggtttatatacatatatgtatatctctttaacaatttctttaattataagtgtttttacttttacaaaattggtatcttatatatggttttcatacttgccttttttactcaatattgggtgtctgagattcctccaggtttttaatcagttttcctaagataaatattttgaagttgttttcagcttttcactattgtaaacaatgctgcactggatattcttattcatgtttcctgatagacatatgcaaaagtttctttaggcaagggattattggtccataaggtatgcacctgtgtaactttattccaaaatgccaaaatgcctttaaaagaattttgattacactcttgccatctttttatgacagttctacttcctccattcctcgccaatagttggtattgtccattattttattttacttttaaattttattttatattatacttttgtcaatgtagtgagtgtaaagtaatatttcattatgtgtttagctcagaagtacaactgccggattgcaggatatactaaatagttttccaaggcttcctttaccaccctctgctcctgtatctaatttccgctctacaatgagggtaaaattatatcccattgtggttttaatttgcatcttcatgattaccagtgaggagcttttcatgtattatttagctattcatgtttcctttcatgtagaataactgctcttgtttttgcctatatttatagaagtttttgtatgttctgaataatcttttttaggtcatatgtgtggcacatattttatcctagtttttgtcttctctttttatttgcaatgtattgtcttatgataagcaaaagtttataattttaatgcatagagcttttaatataattgttttcacattttctgatgtgcttaagaaatcctcaatgctgtggtcatgaagttattctcattttttttcctaaaaaatttaaggagttgtttttcacatttcagtgtttatttggagaatgtgtgtgtatgtgtgagcaggtgtgtggtaggaggcaggaatccaatttccctttttccaacatgagtcctagtaccccttgtcaaatatgccccattaatgtgcaatgacaactctgtcgtatatgagttgccatatgtgtttgggtgtgtctgagttcccaaatcaattccatttgtctttttcttccatatccataataatgtgccgttttcattattacaactttattataggtcttaatatacagaatgggcaagtcacactacttgttcatcaggaaatcttaactattttccttttatcttccatatgaatattggaatgagctcactaatttccatgccaacattgtgactggaattacattgagactaaagatcaatttgggaagaaatgccatccttataataatatatcaataaatccttaatattaaaaaaaaaaaaaaaaaa

SEQ ID NO: 320 - DNA, 1964 bp, Homo sapiens
ggctgcaggaattcgggccgaagcttagaatgactaatttggtcataagttttacacttagattttcttctttcccagtgttgcccttttgccttcttttatgtaacatagcatttgggttaaataataccttttcttagtagaaacacacatgattatctgtagtgaatgtaatttaatttgtaaactccttttgtgcggcattcctgcaggactgtgcactgtgacatggttttctattcatcaatcccttgccttgtatttttcaagtgttggttgaaccaattcttacaagtgaattattacaccctcccttgcagctcaaaacaaacaaaaaagttctcctttccaagttgaaacctataatttgatcagtttgcataaagtagttacagctattctcttccttagtgtcatctattgagagtacaccttagggaaagaagttctggagaatgagctgctcctgtcctcacggtagagatagaaaggtctgctcaatgtctccaatgccctctaatattctgaacagtaataaccttaaagatattaagataccccacttgaccatgccccttgggggtcctctccatcagtgctatctttctgtgaagatagagatgttctataatctgcaagtccattgtggtaaccagtagccacatgtggcttttgagcacttgaaatgtagggtaatgcaatagggggactgattttaacttttatttaatgttaagtaatttaaatgtatatagccacatgtggctaatggttaccacatcaaacagcatagctctagacagttgtgtggttctgaagaatctcaatgktcaaaaaaaaaaacattgacctctcttaccctcatattttattacaaacaccctgagtaaattagtattgaagacttggctgtcgaggcactctggtttgtgaaaaggtgggatttggagtcacaggccttgggtttagttctagccctaccaatcactgatcgggtggcctgggcacacattgtcccctcacatcagtttcctcatatataaagtagaaatgatggcacctatctcctaaggctattgkgaagatgaaatgaaacaacacgtgtaaggcactgagtgtaccctgtctaaattatgctggtctgtgtccacatctgactcaggcagagatttctcagttttccttatgtttaaaaaataaacaaataacagatcatctctgaagccaagcatgtttccaaagagaactctgaaaatcagctttattattttaatcctgtgctgtctgtgactgtctccagatgtgtgtctgtggagaaatagatcttcataagtctgagaaaggtatttagtctgtccgaaaatgtgtttctaagtatactcatctataattttattactgacatcttactagtaccactaacaagtaaagggaagttagtttaacataaagattattgatattgtttcctgagctatcagtgttacttcatttaattggatagagaggcttacttttctagattatctttgtaattgtttacttccctttaatgtgtctatgctatggtagagaataatggaaggcattaccatgctactccattttcatttggcctatgaagactggcacagtaagggctttatagaaatggaagttgtagaaaattgaaagtttaaacttattaagcatcaggacattaactttaactgctttttaaatagaaatattcctgaaatgtagaatgtttttgtaaattagaagtgttttaccagcctcctaaaaaatctgttgtttgaaaacttgggtcataaaagagataaaatcttaagtgcagagttaagcatcacaagaccagattgacttctagtacctggtgcatcaaacaaaaattctgatattggcagcctgggcaacatagtagaacttcttcccccacaaaaaaaaaaaaaaaaaaactcgag

SEQ ID NO: 321 - DNA, 1650 bp, Homo sapiens
ggcacgaggttcctgctccgcttgaggagaagcgccaagtgcgcatggggacgctatagcaattcgtttgctgtccttcctctccttcgaagatgacaaggcctaccatcgtttcttcctgcctttgggccgtcaggcagttggttgggacccgctccaaccctcggttcttcctgcaatacagtggatacaatttgtcatggctactctgagtgttataggttcaagttcacttattgcctatgctgtattccataatatacagaaatctccagagataagaccacttttttatctgagcttctgtgacctgctcctgggactttgctggctcacggagacacttctctatggagcttcagtagcaaataaggacatcatctgctataacctacaagcagttggacaggggagacggggtttcgccatgtttgccaggctggtcctgaatgcctgacctcaagtgattcaccgcttgggcctcccaaagtgctgggattacaggtgtgagccactgcacctggcctccttaaatgtatctttatggcctaattttcacctttgcacccagttgatattctacatttcctcatttctctacaccgtcaattacatctggtatttgtacacagagctgaggatgaaacacacccagagtggacagagcacatctccactggtgatagattatacttgtcgagttggtcaaatggcctttgttttctcaagcctgatacctctgctattgatgacacctgtattctgtctgggaaatactagtgaatgtttccaaaacttcagtcagagccacaagtcttacttatccgagcccagacattgtataagaagtttgtgaagtcaactggctttctggggagtgaacagtgggcagtgattcacattgtggaccaacgggtgcgcttctacccagtggccttcttttgctgctggggcccagacgtgtgtggaggaacctgatacttcagacagtcagggctgacaagaaggtttacactttgtgtattcacagctgtcattctaatgatcataaagctgactaagccacaggacaccaagcttcacatggccctttatgttctccaggctctaacggcaacatctcagggtctactcaactgtggagtatatggctggacgcagcacaaattccaccaactaaagcaggaggctcggcgtgatgcagatacccagacaccattattatgctcacagaagagattctatagcaggggcttaaattcactggaatccaccctgacttttcctgccagtacttctaccattttttgaaactacaatactggaacatccaggaactggagttattctacgctaatggattggaaagaatgttgggaaaggacatcttaaatcttttctaactatgccctaaactgcagaactcaaaggaaatatagtgccattgttagtagtcattctagatgaattgggagtatctctccagttattcccagattcactagtgatccttaaagtctctattcagggagaggaagacactttccatctcagagatagactcgtgttaccttgatggatattggatttgtctaagtctcttctagaaaaaataaattctagattattaaaaaaaaaaaaaaaaaaaaa

SEQ ID NO: 322 - DNA, 924 bp, Homo sapiens
  SITE (924): n equals a,t,g, or c
gctgaccaggaactgctgagaaggaagggaagaggggcttgaagcagagcatccagcgagaaacctggcctggactgggatccgggaaggcttcctggaggaggtggcaggagccaggatctgaatggtcaccgacgatgagggcgcacctgctgtcctggagcttccgatctctgttcggggaccctgtgarccttctggccggctgcgtgcagagcccactgggcacggtggtcggcctggtgtgaggccccccggggaccggcagtgtgtccagggaggggatggcctkagcccagcggctcctcccgctgagtgtatttcttcccaccactcagcgcatggctgccctggctcacgaggcagtcgggactcgtgacttgctggctgctggctgctgctgcctcgcgcgctggggttccatggaggaactgggcctgccgccccggcctgcacctgctgcccgcatgctggggtcccatggaggaaccaggcctggcgccccggcctcgcccagcggctggtgtgggcagctgttccctgcctcgcagtgtcctggaggcagctgtctcgcagactcagcttggtctcccgcaggcttcagaaaaacccaattgcacgtgtgggattcttccccagcccttgggtgcggggtctctgtgcacttgagagctgggggacccacccaccgtctcccactccaagttcatcccagagcgtgggcccgctgggcacctggcacctggcctgcagatgctgctacgagtgaccagtgctgtgtggaggagccaagggcggcccctgggaaaccgggcttcaacagtacaaggaaaagaaacttgctctgttttgtaagagcgtgttccttttcctcttttttgtcactttaaagaccaaaaagaataaagaaagaaaagaaaaaan

SEQ ID NO: 323 - DNA, 1015 bp, Homo sapiens
ctactggaatccccagctggagctycaccgcggtggcggscgctctagaactagtggatmccccgggctgyaggaattcggcacgagctgaccaggaactgctgagaaggaagggaagaggggcttgaagcagagcatccagcgagaaacctggcctggactgggatccgggaaggcttcctggaggaggtggcaggagccaggatctgaatggtcaccgacgatgagggcgcacctgctgtcctggagcttccgatctctgttcggggaccctgtgagccttctggccggctgcgtgcagagcccactgggcacggtggtcggcctggtgtgaggccccccggggaccggcagtgtgtcagggaggggatggcctkagcccarcggytcytcccgytragtgwatttcttcccaccactcagcgcatggytgccctggctcacgaggcagtcgggactcgtgacttgctggctgctggctgctgctgcctcgcgcgctggggttccatggaggaactgggcctgccgccccggcctgcacctgctgcccgcatgctggggtcccatggaggaaccaggcctggcgccccggcctcgcccagcggctggtgtgggcagctgttccctgcctcgcagtgtcctggaggcagctgtctcgcagactcagcttggtctcccgcaggcttcagaaaaacccaattgcacgtgtgggattcttccccagcccttgggtgcggggtctctgtgcacttgagagctgggggacccacccaccgtctcccactccaagttcatcccagagcgtggggcccgctgggcacctggcacctggcctgcagatgctgctacgagtgaccagtgctgtgtggaggaggccaagggcggcccctgggaaaccgggcttcaacagtacaaggaaaagaaacttgctctgttttgtaagagcgtgttccttttcctcttttttgtcactttaaagaccaaaaagaataaagaaagaaaagaaaaaaaaaaa

SEQ ID NO: 324 - DNA, 803 bp, Homo sapiens
ggcaagggaaaatgttacgtgttttcttctttagcttggttgtgggcacttctacagcaaggaccatatcatattcatctttgcatccctggcacatgcatgagaacataagtacttaataaatgcagttgaatggataatgaattagtgttatttatggattagaaaaagcatgtttctatttaagtaagctgtaaaaagtattattgaatatttactgtaaatatatgttcacataaaaaaataacttggagggtctttgtgtccctgggcatattatccatcttccatgggaaagaatccactgtggtttctgaagagtgattggaaaatggattattttgaggattgaagaagtgttctttctgcgttgtcactttgttcaacagtaaaactttattctcaggttcaactcgcattgtaacattttgacagttttttttaatcacctacaatctgtaaagaatgtatatattcttttcagcatctcagtttgaaaagacatgcagttaaacttgaccttttgataatcgctcttacaggtcattgtctgttctaacagcaaattgtaaacatgtgcttcatagatattgtggctctcagtcatcactttgtcctatggtatttattgaatgttcacatactaatggtgcacaggtgtttttttctataaatcttctgactgtcctgtaattcattcttaagctttaacttgaaggtatcgtaattgccggcatttgatgtttagcaataaaagaataaatgtgtaccagcattttatgtttaaaaaaaaaaaaaaaaaa

SEQ ID NO: 325 - DNA, 665 bp, Homo sapiens
atataagctctaaaactctcctgtaatatctctgacccaatttagcaccacttttttccatttcattttttaggactgaaacataaaagaaccagtgtccagaggcaagtgacatatgtcttacacttgtggccatccttcatttcttcataaactttgcttaaaagactaaaattcccaattccttataaaaaatatactcttgccctcagccccagtggccactggcaaagactgttatttcccaatggataagagagcctccttcatcttcttggccatagttgggatgaggtgcgtgtggtcatccacacacttggtcacacaaccgtccagctgctgcttcacctgaagctccttactcccagtatccattgaatctttggctttgttgttgcaatgcatggcgcaccgggccaggtggtgccggaacttctccaactcactggtgagcaaagcccgggcttgagccagaggcacatggcagtgctttgatgtactggtgcacctactgcatggaggcctggctgtcctcacaacagctggtgctgcaccggaacatgagaccctgcatcttccagatgttctctctytccagactyttcaccatggagtccaccacctcctgcacccacagctgctgcagctctgccatggcgtcccca

SEQ ID NO: 326 - DNA, 1454 bp, Homo sapiens
  SITE (668): n equals a,t,g, or c
  SITE (676): n equals a,t,g, or c
  SITE (695): n equals a,t,g, or c
  SITE (705): n equals a,t,g, or c
  SITE (720): n equals a,t,g, or c
  SITE (814): n equals a,t,g, or c
  SITE (821): n equals a,t,g, or c
  SITE (828): n equals a,t,g, or c
  SITE (881): n equals a,t,g, or c
ggcacgaggcaccctacgcaaaatagcggaggtcggcgccaagaaaagcactgcaggttcagggcgcatgcgcatttccgctccttgccggttttccggacctctacgagtggctgccccacaaaatgcctgcttctctgcggaatcctactgttcttcacatgctctctaataccatcttttcatatccactttctcttccatgttgaaaaattaaattgacaggctggattctgcaaagatctttggacatttaagtatcttcgaccggcgcgaaaagaggcggcctgaccttggaagtgggacggggtcctgcagcgggtccttccggcgggtgacattcagccggcggttcggggcgacggactctccattccagaaccatggcccaatttgtccgtaacccttgtggagaagaaccccggcgctggtgaacgctgctgtgacttactcgaaagcctcggattggccacattttggtaactaacgccaaggttgagctggttccttcccaacccctgctgaaatccctaaagctattcaaagcctgaaaaaaatagtcaatattgctcagactggtagcttcaaacagctcacagttaaggaagctgtgctgaatggtttggtggccactgaggtgttgatgtggttttatgtcggaaaaattntaggcaancggggcatcattggctatnatttttgaanaccatgtgtgatcanactgctatctgaataaaataaaaatttgtcaaaactcagtgtttttctcccctcaaaataccccatgaaaaaggtccccaattttcctctttgnaaaattnaaacccnggggtttgtcttttaaaaacacccctaaaattaccccgtctggttttggcccngccaattgggaagggttatatggtggccaatattaacccgggtacctggaattattatgggggataacctttttaatttgaaggtttggatatatatatttaagctttatttccagaacagtgagggttaggtcttgggaaaactataactgccaaagtagaagaaatagtagtaccatatgccaagtgatagagatgaatcatgtcagtagttagaataacatttcaactgttttctttgctaaaatcacagaaagaccctattgacaacatctatgtctgtaaaaatgttagagtacttgtcatcttgaatatagcctccccaagagagaacagggtggtattctaagtatgtttctttgtaacatctttagcagtaggacagagccatacatgtgaaatctgatttttatgtgtgttattcgtttgtctggttttactacctttgcaaaaacaaaataccccaaagatatttaaacaaggttataatttagcatcttccctggatctaaatagtatattatatcctgaaataaatgaaatgattgctataaaaaaaaaaaaaaaaaaaaa

SEQ ID NO: 327 - DNA, 853 bp, Homo sapiens
  SITE (225): n equals a,t,g, or c
  SITE (851): n equals a,t,g, or c
  SITE (852): n equals a,t,g, or c
  SITE (853): n equals a,t,g, or c
gagtggtgtgaggatagctcactgctgcctttaactcctgggttcaaatgatcttcttgcctcagtctcttgaataactagaacatagtagctgaagacatggatgtcatcatctatttctttatattttttgtaacattttaaagctattgcctagtttaataattatttcagtttgtgtatgtaaggacaatcaggcatttaaatttataaaacatgtttganaatctttaaaagttacacttactgactagttgcttgtctgttgcactaacaaaatttattattcatgtttcgggaatwycctctttaggtttygtttgttttttttttcatagtaaattatcccagtacaagtgtctttgtacaaaattttgatttctaagtttctttaaaaatatcaatgccagctgggcccagtggctcacacctataatcccagcactttgggaggtcgaagaggatggctgaggaggttggatcgtttgaactcaggagtttgggatcagcctgagtgacatggtgaaaccccatctctgctaaaaaatatgaaaattagggctgggtgcagtggctcatgcctgtaatcccagcagtttgggaggccgaggtagacggatcacttgaggccaggagtttgagaccagcctgggcaacatggtgaaactccgcctctactaaataaaaaaaaaaattagcctggcatgggggcaagtacctataatcccagctactcgggagactgaggcaggagaatctcttgaacccaggatccggaggctgcagtgagctgagattgtgccactgcactccagcctgggtgacagtgagactgtctcaaaaaaaaaaannn

SEQ ID NO: 328 - DNA, 1117 bp, Homo sapiens
  SITE (800): n equals a,t,g, or c
caaaattccggagctccaccgcggtggcsgccgctctagaactagtggatcccccgggctgcaggaattcggcacgaggtgctgatgagcgagcgggtratgggcaccgagcaccccaacaccatccaggaatacatgcacctggccctgtactgcttcgctagcagccagctgtccaccgccctgagcctgctgtaccgcgcccgctacctcatgctgctggtgttcggggaagaccaccccgagatggcgctgctggacaacaacatcgggctggtgctgcacggggtgatggagtacgacctgtcgctgcgcttcctggagaacgcgctggccgtcagcaccaagtaccacgggcccaaggccytcaaggtggccctcagccaccaccttgtcgcccgagtctacgagagcaaagctgagttccggtcggccctgcagcacgagaaggagggttacaccatctacaagacgcagctgggcgaggaccatgagaagaccaaggaaagctccgagtacctcaagtgcctgacccagcaggccgtggccctgcagcgcaccatgaacgagatctaccgcaacggctccagcgccaacatcccgcccctcaagttcacggcccccagcatggccagcgtcttggagcagctgaacgtcattaacggcatcctcttcattcctctcagccaaaaagacctggagaatctgaaagccgaggtggcgcggcggcaccagctccaggaggccagcagaaacagggatagagccgaggagcccatggctaccgagcccgcgccagngggggccccaggagacctgggctcccagcccccggctgccaaggacccttctccgagcgtgcagggatagagagggagccagacggacagccagccagcggccccgtcaccagggagcccgactgcgggagaagggggcgagcctgcgggcggaagaggaagcaaggccctcttcctccacgtctcaccccaccccacccccgtgtcctcctgggagcctggcctgcctgccccgcagaaggtgtttttgcgctggttcaatgaatagatgatgcagaggcaaaaaaaaaaaaaaaaaaaaaaaaaaaaaaactcga

SEQ ID NO: 329 - DNA, 685 bp, Homo sapiens
  SITE (17): n equals a,t,g, or c
  SITE (28): n equals a,t,g, or c
gggccgctctagaaacnagggacccccngggctgcaggaattcggcacgagcttgtatttgtgtgtttatgtgagttctgtctaagagatcagataagctctggaagcttcatcatctgtacctacatgtaactgtatctgggttacatgggcaggcggtaccaagtcctgctcttcgatggggtggctgagagataaaggttcctgaactctccttgctgtgtatgcaccacatctgtacttcagagaggtggaaaatcatctacaacactgcgtttcttgtggttgtgctgttactggtataaagtcaagtgccttcaatgctaaaggctcagaaatttttcttaaactgatttcatgtcctatgcaagtgttttctacaacctgcataaccagtactttgtaaaacttgtttacgcttcaattgtacatagtgatttttaaagaaatatatagtatttttatttaggtacctccaaacttgaattcgtctgtgtgaagcattgtaaaacgatacatttctcttttgagtaccattacagttgtacagaggttttcactgcttctatttttctactgttactgataagcatgtaacactgactttatcctacatatagttggcatttcaaataaatggcttgtatagaaaaaaaaaaaaaaaaaaaaaaaaaaaaaactcgag

SEQ ID NO: 330 - DNA, 2630 bp, Homo sapiens
gctgcacttcccaggccccaccagccgcggctccggctcgtagcccacagcccactgccggcggctgggcgctgccgaggctcggggcgcgcgcagttggcgtctgccagtgccaagactgtgccgcccccacagccgaggcgcgaaagggggacgcccggcctctgggccgctgccttcgctttctcttcgttgttgcgaacgccgtccgctcaggaggcgccccgcgaccggcgcgatgagtgccaacgaggaccaggagatggaactagaagcattacgctctatttatgaaggagatgaaagtttccgggaattaagtccagtttcttttcaatataggataggtgaaaatggtgatcccaaagccttcttaatagagatttcctggacagaaacatatccccaaacacctccaattctatctatgaacgctttttttaacaacaccatatcatcagctgtaaagcagagtatattagccaagctacaggaagcagtagaagctaatcttggaaccgctatgacctatacattgtttgaatatgccaaagacaataaagagcagttcatggagaatcacaatcccatcaattccgcaacatcgataagcaatatcatctcaattgaaactcctaatacagccccatcaagtaagaaaaaagacaaaaaagaacaactttcaaaagcccagaagcgtaactggcagacaaaacagatcacaaaggagaacttcctcgaggctggaactgggttgatgttgtgaagcatttaagcaaaactggctctaaggatgatgagtagcacttggaatttgagacaaggaaagagcattctttaaagagtaaaactgggttcaaaatctttcattactattttctggtattgaggcgactttttataaaacacaattttttgtatgtttcttacattaaaaaggttgtaagttgaaagttcatgaagagatcttgttgtattaaattattttcacaaacttgccttaataaaaggtgaaaatgttactgtttagtatactttatgaagccccttgagctttataaatggacaggcatggggaataagaatcagtgttaatttaaatgatcttatcctggtggatgtgctrttttcttaaaggagtatgaagcccttttcaaactatcatcccagtggagcggagtactcagtgaacagttactccatagtgcaatccatattaataggcttcttctcttaagtcttcatctcttcttttgcttaattactgaaccgtaaattacttcagagaaatttaaatgctggtatttgaactttatacatgatactttttgtagtttcttttaatttttgaaagatgaactgcttccttttaataaattaatatctatttatacttttctcttgatttgggtcaagatgtttgatcatgagtgctttgagtggtatgtggaataggagaatataaaaacaaatctgccaaatacactagaaagcattttagtaagaaatgctggccctttcttaaaacatttctcttgcatataccaggatgggagtaaaagatgccttaatatttagtttttgtattgttggagacattgattttaataaaatcctatttatctgctgttgtgtgcttttagttgttggataactgaggtctcctaaatggttcaacataaaaccacatttcaagtcttgtttctttttggagtgtcttttcaagtattcaaatgtatttctcaacctgagcatctttttaatcatatacatgggagtcttttaaatgctgaactgttacacatgcttgatttaaaaataataataatagaggaaactattggtctagttgtgccaagaaaagtttctgatgtttatgtgtgatgtacagtgattttgtatatgcgcccagctttaagaacacataaaactattacgtctggtaggaagattgttagtgcctcaagttacacctgtgcagcttgggtctgagttttgatagaacagtaaacatttaaagaagttaagagcagtttgagctgtatccgcggtttttactcgttaactgacttcagctaaatagtttgaattatagagtaagtataattacagcaaaggagttaatctcattttcaaagctgtttctcattttatttcttgaattaatgtagagcaaaacatgttaaaattcaggacmactggaatatggcaacttatgtttcagggttgtgtgtgggtagtatttgtggttgtattggtttgttttttgtttttggagaaacatctgctagtggaataaaatactttgttttgctctgaagagactgaaattgttcaggcttattatggctcatagattacagagaatgatgctagttacatgccaatgaactatttttactctttttatatgaaatgtaaaaatttgtaggggttctggtgatggtggtacctcttattaccttatgtaaaacacttgaacagcctcatcaatattgccgtcatctgtttaacactcccagtatattttctcaatgtctgtttacttaaaattttgtggagtgacataattaataagcaataaagtctgaattatacacagaaaaaaaaaaaaaaaaaaaaaactcgag

SEQ ID NO: 331 - DNA, 677 bp, Homo sapiens
  SITE (53): n equals a,t,g, or c
aactggtggatcccccgggcctggcaggaattcgggcacgagaactgtatggngttggtgatggatgaactgcaaggatcagtgaaacagctgcaggcctttatggatgaaagtacccagtgcttccagaaggtgtcagtacagctcggaaagagaagcatgcaacaattagatccctcaccagctcgaaaactgttgaagcttcagctacagaacccacctgccatacatggatctggatctggatcttgtcagtgactttatgagagtttctgccacaaggtgcccaagaggagaggaatgggaagagtgccccagcacgtggtgactgcgtgatttctgctcgttgcctttaaagrtaactggcaggactgactgtagaacactttgacttttttcaaaaagtgatggaatttgtacatccaaatgaatattgtatagacaattttcccaggaatgtgcaaaatgcttgaaagttcaaacttcttttttgaaatgatcttcagatccagtggcccattcttttatctttatcctgtgaaggtgtttttcaggttttgaaacaatccaaaaatcatttaggaccaagtctaaggaaacattttagtggccaagttggattccgattgtaaaggaatgatactaattttctagcatggctctgaaggtgattttag

SEQ ID NO: 332 - DNA, 858 bp, Homo sapiens
ttttttttttttttttttttttttttttttttttttttttttttttttttttttttttttgaaaagaaaaagagtttacttgaaaaggttcaagggagtcagacttcagaaaaactggataagcaagtgaaaaatataacaggtatttaaagaaaaatataaagaagattaccatgattactaagtttgcattaatttgttcatggagaaaaaacaaaatcttatcacatgatgatcatattcagaaagatcttgcaacatgagctaaataaaagtcaagaataaaatggtgtttgctggggatctgggattataagaaatactcaatgtttcattattttgggaccagaaattgacagggtaacgctgttatttttggttaatcttagggtacaaggtgcttcatcatgatggaaacaaacagggcatgatttctgctttgcttccagaagcataaagcaaatgtcactactacaaaatatagataggatatttcttataactctaatcactgttgtaagtaaataaaaatccaaagtcaaatcatagactctcaattaccatggtttttacacatttctaccatcccttcctggtgcactgtattgagccatactgagctatatttttctacttcacaacttttcacttacgggaagacagctattgtcccccacaccaccctaatgtgggcaagaggaccacttgaccctcatatatttaacactcttgaccctcatatatttaacattcataattatgtattgcctaaatactcactgttgtagtcactgaaatgcctgtgaaataatttttaaaactgtatttacaaaagaaagcctatttctagctcgtgcc

SEQ ID NO: 333 - DNA, 1538 bp, Homo sapiens
  SITE (724): n equals a,t,g, or c
  SITE (889): n equals a,t,g, or c
  SITE (975): n equals a,t,g, or c
  SITE (1008): n equals a,t,g, or c
ggcacgagcaaataatcatctgttgaaaaatatgaagaaaattgtggatcaaaacacaaagcttgctcctgagaccaaggctgtcattcattggattatggatattccttttgtgctttctgccaatctccatggaggagaccttgtggccaattatccatatgatgagacgcggagtggtagtgctcacgaatacagctcctccccagatgacgccattttccaaagcttggcccgggcatactcttctttcaacccggccatgtctgaccccaatcggccaccatgtcgcaagaatgatgatgacagcagctttgtagatggaaccaccaacggtgtgcttggtacagcgtacctggagggatgcaagacttcaattaccttagcagcaactgttttgagatcaccgtggagcttagctgtgagaagttcccacctgaagagactctgaagacctactgggaggataacaaaaactccctcattagctaccttgagcagatacaccgaggagttaaaggatttgtccgagaccttcaaggtaacccaattgcgatggccaccaatctccgtggaaggaatagaccacgatgttacatccgcaaaggatggcgattactggagattgcttatacctggaaactataaacttacactcagctccaggctatctggcaataacaaagaaagtggcagttccttacagccctgctgctgggggttnattttgaactgggagtcattttctgaaaggaaagaagaggagaaggaagaattgatggaatggtggaaaatgatgtcagaaactttaaatttttaaaaaggcttctagttagctgctttaaatctatctatataatgtagtatgatgtaatgtggtctttttttnagattttgtgcagttaatacttaacattgatttattttttaatcatttaaatattaatcaactttccttaaaataaatagcctctnaggtaaaaatataagaacttgatatatttcatnctcttatatagtattcattttcctacctatatttccccaaaaagtttaggaaaggtttaagaatttttgccatccctaggcttaaatgcaatattcctggtattatttacaatgcagaattttttgagtaattctagctttcaaaaattagtgaagttcttttactgtaattggtgacaatgtcacataatgaatgctattgaaaaggttaacagatacagctcggagttgtgagcactctactgcaagacttaaatagttcagtataaattgtcgtttttttcttgtgctgactaactataagcatgatcttgttaatgcatttttgatgggaagaaaaggtacatgtttacaaagaggttttatgaaaagaataaaaattgacttcttgcttgtacatataggagcaatactattatattatgtagtcccgttaacactacttaaaagtttagggttttctcttggttgtagagtggcccagaattgcattctgaatgaataaaggttaaaaaaaaaaaaaaaaaaaa

SEQ ID NO: 334 - DNA, 1085 bp, Homo sapiens
ctgcaggaattcggcacgaggtgcatcttgcccattgatttctaaatgtattaactacttaaattaatcctgaatcttttcccaggcttaagtgggataatgttttattgtagatgcatatttcctggctctacccagtctttctttgaagactttatcatcctattttctgaatccagtggctgactttaatcttctctggaggaactagataatttctagactaatgcttacactcatgatccagattgtaatttctgaactccttcttccaaatagaatcaaaacaagaaaggggaaagcctctcaaagcaactgtgcgttaataatgaaacactctttttttctaatccaaggagggtttcatactttttcttagtttcttgccctcttcccttctgatcaataattgtaataggaaatttgcaattgtgccaatactcagattcaatactgaactactttcttgcattgtaattcaaattccaaggttaacaactagctgtatgtttccaaaacaatcttattgtatatgtattttcttaggtgaagtttccagaaatgattttttttttttgcagagccaaacacacatggtaatttaaaaaaataatgcacgtatgtggtaaaaacagtaaaagcaaggtatcaagtaaaaagtgaagagtcctccctttctcattcccattcctactctctaattttttatatatccattttgtaagctataatacagagattccatatactcttcacatactttccccagtggtaacctcttgcataactataggacaataacacactataggacaaaaatcaagaaattgacattgatacaatccatctccaaaaaaagaaaaaagaaaaagccagacatggtgatgtgtgcctgcagtcccagctaattgggaggctacagtgggaggatcccttgagcctgtgaggcggaggttgaagtcagctatgatcacgccactgcactccagcttgggcaacagagccagaccctgtctcaaaaaaacaaaaacaaacaaaaaaaaagaaaaaaaaaaaaaaaaaaaaaaaaaaaaaaaaaaaaaaaa

SEQ ID NO: 335 - DNA, 1046 bp, Homo sapiens
ggcacgagcttatttgttgctagtggcaatgtcagctactactgacaacattatttgaaaggcaatagtgtgtatcaggacctttaaaatatatggacatatttatcctttaagtctaaccttcatcctttcttcataagttttacaaatactgtatgcatttctgtggtaggtaagtgataaacttactaagcttaaaatgaacagaatcttagatgaggtttcttttcattttctgtttttaagaggagttgctttggtttggcctctaaacaagaagagcacaaatcttgctgcctacacagttgatatttggaactattctagtggttctatttaattttcaaaaccgggttatgaaatggagaattaaccactttttacagataaggaaacaagattagaagtattttacatgtggttttagaagggtgtttactgaatgaactgttttataagatgtattactgctggtctcatgttttattatcatactgtacccctggtggaaatcaacctaagaaactcttttgtatttaaaaatggaaataattactgtgcctttgaattgaagtaatctacaaaagaaatgtggtccagactttagactttgttgggactgtgatgatcatttctggcttttggcaatctggatctgaacctttggttttatttagctttccagttctcagggaacaatagaaaccagtcttcaggatatcgacagcagattatctccaggtggatcactggcagacgcatgggcacatcaagaaggcactcatccgaaagacagaaatgtagaaaaactacaagtcctgttaaattgcatgacagagatttactatcagttcaaaaaagacaaagcagaacgtagtaagtaaaatttgctatttgttaatttaataaatccctcttagtaattagttataattcagttaaattaatttggtatatctgtaagggtagcttcttaagctgtttttttcagagatgtgattctgtcaggaaaaaggttgattgtgtttaaaaaaaaaaaaaaaaaa

SEQ ID NO: 336 - DNA, 1422 bp, Homo sapiens
  SITE (44): n equals a,t,g, or c
gttgtggatgcgcggagaggccggcagcggtggcagcggcacgnaggaggaagctgagcagggcggcggcggcggtggaacctgcggggctggggcgcgcgccatgggccgcctgcactgcactgaggacccggtgccggaggccgtgggcggcgacatgcagcagctgaaccagctgggcgcgcagcagttctcagccctgacagaggtgcttttccacttcctaactgagccaaaagaggtggaaagatttctggctcagctctctgaatttgccaccaccaatcagatcagtcttggctccctcagaagcatcgtgaaaagcctccttctggttccaaatggtgctttgaagaagagtctcacagccaagcaggtccaggcggatttcataactctgggtcttagtgaggagaaagccacttacttttctgaaaagtggaagcagaatgctcccacccttgctcgatgggccataggtcagactctgatgattaaccagctcatagatatggagtggaaatttggagtgacatctgggagcagcgaattggagaaagtgggaagtatatttttacaactaaagttggtggttaagaaaggaaatcaaaccgaaaatgtgtatatagaattaaccttgcctcagttctacagcttcctgcacgagatggagcgagtcagaaccagcatggagtgtttctgctgatttctgtccctgcatctcccctrgccccgttccctgccctcctcccttccctgggtgactgctctgagaggcacttcactcacaggcctgtgggatgctccatggggccctgctggctccatggggcccaggtgcaaagggtttctgaaaaacagcaggattaagtactgaaagagcccaacacaattaccctgtaaactctctgttagggcaaccaccaccacctgtcttccaggacacatttttagatactctgacaggccactgcatctcagattcaggggagaaaataagttgtcacctccccttcaaagttccagagtaaacaaatggtgccatcattcaagataacatgctgatcaccctcctcccaaaaagcaagagcttgtttatggctgaggaatcggcggattgtctgaatgacacatatacagagcccccacggatttctgcacactctgggtctgtgctggtggaacattgccaatcagttcttaatgaggcacctgtgtgtaaatacatgcttggtcttctctgcagagaactgaggctaaactctgtccctacttctggttttgccctgtcatgtcgtaacgaggtgggccttttgaggccattttagtttgagttcgagccaaccacctctgttggttagatgatgaataaaaaggttctgaagaaaaaaaaaaaaaaaaaaaaaaaaaaaaaaaaaaaag

SEQ ID NO: 337 - DNA, 419 bp, Homo sapiens
ggcagagcatgaacttgcgtctagtttctgttccctctcaaattgcccaggctgtcctgtgagtgacagcagctatttcgtgggcctcctctggaatcatgagaagtcacccaaacaatctcagttttctagctcactccgtcttgacatttctacactgtcatccttggttttcttggaaattaatttgcttttcttcattgtctttctttggagctgctttccttttgttggttactattttatttttagcttctcacaccataccgacatatgttggttattcttttagacatgttttttgttgttgttgtcacctggaacttttgtatcttgaataaatttggggatcaaatacaaaaaaaaaaaaaaaaaaaaaaaaaaaaaaaaaaaaaaaaaaaaaaaaaaaaaaaaaaaaa

SEQ ID NO: 338 - DNA, 1691 bp, Homo sapiens
ggcacgagcctaaattctatttctgtcatttcagccagctcagcctggataaacactcttgttagagaatttgtatggtcatttggagcacatatgacactctggccgttttaatttttggagttcttgcgttagttctttctcatctccatgtgtgggtgttcctttaactgccatatagattgagtacagtcaatagatttctggctgttttcactaggctgaggccttgtgcagggtctttttttgaagctgacttcttgtctctagtttcagaggtgagtatgttagtgaggtattcttggtgttgaagctttggggtgtgatccagtaggtggcacttaggcttattggtcaactggtagactcttgctcagttgtgtggctcctctgtgttttctcatagttacagctgtgttcactctcaatgctctgaaagtgtgggttcctctcccccttcagtgccagctgtatggctacagattgtggtttgacactcctggctgcccactgcagctctggggcaatgtcagtgtttacgttccttcctcaacttggcggcaacagaggaaaggaccttagtagtggttgtggtcaagggtcttttgcttgtatcctgggagctccacaccagagagatgtaggtcagcaattcctcagtgcaatcaccccaggatgaagggtctgtgctgtgggctcaagccaggggttctctctggtgatgagtgggggttgggggtgtgggaaccatgggagacagactggcctcctcttcttgggttgattgcagcttgttggaggtataaataaggtacttagggtcttttcttcttcattagtctgagggtagcaagggcagttctactgcagagacagtggcagagaggctttcaggaacagtatttattaaccatcctcacctccctacccgccccacccctattacactacccagcctctggtagccatccttctactctctattttcatgttttcaattgttttgatttctagatccaaaaataagtgagaacatgtgatgtttgtctttctgtgcctggcttatttcatttaacataatgacctccagttccatccatgttattgcaaatgacaagatctcattcttttttatggctgaatagtaatccattgcagataagtgccacattttctttatccattcatctgtgaatggacacttaggttgcttccaaattttggctgttgtgaatagtgctgcaacaaacatgggagtgcaaatatattttctatatactgatttcctttcttttgagtatatacccagtagattgttgggtcatatggtaactctatttttacttttatgagaaacctccaaactcttctccatagtggttgtactaatttacattctcatcaacaacatatgagggtttccttttctctacctcctctccagcatttgttactgccctggtgttattttgcttcttaagtattagaactatacttagtgttatatgttctgtgattataagtaaaactgcctttgctatatagtatgcatagaatattttaaagttattactagaagctgacacattgttgttttctattacaaacaataaaattagtttccatttaaaaaaaaaaaaaaaaaaaaaaaaaaaaaaaaaaaaaaaaaaaaaaaaaaaaaaaaaaaaaaa

SEQ ID NO: 339 - DNA, 1744 bp, Homo sapiens
ggcacgagcaggcgccgggcgcactgtcctagctgctggttttccacgctggttttagctcccggcgtctgcaaaatgaagattgaggaggtgaagagcactacgaagacgcagcgcatcgcctcccacagccacgtgaaagggctggggctggacgagagcggcttggccaagcaggcggcctcagggcttgtgggccaggagaacgcgcgagaggcatgtggcgtcatagtagaattaatcaaaagcaagaaaatggctggaagagctgtcttgttggcaggacctcctggaactggcaagacagctctggctctggctattgctcaggagctgggtagtaaggtccccttctgcccaatggtggggagtgaagtttactcaactgagatcaagaagacagaggtgctgatggagaacttccgcaggccattgggctgcgaataaaggagaccaaggaagtttatgaagtgaagtcacagagctaactccgtgtgagacagagaatcccatgggaggatatggcaaaaccattagccatgtgatcataggactcaaaacagccaaaggaaccaaacagttgaaactggaccccagcatttttgaaagtttgcagaaagagcgagtagaagctggagatgtgatttacattgaagccaacagtggggccgtgaagaggcagggcaggtgtgatacctatgccacagaattcgaccttgaagctgaagagtatgtccccttgccaaaaggggatgtgcacaaaaagaaagaaatcatccaagatgtgaccttgcatgacttggatgtggctaatgcgcggcccaggggggacaagatatcctgtccatgatgggccagctaatgaagccaagaagacagaaatcacgacaaacttcaggggagattaataaggtggtgaacaagtacatcgaccagggcattgctgagctggtcccgggtgtgctgtttgttgatgaggtccacatgctggacattgagtgcttcacctacctgcaccgcgccctggagtcttctatcgctcccatcgtcatctttgcatccaaccgaggcaactgtgtcatcagaggcactgaggacatcacatcccctcacggcatccctcttgrccttctggaccgagtgatgataatccggaccatgctgtatactccacaggaaatgaaacagatcattaaaatccgtgcccagacggaaggatcaacatcagtgaggaggcactgaaccacctgggggagattggcaccaagaccacactgaggtactcagtgcagctgctgaccccggccaacttgcttgctaaaatcaacgggaaggacagcattgagaaagagcatgtcgaagagatcagtgaacttttctatgatgccaagtcctccgccaaaatcctggctgaccagcaggataagtacatgaagtgagatggctgaggttttcagcagtaagagactccccaggtgtgcctggcctgggtccagcctgtgggcgcttgcccctgggcttggggctgccgtccccactcaggcgtggtctgcagcgctgtcagttcagtgtggaaagcatttctttttaagttatcgtaactgttcctgtggttgctttgaaagaacccttccttacctggtgtgttttctataaatcttcataggttattttgattctctctctctctctctctaagttttttaaaaataaacttttcagaacaaaaaaaaaaaaaaaaaaa

SEQ ID NO: 340 - DNA, 957 bp, Homo sapiens
gagattaaggccttttccacacgcattaatagtcccatttttctcttgccatttgtagctttgcccattgtcttattggcacatgggtggacacggatctgctgggctctgccttaaacacacattgcagcttcaacttttctctttagtgttctgtttgaaactaatacttaccgagtcagactttgtgttcatttcatttcagggtcttggctgcctgtgggcttccccaggtggcctggaggtgggcaaagggaagtaacagacacacgatgttgtcaaggatggttttgggactagaggctcagtggtgggagagatccctgcagaacccaccaaccagaacgtggtttgcctgaagctgtaactgagagaaagattctggggctgtcttatgaaaatatagacattctcacataagcccagttcatcaccatttcctcctttacctttcagtgcagtttcttttcacattaggctgttggttcaaacttttgggagcacggactgtcagttctctgggaagtggtcagcgcatcctgcagggcttctcctcctctgtcttttggagaaccagggctcttctcaggggctctagggactgccaggctgtttcagccaggaaggccaaaatcaagagtgagatgtagaaagttgtaaaatagaaaaagtggagttggtgaatcggttgttctttcctcacatttggatgattgtcataaggtttttagcatgttcctccttttcttcaccctccccttttggcttctattaatcaagagaaacttcaaagttaatgggatggtcggatctcacaggctgagaactcgttcacctccaagcatttcatgaaaaagctgcttcttattaatcatacaaactctcaccatgatgtgaagagtttcacaaatctttcaaaataaaaagtaatgacttagaaaaaaaaaaaaaaaaaaa

SEQ ID NO: 341 - DNA, 1032 bp, Homo sapiens
ggcacgaggttaattaactgctctgtgctgtagtttctccatctgtaaaactgtcaaggtagtagtacatgtcattaggattaagtaaattaagctatgtaaaacacagataacattggatgacaccaatggttaggcagcagatacatttattagtaaagtgcaatggaaattttcctcttgctggataagagtaaactaatgattagacttgaggatggcttaactaagaaagaaagtgatcaagaaggtaagagtagtaatgattggttttgagaatttaattttctgtgcttatcatggaataaatttagctgaattaaaatgcattataattacaagagttaggatatcttaaaatatctagtgaggctgtataacctagcaagatcaaacaaactcattgctattggattttaagaaattggattgtcaagaagataagtaatcaatatggcttggctgtgtccccacccaaatctcatcttgaattatagctctcattattcccacatattgtgggagtgacctggtgggagacaactgaatcatgggggcagttttccccatactgttctcgtggtagtgagtaactctcacgaaatctgatggttttataaggggaactcccttttgcttggctttcattctgtcttgcctgctgccatgtaagatgtgcctttcgccttatgccattattctgaggcctccccagccacgtggaattgtgagtcccttaaacctctttttgtttataaatcacccagtcttgggtacatctttatcagcagtgtgaaaatggactaatacagtaatcttgcaagcctgcacaaacttgcgctttgtataaaaagccacaataataaaacttgttgagaatatcctaccaaaattactatgaaagttatctctcccttttactatgagcagaggtggcccattagaataatatgattgtctctggattatgtataataagaaaatgtgtgtatacaaataaaatgcatttattatgaagtaaaaaaaaaaaaa

SEQ ID NO: 342 - DNA, 1390 bp, Homo sapiens
ggcacgagggagtctgatggggagaagaagtacccatgccctgaatgtgggagcttcttccgctctaagtcctacttgaacaaacacatccagaaggtgcatgtccgggctctcgggggccccctgggggacctgggccctgcccttggctcacctttctctcctcagcagaacatgtctctcctcgagtcctttgggtttcagattgttcagtcggcatttgcgtcatctttagtagatcctgaggttgaccagcagcccatggggcctgaagggaaatgaggcagctgctgtgtccccacggaaacaaccatctggggactgctgggaaatgctgtgaatgcggagggaagtgatgtttgggttctgtagctgagagatttttattcatttttaactgccccccaaccccactccaactccttctccaccacccattctcccaatggtctttagaaatagattttcatctgatattctgcagaaatatcaatgagacttggtatgggacaggggcagaaaacactacataggcctccaaggcaaaaccagtcccagtttctttaatgggaagaagctggaattcctggtgctcaattcttagtgaccccaatcctatacccaaatctatgatattctgggacctcagtgattttggtcccctcccacttctctagttcgtcatcctcccttcccatatccttcaaaagaaccacactagggtctccacctacttatacaatgcggatgcccaactgtttttaaggaagccagaagcatcccatggaccatggggtgagtgtcctccaagagccccctgagctcagccctctgcctggagggctccagacctttctgagccctgcttggaggcgagcattttcactgctaggacaagctcagctgttgaggacacccccaccccaaatttcagttcttacgtgattttaaccattcaacatgctgttgggttttaattctctaattattattattattgttattattttttaggaccagttgtagtgaattgctactgaaagctatcccaggtgatacagagctctttgtaaaccgcagtcacacattagggttagtattaaactttgtttagatgtaccataattaacttggctagttgattgtttgaagtctatggaagaaatagttttatgcaaaattttaaaaaatgccagtctggtcagggaagtagggggtttcaatgctgttgggaaccaggaaggtgggacagccggcaggtagggacattgtgtacctcagttgtgtcacatgtgagcaagcccaggttgaccttgtgatgtgaattgatctgatcagactgtattaaaaatgttagtacattaaaaaaaaaaaaaaaaaaaaaaaaaaa

SEQ ID NO: 343 - DNA, 1590 bp, Homo sapiens
ctgcaggaattcggcacgagcggcacgaggttctgtcctcacctcactctggtactcgcctcttggggcggctcagcccattcatggggatggcaccaagcggccatgctcagtcttccagccccgctgagggtaaaccgaggcctctggcagctgtgcacaggtgctggcctctggctccttcaaggagcactgcctgtcactcgctcctgggctgtctagccatgtctcccacccccactttaccgcagccagctgctgggatcaaagcaagtctgttcttatgttatttgcctgtatgaaatcatttctcattttatcacaattccttcaactcagcttactcgcgtggctgcctgttcatatttgaaagcagccaccgtgctgtggctttggtttggaaaagcatagcacgcacttcccttggttttcccttcccagagccgaccgcagctggtcagccctctcttcccgctcctgaacctttacttactgactttgagctctgtgactccgtcggttctcgcaggaattaactaacttaccaattggttcaatccacttgagcgccatagctctgagctcctctgtgtgacatgccacagatgactattgcacacctgggwcctgccccagcaggccatgcccctcccatgtgccgtgcctgttgctgcagctgccccccgaccccgccactggctgcaggaattcagcctttagaggcagaggcagctgcagcggcccctgaggtcaaaccccagtgtgactgcatagcagtgttagctggttggtttcaaactactggattccaggcaaaggcctacagattgaccttattatttttgaaaatatgttaagggttttttcatagagagagaaagaatggatttttttttaactgggaacctcctgattcttacggaaaattatccttctataagaagataccagagagatttattcaaggtaatttgataacctaaaatcaattctccattttttatcatatgtgggatttgttgctaagtcgtgttcaacaatagcttttatgttcctaacatatctgaaagcttatttatgaatggatatactggattattgatatactgattttttttttaatggggacatttgccattttcttcccagaaatatgtaatcccctggctgactaggactgttaaacatagtgtggactggatgatgccttcgacaaaccagagaagccaagttggggggagctggtgcctggagtgggccctgtgcacctcacctggcggaggctgggggggctctgtcagcaggaccctagaggagactctcattcgattttaaagaagcacaacgggtcattttcctttgtatgttcctagcgcagaactgtttctaaaacaacttgaagtatagttttgttatctaagcaatttttgttttaagtaagtaagtgtactagaatgcgaagccgttatggttcaggtttttaaaaactggtacagtattgtatytgtctcatctgttgcactgtatttcaatcatctgtaattaaaatgatcatatgtttaaaaaaaaaaaaaaaaaaaaaaaaaattt

SEQ ID NO: 344 - DNA, 1461 bp, Homo sapiens
gctcgtgccgcgaagtgctgggatggcaggcgtgagcacctcacctggcccttttctgcgttatttgcccgcctgcctgcctgagctcacttgcaggccgaggaagatgcttacggaagtcctccttgaggtagccccagcctgagatcaggcacttcttgctgggtgggaagatgtgtgtggcagccgggaggcacacgggctggatgtgccggccgaaaggcagagggctggtcagctccagcacagccacgtcaaagtcggccgtgtccgcgttgtacagggggtgcttgacgatctggaccacctgggcccgcacggtgctggcctccgarccgctgaggtaggtcgcacccacgtaggccacccacttcgtcgggtcttggaacctgcaggagcagaccccagctcagaagccaccgagggtcagagccgtcgggggaggcagacgggacactcgccttgggtgcaaaatgtaaggggtatccccccacattaatatttatgaatagtatttataaaaatcaggccagacacagtggctcatgcctgtaatcccacacttttggaggctgaggcgggaggatcacctgagcccaggagttcaagacgagcctgggcaacatagcgaaacacagtctttaaaaacaacaacaaaaaacaggccaggtgcggtggctcatgcctgtaatcccagcactttggggggctgaggcgggaggatcacgaaggcaggaattcaagaccagcctggccaagatggtgaaaccccatctctactgaaaatgcaaaaattagccgggcatggtgatgggcgcctgtaatctcagcctyccaagtagctgggatgacaggtttgcgccccctatgctcgactaatttttttgtgtgtttttagtggagacaagtttcgccatgttggccaggctggtctcgaactcctgacctcaagtgatccccccacctcagcctcccaaagtgctgggattacactcatgagccacaagctcactatagcctgtccaagtatcaacattttaaacaaagacaggatgagacagagttgggattagggtgaggggagccagccatgagccttgggcacaaaatttaaagagttgccaaaaatctcagccatcaagataaatgatatcgagccgggtgcagtggctcacacatgtaatcccagcactttgggaggcagagacgggcagatcacttgaggccaggagttcgagaccagcctggccaacatggcaaaaccacgtctctactagaaatacaaaaattggccggccatggtggcgggtgcctgtaatcccagctactcgggaggctgaggcaggagaatcgcttgatcccgggaggtggagcttgcagagagccagaactgcaccactgtactccagcagggcgacagagtgagactctgtctcaaaaaaaaaaaaaaaaaaactcgag

SEQ ID NO: 345 - DNA, 1651 bp, Homo sapiens
cggcacgagcggaccaccagcccccgaaatgataccttcctcggctctacggagtgcaccttgggccagattgtgtcacaaaccaaggtcactaagccattattgctgaagaatgggaagactgcgggcaagtccaccatcacgatcgtggccgaggaggtatcaggcacaaacgactatgtgcaactcaccttcagagcctacaagctggacaacaaggatctgttcagcaagtctgaccctttcatggaaatctataagaccaacgaggaccaaagtgatcagctggtctggagaactgaggtggtgaagaacaacctgaaccccagctgggagccgttccgcctgtccctgcattccctatgcagctgtgatgttcaccgacctctcaagttcctggtgtatgactatgactccagtgggaagcatgacttcatcggcgagttcaccagcactttccaggagatgcaggaagggacggcaaaccctgggcaggagatgcagtgggactgtatcaacccaagtatcgggacaagaagaagaattacaagagctcagggacggtagtgctggcccagtgcacggtggagaaggtgcacaccttcctggattacatcatgggtggctgccagatcagcttcacggtggccatcgacttcaccgcctccaatggggacccgaggagcagccagtccctgcactgcctcagtccccgacagcccaaccactacctgcaggccctgcgtgcagtgggaggcatctgccaggactatgacagtgataagcggttcccagcttttggctttggggctcgaatcccccccaacttcgaggtgtcccatgactttgctatcaactttgacccggaaaatcctgaatgtgaagaatctcaggggtcatcgcctcctaccgtcgttgcctgccccagatcaactctacggccccaccaatgtggcccccatcatcaaccgtgtggctgagccggcccagcgggagcagagcaccggccaagccacgaagtactcggtgctgctggtgctcactgacggtgtggtgagcgacatggctgagactcgcactgctatcgtgcgtgcctcccgcctgcccatgtccatcatcatcgtaggcgtgggcaatgctgacttctctgacatgcggctgctggatggcgacgacggccccttgcgctgcccccgaggggtgcctgcagcccgagacattgtccagttcgtgcccttccgagacttcaaggatgctgccccctctgcactcgccaagtgtgtcctggctgaggtgccacggcaggtggtggagtactacgccagccagggcatcagccctggggctcccaggccctgcacactggctacgactcccagccctagcccgtgactgcctccctccggaccgacactccctcagcctctcagtgcctgtcctgaccctcgtgactccagtgaccaatgcctccacctcttggaccaggtgtgccccctgggttctggacgtgagtggtgggtcctgctcctatctctccaaaccccatacccttcaatgctgtggcccctcagtgacttccttgggtgatcctgactttctagccattaataaagagaactgctcctagcacctcagcctctaaaaaaaaaaa

SEQ ID NO: 346 - DNA, 1720 bp, Homo sapiens
ggcacgagcaactctccaggaggttgggagggtgcccgcttctctgctctgtgcccattagcctcgccgcacaccctaggaccattgactttggaggaggttgggagggtgcccacttgcccactcctccgcagacagccctggcttcacctcagcgccacaggtctacaccggacccctgtgcctaggtctgtggcggctgcaaacatcaggacctgcttcctgtcagcacgtggagtctcctgtgctcatggcatctgctggcagtgagcactggccatgtggctctgagccccaggctttcgggcatgacaggcgggcagtaggacagcgcagtctgtccccttgcacgcgtcagggtccgagcctttcgccattgcactccagcctgggtgacagggagagggactctgtctcaaaaaaaaaactgaggtcagggagggtgagatgacggtgagagctcggacttgaacgcaggtcccacccagaacagcagccctaactctgagcaaggtctgtgctgttcagtagctctattgagatgtgatttccacactgtgtaattcattcacttacggtgtacagtccagtgggtcttagcatgctcggtgttgacagtcacatcgtcttcacccccaaaaggaaaccccgtgcccatgagcagtcgctttgtctgcccctcgtccccagccccaggcaaccacaaatccatgctctgtctctgtagatttgcctgttccagacgtttcacagcaatgggccttttctgcctggcttctttaacgttgcatcacatcttcaaggtccatcccagctgcagcgtgtcagtgcctcctggcttttcactgctgagtagtgcccgttgcatggacagaccacgttgtgctcacctgtttgccctaatgggcccctgcttggtgctttccacctttgggaggctgtgaatcgtgctccagccacactctgacccccgcccggctccaagagatgacaggattggcagcttcctcaccaaccagggactctgtggcctgcgcatccgccatcctgttggctgtggtaccctgtgctcaaccgtggcctttgtgctgcctcgcctgctgcacagccaccccctgcagcacccacctagagggcactggccaggagtctgtttcccacgagaccgtgaggcagtcctttctcataccacgatggaggccgagtcactgtgcgctccacgatgaggctgcaagtcactatgcgttccacgccctccgtgcactctgggctctgccaccctactctgcagggtgctggtcatctgggcatcgccgagctcaggctggcacgacaggctgctcttgggagtaacagaccttttggtgcctttccagagccttaaacgtaatgcgtataagaaaggcagggaggccaggcacagtcactcacacctgtaatcccagagctttgggaggccagggcaggaggatcacctgcgcctaggagttcaagaccagcctggtcaacatagcgagaccccatctctacaaaacattttataaaaaaattaggcaggcatggtggtgtgcacctgtaagtcccagctacttgggaggctgaagtgggaggatcacttcagccgggagtttgaggctgcagtgagctgtgagcacaccactgcactccagcctgggtgacagagtgaggccctgtctcttaaaaaaaaaaaaaaaaaaaa

SEQ ID NO: 347 - DNA, 1247 bp, Homo sapiens
gataatgtgagcaatctccagccacatacagaagtatagaagaatctcacaagtacaatttgagttaaaaacaaaaacccagacctaaagatatacatactctgtgactccaaatttaataattgctcatagaagtcaaatagaggttaccctgtaagaatgggttggtgactagagtgagcacacccagattctggggtcctagtcatgctctgtgtcttgacctaagtatacaggtacatgtaagtttgtgaaaatgtaacaagctgtatgatacgatttttctaatattgctcatctgtgtttgaaacatatacttcagaaaatgttaaggaaaaaatagaaaaggaaaagaaaaatagaaaacctaaataatctagtacttattaaagacttgaacccgtcataaaaagcctttccacaaattaaatactaagccaagcagacttactaaattctaccaaaagctaagaagctatgtcaattttatacaaacttttcaactaatttatgagcattaatttgatacccaaacctggaagggactatataggaaaggaaaatgataaagtcagtcttaattatgactatagattgcaagaacccttaccaaaataggagcaaattgaatcaaacaatttttttaataaggcaaaatgtaacaaccaagttgggtatattcctggtatgcaacactgctgcagcatttaaaaactaatcagttatggagctagagggaagatggcagagtaggaagctctgggaatctgtctccccacccagacgacaactgcactggcagaatctgtctgatgttactatttcggatctctgttcaccatttttatcaggttgggaactctgaagtctattgaaggcttatgacttccaggggaaggtttgaaaggttaatttcagctcttaacatggtagcaactacctgttcgtctaccctcagtcccatagcatgtagccatgtacacattttcaagcagctttgcatagggtttgtgggagccagtgtggacaataaggattctgtcctccaaatagcaggaatctttgctctgatagctaattactgcttctgatcatggaggtgcagccatacagtgagccattgktgcaaaccccactgscactgktacaagcccctccacttgaggctgaagtgacttaaagatttaaagggccattgccttcagtggtgattagtgaggagaaaaaaaaaaaaaaaaaactcgaag

SEQ ID NO: 348 - DNA, 1830 bp, Homo sapiens
ggcacgagaggaacttaagaatttaacagaattagaagatgaacatttggcaaaaagggcaagacaaggtgaagaggataatgagtaagtataccaaatgcagggtttttttaaaccatgaactttatcatgttacattcctgcttgtaaaactttcagtggctcttcattgccaacaaagccctgcgtgatatttacctaacctcttcagccatattgaatgttctttattccccaaagagatcaaattctctttggctgtgcctttgtatgggtggttttattgagttagagtggcatttccctttcacaaactcccacacagccctcaagaatcagttgaaatgttactgcctttattaggcctaagacccctttttaaatgtttccttagcttctagttacagatatttgttataatccttatcatatcatatggcattgaaattatttgcttacttgtttgcattaccaacagtactgtctcattaccttctttttctgccctaatacaatatcagatatataaaaaggtgctgattaattttgtttaagaaatagtattgagagtttaaaaaatagctttattgaggtataattgacatcagtaagctctacttttttttttttttttcttttgagattaagtctcactctgtcactccagcctgggagatggaacaagaccctctctcaaaaaaataaaaaaataaaaataaaaggttttatttaagactttttttctcccttcttctctagatataattgaccctgcaatcctgcgcccgggccgcctggacaaaacactgtttgtgggtttaccgccccctgcagatcgccttgccatcttaaaaactatcacaaaagtgagtaaaggaaatggtatatttttgtatatgtttctcttgttttaaatagagacagttataagaggtagtaattttcgttgactgattactttcttttctgtagctgtgtttgcccagcctatatctcccaaagggaaggtgaactgatcttcgattattactttaaaataatttacatcagatcatatttgaaatggagtagaaacttttggagaaactggcactttgggagggcgaggtgaacccaggagtttggtaccagcctgggcaatatactgagactctgtctctacaaaagatagaaaaaattagccagatatggtggcacccacctgtgggaccatgtactcggaaggcttaggtggaaggattgcttgagcccgggaggctggagtgcagtggcgtgatcttggctcactgcaagctctgcctcccgggttcacgccattctcctgcctcagcctcccgagtggctgggactacaggtgctcgccaccacgtccggctaattttttgtgttttttagtagagacggggttttaccgtgttggccaggatggtctcgatctcctgacctcgtgatccacccgcctcggcctcccaaggtgctgggattacaggcgtgagccaccgcaccagaccccgcaagaccctatatttaaaaataaataaataagtgggccaaacacgttggctcacgcctgtcatcccagcactttgggaagccaaggcaggtggattgctttgacctcaggagttcgagatcagcctgggaaacatggggaaaccccgtctctacaaaaaatacaaaaattagctggacttcaatggctcatgcctggctgaggctggagaatcccttgagcccaagaagtggaggttgcagtcagccaagatcgtgctactgcactcaagcctgggtaacagaccaagaccctctctcaaaaaaaaaaaaaaaaaa

SEQ ID NO: 349 - DNA, 977 bp, Homo sapiens
ggcacgaggacgggccgagcgggtcggggcttgccgtttgactggaattgccagaatggcggaccgagccccacgacaacctacctccctgggctcctcgccgcagcgctgcggctcgcctccctctgctcctcctcctccgccggatcgcggcgagcggatcgaggactgcctagcgcccctctgcccaccggtggttggaggccgcggcggctgcgcgttgagtcgtttcctgccggttgacctgagcctacttcgcagtagcaggaccgctgctgtggagctggtcgcaggcggtgtgtgccggtcgcctagtcaggagaactagtcctcgactcacggtgagggaatggacgacacgggtattgtaccgctgagggaaaggagcgggactccggacctccaggaggtagggagtgaggccagtaagaccggcgcgcctccggggggattcctccccgggcgttgagttgcccaacctgggacccgaggaaagatccggcgtggtggtgtgctttttgttgttgttaaccctcctcggatttctcgaatttcacaccactgtccatatgcgatgatgtttgtttgccccttgacgcacttactcatggatggtacttcttcagcctcgttagacagcctggtgatggaggatgaagaaaccatgtgcttttcattcagttctggacttagtctcccttttcttccttcagcaagttatttttgttagttccttatcaaaaagtgtacataaaaattaggcaactccaaacatgcctccagggttaatgtgtgaaataataagataatatatgtaaagtggaattagctcctaggcatagggaaagtgcagaatattgccgtgttgtcatttacagttctgttgatgtcgataacgtttgtgggtgtaattggtagtgttctgtccctccaaggagttaataaaacaaagcaaacataaaaaaaaaaaaaaaaaa

SEQ ID NO: 350 - DNA, 1893 bp, Homo sapiens
  SITE (1842): n equals a,t,g, or c
gagcagacggctatggttttgtgtttgtctcttccaaaactcatgttaaaatgtaattgccattgtgatgatagtgggagatgggacctttaagaggtgtctaggtcgtgaaggctcttacttcatgtacggaccaatgccattattgtgagagtgggttttgccctgtcttgctctgtttcatgccctttctttgcacttctgtcatgcgatgccttccaccacattatgacacagcaagaaggccctcacaaggtgccagcaccttgatatttgacttccagcctacagaactgtgagtcaataaatttctgttcattataaagtagtcaatctcaggtattctgttacagcagtacgaaattgattaagacagctaatttattcaattaggcagaattcatctgcttatatgcaagagtagccaggggttcyctctttatacacataccttaaaggatgggttatcctgaaaagcagatatgaagaattgtgaaaaagagctatctcaacagttagctgtggagtgtataatttaatacaaataaatacaattgtaaacgttcatgtatakttcagttaggkttttgttttgttttgttttgttttgtttttttgagatggagtctagctctgtcacccaggctgtagtgcagtgaccgcgatcttggctcactgcagcctstgcctcctaggttcgggcgattctctgcctcagcctcccgagtggctggtattgcgggtgcccaccaccacgcctggctcatttttgtatttttggtaggacggggtttcgccatcttggccgggctggtcttgaacttctgacctcatgatccgcccgccttggcctcccaaagtgcagggttacaggcgtgagccactgtgcctggcccatagttcagtttttaaaatgcattcagacttcaattccaaaccgaatgactcatttaaatgttgttcacattttgttgaataatatttttaaagcagtaacaaccgtatatccagttggcctacatttacttctgaattcaagaagaatagctcataccataaatgacaaagagcagcacttacaattggcaacatactgaagtcactcactctcaactaaaagatatgatcatttctagtatagctttttacttttctttattttctttcttccttttttctttctttcgttccttttttttctagaaacatttttagcatacgtctagccaatcaactaaatttgctactcatgttactttgctaacattcttcaaaacagtaaatcctacttaggtctgataatttaatttctggggtatgcatggtccgcatcttacaataaaagtataatttkkattwttaataatgcagaaaagctgataggaggctattgctaatctagagagttccatcagctacaggaaaatcatggccaacttgcttactcacctatgtagtcacttagaattgtgggtaaaatttaatttgtacaattgtttatttgttgagctgtatctttaatgctgcatagctccacccaagaatccaggtcgtttttgtttattattttattatataactcctagaaaaggggaatcatgattataaaacaaaacgaaaaacaatctgcctttatggaataaaatgattattctgaaaatattctataaaaacataatatatatttagttatttttcaaataaatgatgtagagcagggttttcagcactctctactaatcacatctactgtggaggctgaggcaggagaattgcttgaacccgggtggcagaggttgcagtgagccgagatcacgtcattgcactccagcctgggtgacnacagtgaaactccgtctcaaaaaaaaaaaaaaaaaaaaaaaaaaaactcga

SEQ ID NO: 351 - DNA, 847 bp, Homo sapiens
  SITE (765): n equals a,t,g, or c
  SITE (812): n equals a,t,g, or c
gaaatggagaagcttaaggcaaagggtgactctccggcctgaccctcactatgaagatatttatgtatgttcccataatacttttcagatcccaatgtctgtgtttatccttgacagaaataatagaactgctgtcttcttccaagttaaacaaaactttggagctaaaagctagctaggtcaagagaaacaaaatctaatcctcacccaattgagagactgaatatacaaagaatggccaaacctaaccatgacctcctacccataacctcttcagtaatcggccagaagggtcaggacttaatctttaaccggcagcttccctatttcttgcccctgcttccagctctgggccaatcagagaaagccaaatgtgctcctcacaccaatcgcgtaagaagccctgcttctagtatagccctcctccaacttcccgatgccaacatcctccaatcagagccaacctgaagtttctcccttttttcagtatatgtaaagcttttccactcccctgcctgcctatgagtctgttaaatcaagtgatgggtcgcggctgactcttgccagctctgagtaaatagcctattctcatttggtggtcgttatttctacacagccggtgggaaggtggtggagaatagtgaagactattcttaaggttaaaaagaaggttcggcttacattttttttttattttaaatttacagcatggcgtctccagcccaggttttaaaataccttctaatgtaaggaaatagccctgcnccttgtgcccatcctagagagaaaatggtttcttaataaaaaatgtntgaggcaaaaaaaaaaaaaaaaaaaaaaactcgag

SEQ ID NO: 352 - DNA, 1230 bp, Homo sapiens
gggcgaattaaccttagcatatgatagttcttttagtgtttcccaccacccttttcagagtaagcaattagacgtctagagtttcttttcctctatccctttgggtaaatagcaaccagtggtgcccgccaccacgcctggctgattttttgtatttttggtagagatggggtttcaccatactggccaggctggtctcagactcccaaagtgctgggattacaggcgtgagctaccacgcctggccaagaggcagtttttgaattccaaaattatggagtgatatctgggagtcagccttcatcagtgatgctgcttgtgctttctccagcttcttgggagactgggcaccaggagacttggaggttcttccctatcttacctactcccaagtatgcatgtttttgaaaaaaatatttaagatttctagagaagatcacaatcttctccagtgtctgtgtaatccattgtggagcagtttattacagctgacctactgtctcctgtctgttttaggagcggtgacttaggttatcaccccttagtgttttcctgtcatctgccttctcatctccacctaaaatttagtttttggtaaaagatcatgctatctaaccttgtcatcattgcaaaacaaacttatttatgtttatcatgatgctgacattagcaagctgactcatggtttaatgttagtgtttcttactactggtcactggctgacagtcggaaaagtgatgccctatttttttttttttttttttgagatggaatcttgctctgttgcccaggctggagtgcagtggtgccatctcggctcactgcaacctcttcctcccaggttcaagcgattctcctgcctcagccacctgagtagctgggattacaggcacccgctatcatgcccagctaatttttgtatttttattagagaccatgttggctagactggtcttgaactcctgacctcatgatccgcccaccttggcctcacaaagtgctgggattacaggtgtgagccactgcgtccggtcctgtctctgtttttatctgaaattatgttagcctttgcctagttatggtgaattaaccttagcatatgatagttctcttaatgtttcccaccacccttttcagagtaagcaatttgacgtctacagcttcttttcctttatctctttgggtaaatagcaaccaatccaacagcaaaaaaaaaaaaaaaaactcgag

SEQ ID NO: 353 - DNA, 2575 bp, Homo sapiens
  SITE (2555): n equals a,t,g, or c
  SITE (2557): n equals a,t,g, or c
  SITE (2569): n equals a,t,g, or c
  SITE (2572): n equals a,t,g, or c
atgggttgtagaagcgtgtgtttgagagaattcagagacatttgaaggctgctgtgtgcatgtttgggggtctgaaaagacagttgtgtgcatggatgtgtgcgtggggagaaagaacgtgggtaagatgtcccttcccagccctgagaccactggtcacagttggccacctccaacgggagaccttgtccttggcctagagtcctcccacccttggggggctcctgcctgaggtcctcagaatcccactgcaatggacccaggcagcgcccaggaagccatgctgggcccccgccagscttatcccaaaagcaggggccagggagggggcgacttgcctgcccctgaagcccttgttcccattggccccagtttgcattctgcaggttttccattttagtgggttctgcttttatttcagagacagacatgtgtcttctctgtccgtttccaataggtaaagccatatcagttagactgcaatactttaaacacgagacaaaacaatccatatgtttagggaaccagaaaagtcccctggtctgtcccttctttggggagcagggcctcgacagctccagctcccttgacctaccttcctccccgcaccccgcccccaccttgtgcccctgtgtccagccccccagggggcctgtgtctgtgtctgtgcctgtgtctgtgatggggagccgcctcgcacccctgttgtctgcttgtctctttgtgtctgttatcctgggcaggatggtcattctcaaaaaccctggggtcctgggccagagacaggcagggcccagtccaggggccccaggcctccccagtcccagtgtgcgagccccacttggacacaagtgttcagagaggtccccctctgccacttgacagggaccttcaaacctcgacagtgatgcaaggacacagagagtaccagataggtagcagagaccaaggcgcagggtgcttcagatgagcaagagaacccagtcgaaccagataccccaggtgggccggagggaccccagaccttcagagggctgccctggtgttctccacagtgcagtccctctgtattcccagagtgggatcggggctttcagcccaccctgatgcctgccctccaggatggctggtttagtctgggtccatgtcccagacccctctattctgctccaggacagcaggacttcaggtcttcctgggggtggatataggagaaaatttctgcctggcacacacctggctccaaccactgccaagtgatcactcttaggcccaggggaacacaatgactatcattactgatgcagacctggctgtggagagcagctaatgtgtggcccagagagcctgtctgtgtggagcacgtagtgcacagaatacgtgagagttgctctggcaggggcagratcctcacaggatcgcctgggaggtgaggtgtgtgtgacccactggatgggagggcaatgagtgtgcacatacaaatggggcagtgtgcatgcaacacacttaggggaggagtggccccagaattcagcacgcacacaacacacaagggagagaacccccagatgagaaaataggaaggagcaatcatttgtagatgggtgaaaaaagaatgaggttcaagggagcgtgcaccaggtgaggtgagcgtgtgtgctctcagggaagggcccaggmtcccatgcctgggaggagctgccagagagaagcaaaaaggcggctgtggatcgccctgggctgggcaccagtgacaggtcaggatctccaaacatggacgtcctcccctccaaatccagaagctcccagaaggtgtccttaactgcaaagctgtgcagggtactcctccagatggaatcaggaagtcgagacaccatcccaggtgtgtgtaagagagagagagagaacagggaggatacagaagtattgcagcccagatcccctatcagggggacagctggtgggcaaagcagccaccccacagccttgtggctagagtacagtggggtrgaccctccagccccaatagccctagtacccagctggcagggttgcccacccctgctgtccacctgctccatcctctagggttccacaggcccctgaccgcacagggaggctggggccagcctggtctcccaggcctgaggacatgcctcccaccaaatgtcccctgctccagtcccactcctgtcaccccacgctctgcactggggagaaaacgggaggtgctcgtgctggccctgggtgggagcggggagtcctggtgagaccccggtgagatggaccatcctgcccscgtgggggatcccctttcccacatccgtgctgtgtcattgttgctctgcttcctttcaatgtgtcagtgcctggggggaggggaggagcaccccctcagcccccctgaacctgaccaaaagccatggctgttgctcccccctttgtatgatgcaaatgctgaaatgtacaaaatcaaccatgacaacaaagaaaaagaccttgtacagcaaaaaaaaaaaaaaaaaaactcgagggggggcccgaacccaaatcgncnaatagtgagtcnaanaca

SEQ ID NO: 354 - DNA, 1100 bp, Homo sapiens
  SITE (1088): n equals a,t,g, or c
ggcacaggtgacatcgccgggggaggttgtgggcaacggtggaggaggagagacgggaggggaccatttgggatggaggggcctcttcagagttttaaaaggcgtttgtggggtggagttgagtgtgctctgggcttggacacttgccgtggtgcccctggctggccgaggagactggctctggccaggggccccgtcctgagaggtcctcagcgtctgactctcggccaggcgccagcaaggaggggccggtccccggggctaccaggcaggcacgtgcacatcgccatcgccacacgccaactccgcctgggttttacaaagtcgttgccttaatgcatgtggacaggaactccctgaggtcgccccatgccccctggctgtgccagtacggacgccctggaccctgcgaacaggtggggcgggcgaggggcccaagggacgggctccagagacacgcgcagggcaggaggggtctcacggaggggtctcgcactgaggcgcccagagctggtggtcccgctggacgccatccctctgcccgggatccacacggcccacgtgtgcccgccatgcccgcgccccacgccattgcagtctgccatcctctggccgtgacggtggctgcagcttccccatttgcgccgttgcctctggctgtctgcacttttgttcatgctccaaagaacatttcataatgccttcagtaccgacgtacacttctgaccattttgtatgtgtccttgtgccgtagtgaccaggcctttttttggtggatgtgttaccccgcacacttcaatctcaactttgtgcaccgtccattttctagggatagacgcccagggaatgaactctagttttctaacagattagctgagatattaacttactcacacggacaggttgatgccagagccgtaagaatgcgccagtgcgggtttgcgggggacttcgggtgtggggtcctgcggccgcgatggccgtggaaggttctggggatccctgctgccacggggacgagttcggacgccaggtggacctgtgcactcagtaaaacgcagtgattcaacctggaaaaaaaaaaaaanaaaaaactcgag

SEQ ID NO: 355 - DNA, 2129 bp, Homo sapiens
  SITE (2097): n equals a,t,g, or c
  SITE (2120): n equals a,t,g, or c
  SITE (2125): n equals a,t,g, or c
ttggcccatcccatcagtgggcatctggctgacgccattcactggacggtccctgaacacctaggaatgcacacaccgtgcttctcagacactggagacgcaaaggcaggaggatgcagtccggtgagaggacacgatctttacctgcacaatcagactgtaagcccagcagagaaccccaggggcgcctgggtacttctcggaggtcatcttagttgtggtggggaagacaaagaaataagcaaacaagaaactagagttactatacaagaaactctcctgagtttgtaaaccttaagcataaggattcagttgacctttttcttggttcatcaatctggaaagaacttacataaagcgccattgacactgtcacctgggagctccatgggccgtaagtctttgacagccaatttaatttgaggtcagagggccttgaggtacacagtcagcactgtttgaacacttttcctgaaagcaaaactcacagctccctgcgccctctgacaacactagctatttctgccagagtaagaacttctattactattttattattgttcatatgtcttttgatgatggttgtgtgacagggggaagcaggatctatttggtttcttccccctccccccaccccttcctttttgtctctctttttttttctctaagaaaatcaccagactagtttttccatcttgagtaatttcttatgtgggacagttttgatcctcattttgaaagcatgcgtgtgcacatgtgtgttgcctgtggtgccaggtgagacaggtggcactaactccagctgcttggaaggcatcccaagggcgcatcttaaagttggagcagacctcccttttccagcccctggggccattagaccacgtgctggaactagcattgtaaaattcccatcccagttccactcccctgaagtgaaacccttttttttttgtgacagtaaatcttaaaaatcattgtctctttatgaacatttcctcagtttcttctctgctgaaaatgtaagccatgctactttttaatgtattttgaattttgtgctcattggaaattgatatgctaatgcctcccccaccccccgccagacttttctttttatactttgtcttgtttttactggggtaggctgggcatgcgtgcgtgcctttagggcagcattttaaacctttgccaaaattgcaaatgggacatgtacattcttctgctccatcctacttaaacacctatcagctatttttatctttaaccttttctgtatgtttgaagtgtgtggggggtgtgtgtgtgtgtgaaagagcgagagaatgatgtcatctaaagttttttgaagaattatttggttttcattgcattaaaattctatcactcccagctttgttttcatttaaaaaaatatacaaagagctttgtaaatacaacacattttatttctcccccttcttttaatgtacagcttttttgccacttatatatacttaaaatattcccatgaattatgtccagttcttcttggaaaaaaatttggttttgaatgaacctgcaaagcatcctgcagcgtgagcagctcctccacctggagctccgaagcatcttctcaggccaaagcggcattacccgtgaatctgtcttctccgccacagcatggtttgaggcgcagtctgttaatatagctgggccatgtcagtgactgttgtgtttgtggggtcaggtggggggcatggtatttgcaaaaaaaacaaattatggctaatttattattttgttgcagtggggttaactgtaaactcatgtaagagtctgtgatttcctcattggttgatctctctctctgtaatcctcattgcaaattttcaccaggacagcgttttttgattagaggggagctctggcacagtatgctttaatttagcaggaacttccagatgatttaaattctcgatgctgtgatgacacacatatgatctttcgtgtttctgagcgactctactttcattgtttgccagcgtggctcgttgctgttgcccaataaagcttgtgtacgttcaaaaaaaaaaaaaaaaacccggggggggccccganccccattggccctaaaggggggngtttnaaaa

SEQ ID NO: 356 - DNA, 709 bp, Homo sapiens
ggcacgagggaccacgggagcatgtctcccccaattacccaggctctctggggagcctgttttcctcccagggttcctgggagtacttaaggcaagtcagtttcgggccatctctcttcccagggaagggggctatctctgaaacacgtctgggaagggatgtttctggccctacccccatctctcctatgggggtttctctgccctgcagcactttaggatgaggctgggcatctctgagttgtcttttctcctaggagccctgggatacctctctctcccgagggtagggcctctggagccatttcttccctgggtcggggctgtctccgggtgttgggagggcttgtgttggccatgagaaagtctcttaaggggcgtctccactggggacttctctgggaggggggactgtgtcccgcccatggggtttcgggcgggtgtgtctgcccatggggaggggagactgtgtctcctcgggttatctagtggggaggggggccgtgtctctctcgtgtgtaggggggtgggggtcggggtgggggggttttgggcgcgtcgggtgcccacattggggtcgtgtttctcttggttcgtgccacttcccactgcctcgctcctcccgggaagggcccccgccccgccccccaccctaccacacattcgaagaacccgtatacaaaatctagacaaaaaaaaaaaaaaaaaa

SEQ ID NO: 357 - DNA, 3145 bp, Homo sapiens
  SITE (368): n equals a,t,g, or c
  SITE (2402): n equals a,t,g, or c
ggaggaagaagaggaggaggaggatgaacccgtccccgaggcccccagccccacccaggagcgccggcagaagcctgttgtgcacccctcggcacctgcccccctccctaaggactacgctttcaccttcttcgatcccaatgacccggcgtgccaggagatcctgtttgaccctcagaccaccatccccgagctgtttgccattgtgcgccagtgggtgccccaagtccagcacaagatagacgtcatcggcaatgagattctgcgccgaggctgccatgtgaacgatcgtgacgggctgaccgacatgacactgctccactatgcgtgcaaagctggggcccacggagtcggggaccccgcggcancgtgcgcctctcgcagcagctgctggcgctgggcamgaatgtgacgctgcgyagcgctggaccaacatgaacgcgcttcactacgcggcctattttgatgtgcccgacctcgtgcgtgtgctgctgaagggtgcgaggccgcgagtggtgaactccacgtgcagtgacttcaaccacggctcagccctgcacatcgctgcttccagcctgtgcctgggcgccgcaaatgtttgctggagcacggcgccaaccctgcgctgaggaatcgaaaaggacaggtgccggcggaggtggtcccagatcctatggacatgtccctggacaaggcagaggcggcactggtggccaaggagctgcggacgcttctggaagaggcagtgccactatcttgcgccctccccaaggtcacgctacccaactatgacaacgtcccaggcaatctcatgcttagcgcactgggcttgcgcctgggagaccgcgtgctgctggatggccagaagacgggcacactgcggttctgtgggaccacggagtttgccagcggcagtgggtgggcgtggagctggacgaacctgagggcaagaacgatggcagcgttgggggcgttcggtacttcatctgccctcccaagcagggtctctttgcctccgtgtccaagatctccaaggcagtggacgcacccccctcctctgtcacctccacaccccggaccccccggatggacttctcccgtgtcaccggcaaaggccgcagggaacacaaaggcaagaagaagaccccatcatccccatctytgggcagcttgcagcagcgtgacggggccaaggctgaggttggagaccaggtccttgtcgcgggccagaagcaggggatcgtgcgcttctacgggaagacagactttgccccaggttactggtatggcattgagctggaccagcccacaggcaagcatgatggctctgtcttcggtgtccggtacttcacttgccccccgaggcatggggtcttcgcaccagcatcccgtattcagaggattggcggatccactgattcccccggggacagcgttggagccaaaaaagtgcatcaagtgacaatgacgcagcccaaacgcaccttcaccacagtccggaccccaaaggacattgcatcagagaactccatttccaggttgctgttctgctgctggttcccctggatgctgagggcggagatgcagtcttagaggccctggacacctgacaaagagacagagtccccactagcatctcctgacacccgaggagccctgagtcaccctgagatagagattcccagtaacacatccagagtagagacccctgttagccagccctcgatcattgaggccccattattaacagatactcccataataacccccaaatacagaccccatgtcacccagaaagagattccctgagtagcaccttcaggctagtccctatccccaacccctcagagcagattcccagattaacagatttccatatcaccccaaatgatggtgaccctctccacataatgcattacaacagaacattcttgaatcacccaaccctggatcagaaacctccccattaacaaacactgccccttaagtcctcttgaaataaacataggtcacacccccaaagcaaaagagtaacagacattcatgtcattgttccccatttaacatcagtcctctcaagatgtcgtgaccccatggtcaccctgaagcccttagattccaacccctcaatcagagacttccttcattaacaaagacccttgttcttatccctcaagaagaaacccaccataaccagcccactgtcacccctaatttacagacaccaaaacagtcctggaagtgctaattacaggaccccccaagtcttcctaccctctgcaccctcaagaaacccccagtgccttgtatgaagcccaccccacatggcccacagctcctgtgctggccagactcccagaaaattctctattttttaagtaacgacttccccctttggggrnccccaaaatttggaggccccattctaggactctggggatcccaaaccctagagtacacacgtcccaaactcccctgtgccctcaagtcctacagcccctagaagaccccaatgccgtaactcctaggacccccaaatcatggaatcccaaatccccagggaatcccaaatttgaaaatccaatcccaagtccccaggaaacccaatcatgaggtccttgtgcctggtatggaggagactgcagtcaggatatgcattccaggctcccagacacctcaagccctattcacaggcaccaggaaaccccacacaggaattcccatccctggaaactggagaatttcaatgccccgagtccatgggtttcaagacaccaaattccaagagccccagccctaagggaaccccaaatcctaaagcctccatctctaataaatggaargccccaaggccctgaggggatctcaaatcctggaaccccgatttcaatctacgttctagtcactggcctcaaaggaccccacagcacctgggccagaccaacagctcgagggagaacctgaaggcccagggggtccagggcggacctggggccccgaccaccaaggacagctcacgactgccccttcactgcatgtccccaaactcagcatgactcctgtcctcttcaataaagacgtttctatggcaaaaaaaaaaaaaaaaaaaaaaaaaaaaaaaaaaaaaaaaaaaaaaaaaaaaagg

SEQ ID NO: 358 - DNA, 2746 bp, Homo sapiens
ggcacagtaacctctcagctgacgaatgcaaggcaccaacggagaggcagcttcgatataaggaaaaagtggctgaactcaggaagaaaagaaattctggactgagcaaagaacagaaagagaaatatatggaacacagacagacctatgggaacacacgggaacctcttttagaaaacctgacaagcgagtatgacttggatcttttccgaagagcacaagcccgggcttcagaggatttggagaagttaaggctgcaagccaaatcacagagggaagcaacatgattaaaacaattgcttttggccgctatgagcttgatacctggtatcattctccatatcctgaagaatatgcacggctgggacgtctctatatgtgtgaattctgtttaaaatatatgaagagccaaacgatactccgccggcacatggccaaatgtgtgtggaaacacccacctggtgatgagatatatcgcaaaggttcaatctctgtgtttgaagtggatggcaagaaaaacaagatctactgccaaaacctgtgcctgttggccaaactttttctggaccacaagacattatattatgatgtggagcccttcctgttctatgttatgacagaggcggacaacactggctgtcacctgattggatatttttctaaggaaaagaattcattcctcaactacaacgtctcctgtatccttactatgcctcagtacatgagacagggctatggcaagatgcttattgatttcagttatttgctttccaaagtcgaagaaaaagttggctccccagaacgtccactctcagatctggggcttataagctatcgcagttactggaaagaagtacttctccgctacctgcataattttcaaggcaaagagatttctatcaaagaaatcagtcaggagacggctgkgaatcctgtggacattgtcagcactctgcaagcccttcagatgctcaaatactggaagggaaaacacctagttttaaagagacaggacctgattgatgagtggatagccaaagaggccaaaaggtccaactccaataaaaccatggatcccagctgcttaaaatggacccctcccaagggcacttaaagtgacctgtcattccgagccagcgaaccccagcagtaggaatccgtaccctagggatctgtctgtcatttctctgttgctcttgtgattggcaagtacagtatcctttgggaaggccatccccctcaggactgtcctggctccgacctttgtgtacactgcagacgctggttctgaggaactgttgtttcggcctcagtgaggttgcctggatgggatctgtattagacttgagtgcaggtctctcagcactgacccaaggagttctgttatggtactgtacctgtccagtcactggttctctcctcatgtcctctcgccccatgaggttgtgttgtgtcttctaagcgtggtactagtgcttgccacctggtcaccagacctccaaatatggctgccaccaccaggacctttccagttactccttatatgtgtgttctatggaggggcagggaaaaggtggcacttgtgagtgtgtgtggattggcagggggtccattcactttgggttccatcttgctttaaatttcttcattttgattaagagacctctttttgatctgtattgggctaaccagagccaaatacttttgaagagtttcccagggactagtcatggtaatagcatataattgatctgaatgagatggagagaagaatgaaggggtggtggttctgggtttgatttgagttcacctgtgggcagtgggcagtgggcagtgtcttggtgaaagggaacggatactactttttgcctcaccgtaaagtactcactagtaaatatttccttctctctttactcccactttttacgtttgcaggtgccaaagtaatgtccacttttccctttcatgctgcatattaactggttaattatactgcagaaaccttttcacctccactagtctgatacagtacatctgtacttccatataccttgcactgattttgtctgagtgccctgggagaagtagaaaatgattgaaagtgacttccgtatctcagcccatgactcagcaaggcagaatggccacccctgccaaagtttgcttctcttttcaacagtgcctcaccctccctctaggattaaagtgcttctgcccttccacgaactcctcctccatttcctttttgggatttgtcaccatccttctattctctggtcttctatttttggtgttgttcaagtgaaggaagagatgttccctctaatttctctctagcccattataacctgctatcttggggcaacttttgatgtatgacatgtcacccttcccaacttggtctcctccaacatgctgtcttcatgtggagccctcaccacaatccctgactccggtcatttgtgcctttctcttgtcatctctgtacactacttatattcactgtgggttgggggagctaattttaagcatgttcagtggcagctcccctccagtttcagtgtcactgttaaaatttatcaaaaagcaacttcactaggggttttcttaagggataaaggccttttacagaagctaaacccttccccacatgtggtagaatgtgctcttctatatctactcctcaataaagcatgttctctgctcaaaaaaaaaaaaaaaaaaaaaaaaaaaaaaaaaaactcga

SEQ ID NO: 359 - DNA, 2736 bp, Homo sapiens
ggcacagtaacctctcagctgacgaatgcaaggcaccaacggagaggcagcttcgatataaggaaaaagtggctgaactcaggaagaaaagaaattctggactgagcaaagaacagaaagagaaatatatggaacacagacagacctatgggaacacacgggaacctcttttagaaaacctgacaagcgagtatgacttggatcttttccgaagagcacaagcccgggcttcagaggatttggagaagttaaggctgcaagccaaatcacagagggaagcaacatgattaaaacaattgcttttggccgctatgagcttgatacctggtatcattctccatatcctgaagaatatgcacggctgggacgtctctatatgtgtgaattctgtttaaaatatatgaagagccaaacgatactccgccggcacatggccaaatgtgtgtggaaacacccacctggtgatgagatatatcgcaaaggttcaatctctgtgtttgaagtggatggcaagaaaaacaagatctactgccaaaacctgtgcctgttggccaaactttttctggaccacaagacattatattatgatgtggagcccttcctgttctatgttatgacagaggcggacaacactggctgtcacctgattggatatttttctaaggaaaagaattcattcctcaactacaacgtctcctgtatccttactatgcctcagtacatgagacagggctatggcaagatgcttattgatttcagttatttgctttccaaagtcgaagaaaaagttggctccccagaacgtccactctcagatctggggcttataagctatcgcagttactggaaagaagtacttctccgctacctgcataattttcaaggcaaagagatttctatcaaagaaatcagtcaggagacggctgkgaatcctgtggacattgtcagcactctgcaagcccttcagatgctcaaatactggaagggaaaacacctagttttaaagagacaggacctgattgatgagtggatagccaaagaggccaaaaggtccaactccaataaaaccatggatcccagctgcttaaaatggacccctcccaagggcacttaaagtgacctgtcattccgagccagcgaaccccagcagtaggaatccgtaccctagggatctgtctgtcatttctctgttgctcttgtgattggcaagtacagtatcctttgggaaggccatccccctcaggactgtcctggctccgacctttgtgtacactgcagacgctggttctgaggaactgttgtttcggcctcagtgaggttgcctggatgggatctgtattagacttgagtgcaggtctctcagcactgacccaaggagttctgttatggtactgtacctgtccagtcactggttctctcctcatgtcctctcgccccatgaggttgtgttgtgtcttctaagcgtggtactagtgcttgccacctggtcaccagacctccaaatatggctgccaccaccaggacctttccagttactccttatatgtgtgttctatggaggggcagggaaaaggtggcacttgtgagtgtgtgtggattggcagggggtccattcactttgggttccatcttgctttaaatttcttcattttgattaagagacctctttttgatctgtattgggctaaccagagccaaatacttttgaagagtttcccagggactagtcatggtaatagcatataattgatctgaatgagatggagagaagaatgaaggggtggtggttctgggtttgatttgagttcacctgtgggcagtgggcagtgggcagtgtcttggtgaaagggaacggatactactttttgcctcaccgtaaagtactcactagtaaatatttccttctctctttactcccactttttacgtttgcaggtgccaaagtaatgtccacttttccctttcatgctgcatattaactggttaattatactgcagaaaccttttcacctccactagtctgatacagtacatctgtacttccatataccttgcactgattttgtctgagtgccctgggagaagtagaaaatgattgaaagtgacttccgtatctcagcccatgactcagcaaggcagaatggccacccctgccaaagtttgcttctcttttcaacagtgcctcaccctccctctaggattaaagtgcttctgcccttccacgaactcctcctccatttcctttttgggatttgtcaccatccttctattctctggtcttctatttttggtgttgttcaagtgaaggaagagatgttccctctaatttctctctagcccattataacctgctatcttggggcaacttttgatgtatgacatgtcacccttcccaacttggtctcctccaacatgctgtcttcatgtggagccctcaccacaatccctgactccggtcatttgtgcctttctcttgtcatctctgtacactacttatattcactgtgggttgggggagctaattttaagcatgttcagtggcagctcccctccagtttcagtgtcactgttaaaatttatcaaaaagcaacttcactaggggttttcttaagggataaaggccttttacagaagctaaacccttccccacatgtggtagaatgtgctcttctatatctactcctcaataaagcatgttctctgctcaaaaaaaaaaaaaaaaaaaaaaaaactcga

SEQ ID NO: 360 - DNA, 2736 bp, Homo sapiens; identical to SEQ ID NO: 359

SEQ ID NO: 361 - DNA, 2046 bp, Homo sapiens
gtcatgcagtgcgccggagaactgtgctctttgaggccgacgctaggggcccggaagggaaactgcgaggcgaaggtgaccggggaccgagcatttcagatctgctcggtagacctggtgcaccaccaccatgttggctgcaaggctggtgtgtctccggacactaccttctagggttttccacccagctttcaccaaggcctcccctgttgtgaagaattccatcacgaagaatcaatggctgttaacacctagcagggaatatgccaccaaaacaagaattgggatccggcgtgggagaactggccaagaactcaaagaggcagcattggaaccatcgatggaaaaaatatttaaaattgatcagatgggaagatggtttgttgctggaggggctgctgttggtcttggagcattgtgctactatggcttgggactgtctaatgagattggagctattgaaaaggctgtaatttggcctcagtatgtcaaggatagaattcattccacctatatgtacttagcagggagtattggtttaacagctttgtctgccatagcaatcagcagaacgcctgttctcatgaacttcatgatgagaggctcttgggtgacaattggtgtgacctttgcagccatggttggagctggaatgctggtacgatcaataccatatgaccagagcccaggcccaaagcatcttgcttggttgctacattctggtgtgatgggtgcagtggtggctcctctgacaatattagggggtcctcttctcatcagagctgcatggtacacagctggcattgtgggaggcctctccactgtggccatgtgtgcgcccagtgaaaagtttctgaacatgggtgcacccctgggagtgggcctgggtctcgtctttgtgtcctcattgggatctatgtttcttccacctaccaccgtggctggtgccactctttactcagtggcaatgtacggtggattagttcttttcagcatgttccttctgtatgatacccagaaagtaatcaagcgtgcagaagtatcaccaatgtatggagttcaaaaatatgatcccattaactcgatgctgagtatctacatggatacattaaatatatttatgcgagttgcaactatgctggcaactggaggcaacagaaagaaatgaagtgactcagcttctggcttctctgctacatcaaatatcttgtttaatggggcagatatgcattaaatagtttgtacaagcagctttcgttgaagtttagaagataagaaacatgtcatcatatttaaatgttccggtaatgtgatgcctcaggtctgcctttttttctggagaataaatgcagtaatcctctcccaaataagcacacacattttcaattctcatgtttgagtgattttaaaatgttttggtgaatgtgaaaactaaagtttgtgtcatgagaatgtaagtcttttttctactttaaaatttagtaggttcactgagtaactaaaatttagcaaacctgtgtttgcatatttttttggagtgcagaatattgtaattaatgtcataagtgatttggagctttggtaaagggaccagagagaaggagtcacctgcagtcttttgtttttttaaatacttagaacttagcacttgtgttattgattagtgaggagccagtaagaaacatctgggtatttggaaacaagtggtcattgttacattcatctgctgaacttaacaaaactgttcatcctgaaacaggcacaggtgatgcattctcctgctgttgcttctcagtgctctctttccaatatagatgtggtcatgtttgacttgtacagaatgttaatcatacagagaatccttgatggaattatatatgtgtgttttacttttgaatgttacaaaaggaaataactttaaaactattctcaagagaaaatattcaaagcatgaaatatgttgctttttccagaatacaaacagtatactcatgagcaaaaaaaaaaaaagggcggccgctctagaggatccctcgaggggcccaa

SEQ ID NO: 362 - DNA, 2636 bp, Homo sapiens
  SITE (887): n equals a,t,g, or c
tgctgcaggaattcggcacgagggcaatccgggcttgcagacgaggtaaggtcgattccatttggcccggggatggtcacacgcgcgggggccggaactgccgtcgccggcgcggtcgttgtcgcattgctctcggccgcactcgcgctgtacgggccgccactggacgcagttttagaaagagcgttttcgctacgtaaagcacattcgataaaggatatggaaaatactttgcagctggtgagaaatatcatacctcctctgtcttccacaaagcacaaagggcaagatggaagaataggcgtagttggaggctgtcaggagtacactggagccccatattttgcagaatctcagctctcaaagtgggcgcagacttgtcccacgtgttctgtgccagtgcggccgcacctgtgattaaggcctacagcccggagctgatcgtccacccagttcttgacagccccaatgctgttcatgaggtggagaagtggctgccccggctgcatgctcttgtcgtaggacctggcttgggtagagatgatgcgcttctcagaaatgtccagggcattttggaagtgtcaaaggccagggacatccctgttgtcatcgacgcggatggcctgtggtkggtcgctcagcagccggccctcatccatggctaccggaaggctgtgctcactcccaaccacgtggagttcagcagactgtatgacgctgtgctcagaggccctatggacagcgatgacagccatggatctgtgctaagactcagccaagccctgggcaacgtgacggtggtccagaaaggagagcgcgacatcctctccaacggccagcaggtgcttgtgtgcagccaggaaggcagcagcgcaggtgtggagggnaaggggacctcctgtcgggctccctgggcgtcctggtacactgggcgctscttgctggaccacagawaacaaatgggtccagscctctcctggtggccgcgtttggcgcctgctctctcaccaggcagtgcaaccaccaagccttccagaagcacggtcgctccaccaccacctccgacatgatcgccgaggtgggggccgccttcagcaagctctttgaaacctgagcccgcgcagaccagaagtaaacaggcaccttggacgggggagagcgtgtgtgtgatgggaaaatccggacccacgcgtgtgctgaaggcgtacggtgcttgccagattttcaacttgagcataaattggttgccattgagaatttaagaatctggaatattgcagcttttggttaaacttaatgcatggttggagatgttatggcgacactaaacaaagtattcctgaactttccttagctccttggtagtaactgggaagacagaaatgaagaaaatcacatgagaatgaagaattctttagcagctcaacagagtttctcggcctgctcccagatcggcgaagtttctacttgttactctctctgccggcgcccttcgttcctcctctgcttcccttccctagtctttcctccggcagggagctgggcaggggtccccgggtgtctccctgagtcccgactgcactgactgggtccatcagagggctgcttcgttctccagctcatcttcttttaaagtggtgactagcttggtggtatctggctgctggtgtttggcttattgacatactccagggtaatcaatgatgactttgtttggaaacccttttggaggcaccatgggaacagaaggaaacatgagtgacgctgacccttgagtgtgtgggtggggagctctgagacgcctcctgtcccacgctctccggtgtccgtgtctacacaggggtccccatgatacccaccggccccagcagggcagaccggaccggggacgggcacggtgaagggctgcagcctggggtctgacgtggcccctagtgctgtctcaggagaaggctctggaggacttgaggcatgctgggcctggtgcagtgatggcgctaaggagacccggggaaagacagtatcgtggtcacgtatgcttaggaagcagcacagccgtgtccttagggatgttcgcgtccagtaaagacactggtaactgcggtttcagccaacactcttcatggcagtgtcgacctcgggttagcttctgttgtctttgtggatggttttcctggagcggcctgacgttgacgtgttctctggtcccatgtcttagcggggcatggtacggtttcgtgcctgacgcgtgcattagggtgttctcttatactttcagtagcrtctttccacagcaagggccaaaccctcctggttcccttcagagtctttttggcctgatgatgactcttgagtgataccctgtgatgcagacatgccccagatggattctactttctttaaaactagggactttcaagattaaaaaaaagattgtcactactaatttgacgcctaacttcagaagcttcactgtctacatgtgaacttttccagaaaaactgtgccatggacatttttcctctggggaattaacatctaaattctggtaactattaaaagacagatctggttaatttaaaaaaaaaaaaaaaaaaaaaaaaaaaaaaaaaaaattcctggggccgcgaattctt

SEQ ID NO: 363 - DNA, 2047 bp, Homo sapiens
  SITE (9): n equals a,t,g, or c
  SITE (11): n equals a,t,g, or c
  SITE (20): n equals a,t,g, or c
aggggtagngngctttacgnccacgcgcctggcctgtggctggtcgctcagcagccggccctcatccatggctaccgkwaggctgtkctcactcccaaccacgtggagttcagcagactgtatgacgctgtgctcagaggccctatggacagcgatgacagccatggatctgtgctaagactcagccaagccctgggcaacgtgacggtggtccagaaaggagagcgcgacatcctctccaacggccagcaggtgcttgtgtgcagccaggaaggcagcagccgcaggtgtggagggcaaggggacctcctgtcgggctccctgggcgtcctggtacactgggcgctccttgctggaccacagaaaacaaatgggtccagccctctcctggtggccgcgtttggcgcctgctctctcaccaggcagtgcaaccaccaagccttccagaagcacggtcgctccaccaccacctccgacatgatcgccgaggtgggggccgccttcagcaagctctttgaaacctgagcccrcgcagaccagaagtaaacaggcaccttggacgggggagagcgtgtgtgtgatgggaaaatccggacccacgcgtgtgctgaaggcgtacggtgcttgccagattttcaacttgagcataaattggttgccattgagaatttaagaatctggaatattgcagcttttggttaaacttaatgcatggttggagatgttatggcgacactaaacaaagtattcctgaactttccttagctccttggtagtaactgggaagacagaaatgaagaaaatcacatgagaatgaagaattctttagcagctcaacagagtttctcggcctgctcccagatcggcgaagtttctacttgttactctctctgccggcgcccttcgttcctcctctgcttcccttccctagtctttcctccggcagggagctgggcaggggtccccgggtgtctccctgagtcccgactgcactgactgggtccatcagagggctgcttcgttctccagctcatcttcttttaaagtggtgactagcttggtggtatctggctgctggtgtttggcttattgacatactccagggtaatcaatgatgactttgtttggaaacccttttggaggcaccatgggaacagaaggaaacatgagtgacgctgacccttgagtgtgtgggtggggagctctgagacgcctcctgtcccacgctctccggtgtccgtgtctacacaggggtccccatgatacccaccggccccagcagggcagaccggaccggggacgggcacggtgaagggctgcagcctggggtctgacgtggcccctagtgctgtctcaggagaaggctctggaggacttgaggcatgctgggcctggtgcagtgatggcgctaaggagacccggggaaagacagtatcgtggtcacgtatgcttaggaagcagcacagccgtgtccttagggatgttcgcgtccagtaaagacactggtaactgcggtttcagccaacactcttcatggcagtgtcgacctcgggttagcttctgttgtctttgtggatggttttcctggagcggcctgacgttgacgtgttctctggtcccatgtcttagcggggcatggtacggtttcgtgcctgacgcgtgcattagggtgttctcttatactttcagtagcatctttccacagcaagggccaaaccctcctggttcccttcagagtctttttggcctgatgatgactcttgagtgataccctgtgatgcagacatgccccagatggattctactttctttaaaactagggactttcaagattaaaaaaaagattgtcactactaatttgacgcctaacttcagaagcttcactgtctacatgtgaacttttccagaaaaactgtgccatggacatttttcctctggggaattaacatctaaattctggtaactattaaaagacagatctggttaatttaaaaaaaaaaaaaaaaaaaaaaaaaaaaaaaaaaaattcctggggccgcgaattctt

SEQ ID NO: 364 - DNA, 840 bp, Homo sapiens
ggcacgaggccgcgaaggcttcctctagggccaccaggctgaggactcgcccaggacatggactggtctctcagacccctgggccaccatgtaggccaccactccaggccgtggacttcccccaacttggggacagccttattcccaaatgtctctatccttttgactggagcatcttctgcacaaccttgggagcccatccaagggttggtgaggactggtctcccgggggtgggggtctggggggtaccctctggggttatagattcccccactgccccagctctgactggaccccaagtggctgctatggtaaattaaatctctccccgcgtctcctttgcctcatgtctgctgctccctgggcagtggttgcctcctactgaagggctgtggactctcggattggcgttttcctatggcacttgtatccctcacgtgtaggaagcaatagcagcaccagccttgcctctagaagagacattgtcaagctactggggcatggaggtcatctgcctgcctgaccttggggtgggctgagccagtggaatgaagggcagtgtattggcatcattgcggtgctgttagccctagcctgggctcagcctcagctgaaggggtcttgggttctgtcgtcacagcccccactgatgggcagttgaactgattgtgtaacctggcctcacacgtggccagctgctttctccagtcatatctggctccggcttgccctgcttttctgctctctagactcagcactgaagagaaaccatctttgtcctcaaaaaaaaaaaaaaaaaaaaaaaaaaaaaaaaaaaaaaaaaaaaaaaaaaaaaaaaa

SEQ ID NO: 365 - DNA, 4151 bp, Homo sapiens
  SITE (4115): n equals a,t,g, or c
atttttttttttttttttttttttttttttttttttgggtttctgcatttgaaacatttatttcaggaaatacattttcaacactttgtcatttatacaaaaagacaaatttctcgggaggcacgtagcaaaaggccattgaggaacagagcctgatgaaacgaacaatttttcaaagtctggttacagagaaggaaagtgaagcatctcaaggctgggatgctgctgcccacccccaccccaccccgccrccaagtgacattgaggctgggcaggccacatggctgggccctggcgctggccactcatttccttcaaaatcttggttttggcaaaaacatggcaagtcggcaaagtaaactgtctcgccagtgggggtggtgaggggtccttcctctcttgggtggggagggagtcagacgcccagtgccccaacttccatgcacacacactcacactcatacactccttctcgctgaccttctcctggctgcaagcagccagcccggtgcctgcagatgcacctggtgatgtgtgcacctgagtggagtctcatcaggcccctctttctccccaggagcaagacaggtaacaggaagcaggaagggactttggtcatctgtgccctgcaaagacagcccccatgggtcccctcgtggggacagagggtgaggggccgggccgtgctgccacgaaaccttgctcttcagctgtggactgtgcacccctgacgcccgttctctcctttctaggggttcgttaccatgggctctgaggggaggggcccaggcacgggtagatcaacagagtcaggctcgcctggcctcccacctccccagctcagagagtcagcaaggcctgggccaggaggggtgagtggcaggggtggctggctgggcattaatgtaactacagcccagtcttgggccaaacccagacactagacagacagacggacacgcatacacatggacacacacacacttccctggtcacttgggcagggcaggcgccgggcagctcacgccactctgaccagcccaagccacggcccacacgtgcccccgccaaccttccttctggcaccttccatggctccctccctcagctcctccaccagactcacttgcttagaccttttcaaaactgggggatgagggggtaggggtcatctctccttcctttttatcctcaatcagatcccagcgcatcagcagcacctgcagcccggtgggggcgggggtggcgtgagagggggatggcagggagatgaagacgcctccctcattccagcctgtccccgcatctggccragcagtctgcggatggctgagataaaggcactttctgctccaggaggggcagctgccagggggcttggagtggctgggcagtcggtggcaggggaccctggagttttctacccttaggagcagggcaggggtaggggctgagtgatggccacaccatgtggcgggcagggggtccaggtgctcctggtgggctgcattctcccctgggctctgacacactccaggggacagggccgatggggatggaggggagcgtgcagcccactgggctcctctgcaagtgcgaggcctggcccccaccccaargctccggcactgagaaccccacacrgacggatgatctgcacaccgaagctgctcttctgagccctcggggagccaggcctggggacagagggtcatgtcaattcagtgggtgctctcacccctgcctgtggctccagtgcagcctccccacaacctcggggaggccgcggcctcatcactgactcactcggagggaggccccttcccttgtttcctggcagcatgtcgaaggggtggggaacgatgacaaatggagaaaatcatataaaataaaatggggtggtgggagggcctgggggggggacggaaatgacttgggggcaggatcccgggggtgggcagggyggcgtctacatctccggggcttctggctccttctcctccacgccgttggccatggcgctgctgccctcgttgaggcgcttcacacggtacgcctcgaagtggatgctgctggtgatgtccttgatgttctgcatgtgcgtcctgatgagaaggtcccgcaggtaggcaaactcacagtgtgtggtgttttcaacttcgatggtaccccacttggtcttcctcccaaggatcctcttgccgttgacctggtactcgtggtcactgcccaccacagcaaatgggatcatctcccggaacttctcgttcaccagccggtcctccgagtcctcatcaaattccttctgggggtacacgtcgatgccgttggacagcaggtctgcggtgatccgctgtttgaagtggaccctctcctccagggtgagtgtgtccgccttggcgatgacagggacgatgttgaccaccttgctcaggcgtttcataaactcgatgtccaggggcctgagggagtggccggtggcggggatgaagtagaggcagcagtggacgcgggtgtccgggatgcgcttcttgcggttgatgttgacctcctcctgcaggtatttctcgtactggtcattgatgaacttcatgatgggctgccagcagttctcgttgttgatgtggtccccgaaccctggtgtgtcaatcactgtcagcttcatccggacgcctttctcctcaatatcgtgcgtgatggacttgatctcgatggtcttggggatgcgctcctctgaggtgggctgcaccgacttccggctgattttggatttgaagagggtgttgattaaggtggatttacccaagccgctctgcccgaccaccatgatgttgaactcgaagccctgcttcatggccttccggcgcatctgctccaggatggagtcaatccccacgtagccgaagtccaccggggccttctcgttccgtgatgcaggcgcctgcttgagcccggcatctctgggggtgtcggccatgtcgccaacgcagctgggagccgcctcagtggcctcctggctccggggtgtagcctcagccacagggggctggggcttgggctccagcctgctctgcagctgagacacaggggcaggctctgaattctccaaggtctgggctgggctgggggcggtgggcgcctcagcaggcttgggcatctggatctccaccctcttgggggctgcgtcggtggcaggggcagtgggcacctcggggaccttggaggcagggggctccatcctccggtgggctgactcctggggtttgacgatggtgatctccgtcctccgaggggccggttctggcgtcttgtggcccaacacctcggccctcttgagcccgaaccgggacgggccgatggccccggcgttctccacctgcttggacgagatgtcaatggacagctcagtgcgccgggacaccggctcggccgccttggggcccgagagctccaccctccgcagggacgccttgggggagcgttggcttagggagtccacatggcgggccgagggttctgagttcttcacgcccaggtcctggaatttctgggtggagctggccacagtggctcggagtaggggagtctggaccctccggggtggggtggagttgggtgtctcgacctcctcgacctcaaaagatcttttcaaggctgagatccggtccctctccattctacggatatatttagcagcggcgggagtcccggcgtcccgctcagaggcggcctcccctttctcacccccgtcgccctccctctctcagcctcctcctcctcctcytcytcctctaaaaacactctttgtctggtctaatttcttcaatctgttgcaatcacgaatgcatccgaattaccacatttccatgtgctgatcatatgtttgtgctccaaactgaagtagcattgtctcttcaaaacgggaggaaaaagggagcaaaggagagaaatccaaaaataggaggcaggagagagggcccgaagtgggccccgaggagtccggcagaccaccgggtctgcctgcgagagtcccagagtcccggccgcccggtctggtcggtggctgcagaggtcccgagtgcggcttccggcagcctccgtcgacgcggccgcgnattcccgggtcgacgagctcactagtcggcggccgc

SEQ ID NO: 366 - DNA, 1714 bp, Homo sapiens
ggcacgagaaatgtagtaaccaattacagagacttctttaaagatataactgttgtgcttttttgaaggcaaagaacctgccctgaaaaagaatctgacctgaacacatgctgtcctaagcagttagtctagtgtgtctctggggtctatgcaggtttgcagtgtacagactgttatctcctgtctcagtatttgcccttcttatggaattacttttcttcctcttactaccttatttcctcctcttcatttgtctcattagttgtattagccagatatatatttacttgtaggggagggggaatgtcaaatttcagtttctaggaattatatatggcatgagtcattgctatagcatcacagaaattttcatcaacgtctatctagaacagtcaggagttctagttatgagttctgtaatagatatttattgaacatgtgagaacaatgtaaagccaatagttggttcactcaaatatttactgagcactgggatacctccatgaataaaacaaagatcctaacccttgtgaagcttcattttaatgcagggggagacagaaataaaccataaacttaacaaataggtatattttatagtaaatcagtatgtaatagatgcagtgggggggcagggaatatgaaactgtgtaaagggaaattgatagtgcttggggacagtggctgtaggttacactactcagtatggtatcaggaaaggcctccttaagaagaaatgtgtgtaggccaagtgccgtggctcacgcctgtggtcccaccgctttggggggccaaggcggccggatcacctgagttcaggagttcaagactattctgcccaacatggcgaaccccatctctcctaaaaatacaaaaattacccgggcctggtggtgcactcctgtagtcccagctacatgggaggctgaggcaggagaatcacttgaacccgggatgtggaggttgcagtgagctgagattgagccactgcactccagcgtgggcgacagaaagaagagtgtgcaaagacttaaaggaggtggggggagtaagccaaacagatagagggaaaaagcattccaggcacagccacagccatgtcctaagaatcatgcaatgcgttggaggagctgcaaggaggctggtgagtctgggtggagtgagcaagaggagtagaaagaaatgcagtgcgagaggcatcaatacctggggctgttcctggagcaccttatatactgtgaggactgcttttcactaggagttagagagcacttttgggttggggttttttttaatgtttttattgagctaaaatttacataccatacaagtcacccatttgaagtgtaaaattcagtggtttttagtatattcacagatatattcaactattaccacagtcaattttagaacattttcattggctgggcgtggtggctcacgcctgtaatcccagcactttgggaggctgaggcgggtggatcgcctgaggtcgggagtttgagaccggcctggccaacgtggtgaagccccatttgtactacaaatacaaaaattggccaggcgtggtggcacgcacctgtaatcccagctactcggggggctgaggcgggagaattgcttgagcccgggaggcggaggttgcatcacgccattacactccagcctgggcaacaagagcgaaactccttctcaaaaaaaaaaaaaaaaaaaa

SEQ ID NO: 367 - DNA, 2329 bp, Homo sapiens
gtgtgaagttcctaaacatgtctcttccactctttgtctaaactttgtaacgtagatgcagctgactttgcctgtagcctcatagaacccatcccatggctgcagtggaagcttgcggtggctctccagtgaccagaggcatagtgaggtcccagggaggctccctctgtcttgcaacagttatttgtgatctttttctatgtgcctattgtcacaacagagtccggcagcgtcttctcttgagggagcaatttggagaagagctggaacccagactcgcgccctggatgccatcctttatcatccacagcaatcccatctggttgggagcactgctctgggtctcacactgcccctcctctatcctagggagcctgaggcccaggggtggaaagatccagttgcgggtggggggtagtgaaccgcgcaggataatgaaagcaacttgctttggaaatgacctaccgctacccgttgtctgagactgagattatctcagactgtcttctggcttctgccaaaacactcccttaacagaaagcaccgaggggatgggggtaggggggttggggagagtgaggcttgagtgtgaaggaagtctcatatatgcagagctgaaatctccctctttgtatgtccacacttttgtcttgttctctagactgattcttgctattccaaatcctcttccacgttgacagcccttcagatatttcaacactcctctcagcatcctccaagctgaacttggttcacagggtgggattgtgtatgtgcatgcaggaggtgggggtggacagtgccctgggctggaatcccccttagttctaagtgcctccttgcccgcagcttcgagagctgtgcccaggagtgaacaaccagccctacctctgtgagagtggtcactgctgcggggagactggctgctgcacctactactatgagctctggtggttctggctgctctggactgtcctcatcctctttagctgctgttgcgccttccgccaccgacgagctaaactcaggctgcaacaacagcagcggcagcgtgaaatcaacttgttggcctatcatggggcatgccatggggctggtcctttccctaccggttcactgcttgaccttcgcttcctcagcaccttcaagcccccagcctacgaggatgtggttcaccgggcagtttaccccagttaccccccttatactgtggccccaggccgccccttgactgcttccagtgaacaaccggctggcggtagaggaggctgtggtcctcagggggctgtaggtggaggtatggctcgggccagcagcgggaacggcagcgaggaggcctggggggcacttcgggcgccgcaacagcagcttcgagagctgtgcccaggagtgaacaaccagccctacctctgtgagagtggtcactgctgcggggagactggctgctgcacctactactatgagctctggtggttctggctgctctggactgtcctcatcctctttagctgctgttgcgccttccgccaccgacgaagctaaactcaggctgcaacaacagcagcggcagcgtgaaatcaacttgttggcctatcatggggcatgccatggggctggtcctttccctaccggttcactgcttgaccttcgcttcctcagcaccttcaagcccccagcctacgaggatgtggttcaccgcccaggcacaccaccccccccttatactgtggccccaggccgccccttgactgcttccagtgaacaaacctgctgttcctcctcatccagctgccctgcccactttgaaggaacaaatgtggaaggtgtttcctcccaccagagtgccccccctcatcaggagggtgagcccggggcaggggtgacccctgcctccacacccccctcctgccgctatcgccgtttaactggcgactccggtattgagctctgcccttgtcctgcctccggtgagggtgagccagtcaaggaggtgagggttagtgccaccctgccagatctggaggactactccccgtgtgcactacccccagagtctgtaccgcagatctttcccatggggctgtcttccagtgaaggggacatcccataagtagttttgagagggtggatgggttacttgcccaccagaaacagccctagtcccaactccttgcgttcctttggcccctccctgcctacctagaatctgcctgaaagggctggagaggggcagtattgggggactgtgctagctttacccccgcaggacatacacaggagcctttgatctcattaaagagatgtgaaccaaaaaaaaaaaaaaaaaaaa

SEQ ID NO: 368 - DNA, 2207 bp, Homo sapiens
ggtcacgagaaaccaaggtgttggccaggccatgctctctctgaaggctctgggggcagaccccttccaggccactcttctagcgtctgacgtccccagcagtacttgcttccatggcgggtaaggcatcccttacatcatctgcctctgtcattgcgtggccctctctgctgtgtcttctccttttatggatgccagtcattggattttgcgcctaccacaccccaatgtgacctcatcttacctaattatacctgcaaaatctctgtttccaaataaggtcacattctgaggtaatgggggttaggatttcaacacgtcttttttgggagcacgattcaacccataacaatatgtaatatacccaaggttacccatctgggaggtaactgtcttcagggtaaacttggggaagcatcccctctctgtgtgaggcaagattygaattcttttcatagcagcaagaggacagttgaggattccgtgaggtggtttgaccaaaggattttgtctgtttcattttctctgtccaaagcaatgccatccacataattgcaattttttcagaacatggattgagaaatgcttagaggttcgttttgtttttatatgttttaaaaaaatgttacttttaacaatgaaaagagatcattccttatatattgaccagtgattagattttaaatctacttttctataaaacacaacttttattctttcctatctttgtggaaaacattcacatcaaagtgccacatcatgggtatgcatacatgtttgtatatcatagactatctggatgtttttaagtttcttatcgagatataattcatataccataagtgttgccattttgaagtgtacaattcagtggcttttagtatattgagaaggttgtacaatcataattccagaatgttttcatcacctccagaaaagaaaccctgtacccatgaacaatcagtccctctctctcacccccattccctagcaaccactaatctgctttctgtttctatggatttgcctattctggacatttcatataaatggaatcatccaatatgtggccttttatgtctggcttctacttagcatcatatttttgaggatcatccgtgctatatcatggatgggtaccatgttcctttgatggctgaataatacccccttgtagggatggaccacgtttagtttatgcacacatgagcttgagtggctgctctttaaagggtataaaagaaaccagttctccctggaggggaccagggaaatggggctcatggatggcaagaggttttttcatcatggtgttttgtgttgtttaaatttttacattgtttgtatgttacctttaagaaatgaaggaattgatgtttacaattcagtgttcttgtgaaatgcagggtgtggcatttgtgatatgaccagggcctcctcacacctctgcagcttgagattctcaccaaagcacagcacgttcctcacccaggagtagggacagcagcccaggtccccaagggctggccagtttcagctgggagatgggtgactggttccttgcaccgcccctccgcattcacaatccatgtgtccytcggcacagttatgaatcaytccatagtggagccaytttagggtgagggagaattaggttagcaaatgctaacactggaaacgcactgtctgcctggktcctgcgaggctggcacagtgtcaacagctgtgtgtaggagacgtgattgcctggaacccccaagaatgcacctaaaaatcatcaaacaccatcagattacaaaccaatataaagaattgatagtttttctatggaagaatcaaaaatcactttggaaaatagaatggaaatcaaaatcctgtaatagcaataaaaactaaagacttggcctggcgtggtggttcatgcctgtaaacccagcactttgggaggctcaggtagggggacttgaggctaggagtttgaaaccaaactgggtgacatagtgagaccctgcctctacaaaaaaataaaaaaattaactaggcatggtggtgcatgcctgtagtcctagctacttgagaggctgaggcaggaggattgcttgagcccaggacttggaggctatagtgagccatgatcgtgccactgcactgcagactgagaccctgtctcaaaacaaccaaacaaaaaaaaaaaaaaaaaactcgag

SEQ ID NO: 369 - DNA, 1069 bp, Homo sapiens
gcttttgctttctttcaaactttctccttcacagatttttctttattaatcagaatcatactgaccaacatgtgctgaggactttctgtgtgctctgtgcttcacatacagtcatgtgcatctttccagttccacaagttagttatcctcatttctcggggccatagagctagtgagtgacagagctaggttttgtatgtcaaagcctctgtcctacatgacatggcttttcctgctgccttctcccctggtattcgtctccctcttttctcctctggctctgcctggctctcctctggctctgccgagggggtggttttcagcctgggcccttgcagatgtgtctgtggcagcaggccacacagaccgcagcgggctgggcagcgtcctgagagacctagtgaagccaggcgacgagaaccttcgggagatgaacaagaagctgcagaacatgctggaggagcagctcaccaagaatatgcacttgcacaaggatatggaagttctgtcccaggaaattgtgcggctcagcaaggagtgcgtggggcctcctgacccagacctagagccaggagaaaccagctaaagacctgcaggctgcacccacctcctccccttcctaccccctaggatgctattcccttgggctgtggtggaaaaatgagggctggagccaaaatcaaatagcttgggagactggacattaaaggggctagaggcctgatggttagtgttaatgatcctgtcttagggcagaggccaccagggagtggggatcctgagggaaggggcagggatttctccttcttcttggtcctggctcccaagggcttctgtcttcatctctgcatgagctctccttcccagagaccaactcttttttattttattttattttattttttaatttatgtctggagcctggctactctgcatttgggattggggatgctgggtgggtgtgtggtccatgttcagcgttctagcaacacgtgtgtgtgtgtgtgtgtaaaggctatgcagccaaaataccatctggccagacgggcccaaaaaaaaaaaaaaaaaa

SEQ ID NO: 370 - DNA, 1436 bp, Homo sapiens
ggcacgagaaacctacaagagacatctctctatgccttcttaaaccgagtttactccatttcagcctgttctgaattggtgactctgtcaccaataacgactgcggagaactgtagcgtgcagatgtgttgcccctcccttttaaaattttattttcgtttttctattgggtatttgttttgtttcttgtactttttctctctctccttgcccccctcccgccctccccgccccataccttttcttcccctggattttcaccctttgggctgccttgctcatctttatgccccagcactaggtacggggcccaacacgtggtaggcactccatcagtgtttgctgaattgaaaacattgttgactgtggcttctatcagagtgtctaccttttgcagctcttcccctccctcatttaatttgctgcttttaatctacgtggtctgagaatttgtgaaaccagtgttgttagaagtgtatataatctgaatcaataagctctgaatggtggccaagggcctctcttatggcacaaagatgcatggacttcatgacagctcttttggtggctcagaagccattttttatagaatcatggaatctagaatattcctgctggaaagaacctgagagttggtttggaccaattccctggttttccagcagatgaaacaggccaaagaggttaaatgactgggtgaaaatcacatagctgtctggtgccagagccagcctatagtaaagtccctgaacccaagcccggtgctcattccactacctctcacacttcacaacaatttcctcaacacttgaggccagaaagtctgatctctccagaatgatcagcccagaggaatgctgagaaatcacctggaggagggagcagaaagagaaggtttttaaggagggcttctgaatacttgggagatacggaacggaccaaggaccacactccagggtgcattcgttgctccctggggcaccacttctggattacagtgtgccaggtcctttggaggccctaccccttccccattcattgccaccagtgagaaatgggggtgcccctgtgtaaagaaacctaccaaaggtttacatttgcaccttagcctcaatagctacgaaccctagagaagcagctagctggagctcatgtgcaactcctgattctcaggagaaagatggattttaacccaaaattatgagtgagctgttaactctaaaatgtacttgggagataggccaagcgagaggtcatgggccaactaagtgttatccagtagaaaagacagtacactgcttttcttttagtgtttgcttttcctttgctatatgttttgctatttccttgtggcttagaatgtaaaattgattgttaaaagttttgttctgaataaatatttatcttttgtattgctaaaaaaaaaaaaaaaaaaa

SEQ ID NO: 371 - DNA, 1419 bp, Homo sapiens
ctgcaggtcacagattttataggctctgttcatttttcttcttttttctttctgttcctcagactagataatgtcagttggcttatcctcaagttttctgattctctttatgccttgtcaagtatactgtttatatcctttagtgaatttttttatctcagttattatacgtctcaaaaaaaaaaaaaaaaaaaaaaaagaaagtagcttacttggcaatgcctggacactctgctagacagattgcatttgaaaggggagttaagtagaaaaatttgtttcaacgttgtatcaccaaaaatgtctaagtatggttcacattcttataaaagactagaaaaatttaatacttattctaagtgattaaactgtaatgcagaactgtaagggagaaaaattactacttatccaggtactaaaactgtaaatgaagaacaataaggaaattcattaaactgttacttctttatgcacaattcatggttaggcctatgatgagaatatgcaatgagcagatgtgcctggtccttgttgtgtcttgtgctgctgtacaacctgtttcaattttatatgcataaactctctgtgtagctcgaattttttttaagactaatttagagctacagttttcttaaacaatcatgcagttaaactattttcaaatgatggcagagatcctggtggcataaagtaatgctgctgttctctgctgtaaaatatggtgagacatttttaattgtatttttaaaaataattacaattgtatatttttttaaattttggatccaactttttttcaagcctcttgaagcatctaagtggatccctggggttaacaatttataaagcattaatatatagaaggtattaaaagcacatgaagacatattgatatgggaacatatatacatattacaagtgtttgaagcattgtcatagcctttgttagagagtagaatttaacataaagtgggttcctgaaggagcccacttgtgaggatttgaggactaaaataggatctaaaaaggttatttccagcccggttttatggcctatacacagcaagcctccagcatgctgttccacaacactagatgagtaatacatgagatgatatccagggccacgagatctctaagaatgtggcttttacatttttgtatagtggaaaagaaatatatgttcactagaaagaacaaaaagacaaagaagaaaataaaacatctcatcccccaaaataactgctaataatttggtatgtgtctttccaatgtttctgagcatataggagtggtatatttacacacacacacaaacacacacaaacacaaagcacccaacttacacttaggagatttcaacttaacttgaccgctctgaccaaaaaaaaaaaaaaaaaaaaaaaaaaaaaaaaaaaa

SEQ ID NO: 372 - DNA, 2396 bp, Homo sapiens
gggtaagttggcatgaattttccatgaaacacttgactgccatttgcagcatcatatctactttttatgcacctaattatatttttcctttcacttttatgtwyttttctaaaactgccacctaaatacctttccactccgttaaatgtatggagtcaagataaatttctcattcttgctctacagtttaagatgtataagaagtaaacacttccgtggaatagggcttaatttggggctcaaatgttttgttttcctcctgagatgtttttgaatggrtaagactactctggttttggatgcagcaacttttctcctggcatggaagaactaaggactttgataaacagtttcccatgatagtataatataatgaggggcccagtctgctcttgtgaaaatggctgagcggcagcagcccatcccagctgtgtgtgagtagccccgctgttaaaagtacacctgctgggaattgttggcacatgctcatagcatatgctctgtgggggaggtgcttttaattccaagaggagcttttctcccacatctgcggatgcagaacaaagatgcagcaggactttagaaaacaggagtgtttctactgacattttattcattgctttgttagtcccgcaaatggagcaacttctggttgtttgtaagcagaaaaacaaaacattcaaaaccaaaaacctaattagtacttttgtcctttatatccctaggatgctctagggagtagaggtggcaggcatctttatcttcacccactggcacattagcagcttatgcaacttaggaagtcactgggagatgagtcctaaaagcctgaatttcaggatggggaggagataagaagcagagaactttgggagaccatggggcatttagtcctggcatagacacagaatggatattcacaggaagattcctgaggccagatatgcaggagagcacacattgtcacaaggggtgtggtgggaagagaggtgctggatgcctaagacagacttctgtgcttggcagattgactgagtgttgactctgaatactttgtggtccagtccataataggccagtcactcctgcctgatgcatccctgttgcactgttcataaaacctgtatcatatggggaagcttcaaggctggcaggcttttcatcaagtaatcatcattccatgttcctacgtatccttgaaatcaaaaccaggcaatatgtgtgtttttggttttgttttacawaaagggcatwcaatgagacgaattcttaagataatgcasatacagaatcatcaataaagtttcaaagagtttatgaagaaaaggtattttcctttcttgtaaaaaatgttatatatatataatattctgatctgcattcaccttagggcttagctcttattttatgaattttcaggctgtgatttgtgttggatggctaagctctaaaataatgcaaatagccccaatctttaaatatagcggtgctaagttgaacaagtaacacaatacagaaaatgctgatatgaatacttagtaataatacaaaagttcctgctaaattatatatgtgtatcactgcctgactagaaaccccacttttcttttctaatccagcacaaaatcaaactctgattctacaaccagtctttttaaagggcaaaaatgactcaacacctttgttttgtatggaaaacttttttttttacactaactgcaaaactgctttaaaaaaaggcttattcaggatagataagcatgtactccttttttaacttgctggaagacttgcccctccaaactagcacccccaaaagacaacttctttcagaaacggggtgttttacctaaacatagtagcttacatgttagccagcagtaggtcggcactagtgttttccacggttatcacctttgacaggtgatgtgcatctatagatagtggaagccaccccatgaggaggtgttaatagcagcatggtttcacttttggtaatcaggtaatcatgtgtatatacttagattcgcattattttaacatttctctgctactctgcacttcaggttcgttaagctattttaataattactggggttatggcaaacaccaatggaaatgtatatggcaactgctttcctgagcaagtgtgatttgttttatggctgttcaagttataaaattgttcttacattgtaggtaaacaaaatcttgatgtttttaaaggtcactgtaacttaaggttcaaatttctggcacagttttattagtattcacttcggaagctaataagataccatggttttctatgttactcccattgtaacattagtaaagtgactttcaataaaagatttatgttattttgaaaaaaaaaaaaaaaaaaaaaaactcga

SEQ ID NO: 373 - DNA, 1984 bp, Homo sapiens
ttttttttttttttttttttttttttttttttttttttttttttttttttttttttgccatattgaatcaatatttatttcaggacatgccatgtcaaaataaaacaaagagtcaacccttgcctttaacaattatattgtattataaaagcactttacaactccatcccatctttaagttactggtatgtgggctaatgattatctgtaagcatttctctattcagatccataatccaagtgctctctgaatattacaaggtgacaataagtgggaagtggaggaggaagaggaaagagaggggactaaggttctcccagtttaaggttttgttccaatgaggggatgaggaagtatgaagatatttttgttgtcttttcatctttatactgtgttaagtaatgcttacaacataaattcagcaggcttttcctgagctgtaactcagaagttttcgtcctgcaaacaatgtatttacaaatgtgtttattagcttacacagcaatctcacaataactagtaaagattaaaagggcacactcctagtatatttgtttgcagtgttttaagggaaatacatattgccatggtgaagctctaaatagattcaacgaaacatctgaagattgaaagttgttaaaaaaaaaaaaaggcaaagaaataaatatcaccaaagaaaaaagattaattgtagcttaaatataaaactaaatcaccagttaattaaactatacagatctaatacaaaccaaaaccagcctgaaagacccaaccttaaaaaatgctaaaaaataaggcataaatctgcataatattgagttttatttccattctctcctttccctctactatgtatgctttacctgatctgcctctaggggcttacaagaaaacggtttccggtttccgtcttcaatttgacctcaaatgtcctgagcaaagtttttgttattctgctgagggttcttttgttggtaagctttagacatcattatttctactaattcagtagttttgatcgtagcgccaaatttaaattcttccactggttcttctggaaggaattaaaacttttacagtgccttgcctgcacagtattatgtttttaaaaaagaaaacccaagcaaaatctattgcttaaagaggtttcttattttttaaacaaacagaataactcttgacaattttaaaaccttgggagaaacagttcattagaacttcattttcttaccgtgaagaattaaatactaaaaacctgttctgaagcacttggttaattttctctcccagagtctaataaagcacatgtgaaagagccatttgttttagtcagaaatacatcttatgttcttctacttctaagtactcagtatgttctttaggactcattttgaagatgcaccaggagccttttctcattcaagcactgcctaccatgatggctgaattttgacctcaaagaagaccgtaatttttatcagtgctcaagaataattttggacatcttggtccgtagcctacagcaagtggtatctgtaaaattaaaggataattccaatgggcttggtagaactgctgctttgccatctcttgtttgttttgaggaagtcgggggaggctaggtaagaatagggtaatagggaatgggggtaagtgagaggtgagaaaagcaaggagagataaagtaggctgtgaacataccgctcgttaaccaagccatactcatactgttgagatttccatcattttgaagtacattatcataacattaaaaaagaaaaaaatgttaagaaaatgtatctaatttttaaagttatcactggaatatgctgaaatattttggctttttgtaaaatataaataatgaagacactgacttttgttgtgcttgtgaagctaatagatcatctccacgagacaggcagcaatgatgaattgcaatacgttattactgaagggaaaaggttcaagccaatattcaca

SEQ ID NO: 374 - DNA, 1425 bp, Homo sapiens
ggcacgagaatttgaggagatataaagtacaggaatgggatctcagtacaatgctgtccacctggtggtgacttttctaagcactgtggtatattgggaccttagggctttctttgtgaatatgtatggtcattgttaatatcttgattctttgcttcttattgacaagtgatgattataattcaatggacaacctgaatcttggaggaagggaagaagatgctgaactctctgttaatttagcataaaacttgactttttgtattctagaaattcaagtctatacaggtataataaagcaaaaatatgtaatttatgttgcttctctcaatacattaggtaatttagtttgaaaaaaaactacctttaaaaattgacgttatttttctcttccaaaatatttccaataaacttacatattgtcttttattaacattgtgttaatgtccaagtttataaatagaatttttgtataacaagacacattatcatctaattattttttattctagatgtgaaatgccaatttacagaatattgttttagatttctgtataaatgttaatccctcttaaggcctacttaatgtagattaataaaacaattattatagtctcttagaggttcacattacaattccaaattgtaagtgattctatgctttcatgattgtctaagcctgatataacagtcatgttcagtttttttaatattcttgatgttagtttttgtttttgctataaatacactgccctggaatttaacatatctcttctttttgatgaaacttaaacagtaatagacaaaattaggctagtttttattttttcatacaacttttaggattaaaagttgccttctcaaaaacatgacaatacttagagatacttatttcattttctgtgtctgcctcaaattttccatttaatataaaaatagatatatttaattgtttataagtataattgattggcatatgcacatgccatcttagttttaacacagggtttggaaactagataaacaagattattttagctgtctttttatacatgcaaatggaatttaaacctggatggttcaagtgtagttttgaaggggaattaaaacataataggatttctggctgggcatggtggctcacacctgtaatcccagcactttgggaggccgaggtgggtggatccacttgaggtcaggagttcaagaccagcctgaccaacatggagaaaccctgtctctactaaaaatacaaaaattagctgggcatggtgacgcatgcctgtaatctcagctactcaggaggctgaggcaggagaatcacttgaacctgggaggcggaggttgcagtgagccgagattgcaccattgcactccagcctgggcaacaagaacgaaactccatctcaaaaaaaaaaaaaaaaa

SEQ ID NO: 375 - DNA, 1953 bp, Homo sapiens
tgaagaatctcaaaaagcccacccaactttcagctgacatttccaccagccctctcatacttgttaacaattggtatctttgagtatttaccaaagagctgccaaggttacagtgaacagagttttgaaaggcattgctttaaaggaaaaaagtataggtatgtgtacatatataatacatacaaacacatgtacttctgtatacatttacatatttttacaattcatactttaatttctaggctataactcagaccaaattatacctaaaagttccaacaaagtccctttttcaatatcacattaccaaaaagatggctgcaaatgtaatttggacctttcattaattttgttttcaaaactagaataatctcaccacagaatcagaattttctaccgttccacacccaaccccttcaaatacacacaaccttgttacttttcactccagcaccttcatacgcttttctccaggaggaggttcttgcagctggaaacagcctattttgtggtcactgtcaagtggatggatattctagcgctcccaaaaaagcactatggccttatatgcagggaaggcacataccaccaagttcaatgagaaatattagagctaaccgtactctcttctctgcgtacgttcgagtatacgttgcccatatccctcccatattttctttttgctgcttttgctctggaactttgcttttagcagggaaagcagctgtcccctgagtgctttgaattgggaatatacccagtgtgtgttctcccccctcttacgaggctacataacacatctatgatgctgctttaagtttttagaggctatacctcaaagtagctgcggattttgtctcctgcactgccaatatgcaactgatcccgcttttattaattttttgaagaagtacacagaatttttacagaatgtagtattttgatatcattaagtaaaccaatcagaaaactccttgagcaatagttgtttctttgtcagtttcagttacaatcatctttacccattaagacttacattaacattccttttatataaagagttgtatatgtccacctaaattcctatgtccacacttaacctttaaagatgtacattgagggaatatcaaaaaatagcgttcatggctacgaatatgtagaatgttaaaagcacagcaaactgcactgcacttataaagcaaatctattagaaaaaaagcatttttctaaatgctcaaatgttatcaaaatactatatttatagaagtaatcttctctgttaacagccaagatttgctgttagaaataactcttgtgagttttatattgkgctttttggaggttctaatcatttcagcagtagcgtcttaaacagcagtattactataagcagttgcttcaaaatgtgaattaacttgttgaaactgtggctttaacatccatgtgactagtgtatatggtatttgctctccattagcaaaataattcattgttaggtaaacttcactagtgcaaattgcagatctgtgagcaatgtttcctattgaatataaactactgtctaaaatatacatatcagcagcccagcctttatcaggaaaattatacttggcaagttgctgaaaatgcacaaagttatgaaagttaaaggtatgctgcaaataactagccattattctatgtattattaaatatttactagttctgttaaaagcagagcagaagttagacactaaggatctctttgtgaactctgtgttctctatattagattgctgtttatatgtaagaattttattgcttatgtggcatacaatatttataactataaactttatagaagtacagtattaaagtcagtggtacacagacattctgtacatatcctgtgaaacgtgctgtcatatgaaataaatatatctgtctttaaaaaaaaaaaaaaaaaaactcgag

SEQ ID NO: 376 - DNA, 996 bp, Homo sapiens
ccgactaattccgacaaaagccggagctccaccgcggtggcggccgctctagaactagtggatcccccggtctgcaggaattcggcacgagctctatctctgttctcaggaatccagttctcaaggttaatagaattggactatcccataattaccatttgtttgatctcgttacacaggcagcactaacaccagaataacactgatgttgccatcagcagtcacacgactgaaacatgaggactgccctgcacgtgctgctccgcagcctgctgatctaacggccgcgcccgcgtctgttgcttgagtcaccacggctgttacatcccgtgctctcccttctctgccttcttggtgttggttctgcgggcgactgcccatgtggccctcagccccatcctctgttcatggctctctgccactcttgttgtccaaagctctttctctgtaggttccatgggaagagctcatgggaacatgatcttcgacctcatgcttgctgatcatagtttattgtgccttttatcgttgatggttttgctggttacaggattcttggctgacatttccttgagtgtcttaagttattccatattcttctggcagagagttgccagatttagcaaaaacaaataaacaggatgccccgaatattgtgtgggacatttttgtactgaaaacatgatttgctgggctgggagcggtggttcgcgtctgtaatcccagtactttgggaggccaaggcaggcagatcatttgaggtcaggagttcaagaacagcctgggtaacatggtgaaaccccgtttctgctaaaaatacaaaaattagctgggtgtggtggcgtgtgcctgtaatcccagctactcgggaggctgaggcaggaggatcacttgagcctgggaagcagaggttgcagtgagccaagatcacacactgcactccggcctgggcagcagagmwaagctccgtctcaaaaaaaaaaaaaaaaaactcga

SEQ ID NO: 377 - DNA, 1165 bp, Homo sapiens
gggataagagcttcagagtttattctacagaaacagggaaattgactcagattgtatttggccattgggatgtggtcacttgcttggccaggtccgagtcatacattggtggggactgctacatcgtgtccggatctcgagatgccaccctgctgctctggtactggagtgggcggcaccatatcataggagacaaccctaacagcagtgactatccggcaccaagagccgtcctcacaggccatgaccatgaagttgtctgtgtttctgtctgtgcagaacttgggcttgttatcagtggtgctaaagagggcccttgccttgtccacaccatcactggagatttgctgagagcccttgaaggaccagaaaactgcttattcccacgcttgatatctgtctccagcgaaggccactgtatcatatactatgaacgagggcgattcagtaatttcagcattaatgggaaacttttggctcaaatggagatcaatgattcaacacgggccattctcctgagcagtgacggccagaacctggtcaccggaggggacaatggggtagtagaggtctggcaggcctgtgacttcaagcaactgtacatttaccctggatgtgatgctggcattagagcaatggacttgtcccatgaccagaggactctgatcactggcatggcttctggtagcattgtagcttttaatatagattttaatcggtggcattatgagcatcagaacagatactgaagataaaggaagaaccaaaagccaagttaaagctgagagcacaagtgctgcatggaaaggcaatatctctggtggaaaaaactcgtctacatcgacctccgtttgtacattccatcacacccagcaatagctgtacattgtagtcagcaaccattttactttgtgtgttttttcacgactgaacaccagctgctatcaagcaagcttatatcatgtaaattatatgaattaggagatgttttggtaattatttcatatattgttgtttattgagaaaaggttgtaggatgtgtcacaagagacttttgacaattctgaggaaccttgtgtccagttgttacaaagtttaagctttgaacctaacctgcatcccatttccagcctcttttcaagctgagaaaaaaaaaaaaaaaaaa

SEQ ID NO: 378 - DNA, 1381 bp, Homo sapiens
gagggtgaagtgtagctgctccctcctctccccgttcctctctgtccccccatcaggggaatacctactcattcttcaagccccggttcaaagtcgcctcctcctgatgcccacctgctgcaggaattgaacctccactttgcatctatagtgcttcagaccagccttgaggagaatgtcactgtggtgtggtgtagccatctatacttgtcctcctcctacaaggctgtgagccacttgaaggcttctgatgaagcaggaacaaaaatattaagatgtgaatatttacagcctttcttctcctgccatgttcccacatctgagctgatcaaggtgatacaaagtggaagatgcttcactgaagaaagagcataaagttagcagcaaaagctggatcagaatagaatcgatccagtcaactagaggtggaggcaagagagagcagagctagagttttaggagagaaaaaggaaaaagaaaaaagggggtggggagtgtagtgacctatggcactttggggaaaggcaggcctgaagaggatttggagagagtttctgtctgttgtacgacatagttgcttttcccaccttgccgcttgtttgggagttttgcaaaggcttcattgccaatcaatgcttttggagactatcagggtttcttctggatgtgacccaggcttcaaatggcctaagatttgttcaggttgcattgtacattttgggcccagctcagcaggtatgcagaataatacaaagatgagacaaaagagcaggtggagggacaggaggaggagtgcacacaggctgtggctctctgtccctctctgggcagaccaccatggtggacaatgctcatgcgttcatgacaacttgttccccagggagccccagattttgatgaaccatctccccaggtcccgcctctcccaaattgtggataaataaagccctaagatttttaataggcacaaccattgaggatgtatcagaaatactccctctctgtggttttggtgcagacaggaggggatgggtgttgggtgtgattctctttcagcctttctttcttcccctctcaagaaagcttatcaggaagcacacaagcacaatacttctagataaatattacttcatttgactccttctaggaatcttgtgaggtgggattaatgttcttattttaatttcaacttccaattgtttattatcagcatgtagagatataatttatttttgaatattgacctattatgaaattttactgaacttaatacttctagttttatttttgattgattcttagagttttctatgaagacaatcatgttgtctgtgaataaagatggtttctatttttcctttccaaaaaaaaaaaaaaaaaa

SEQ ID NO: 379 - DNA, 775 bp, Homo sapiens
aattcggcacagcagagatggttcttttcaatgcccatggttgttttttgatatgtggtctgctggtgagcagggccatgcacaatgtgtcagaaggctcttgatttgcagaaatggtgtaaatggagaccccttttggccaaggaagtggggaggcgggcacaaacataatctctgttccacttggaatgcttcgcagggagtctccattggtgggttaagcacgatcaccaattgatcacaccagcctggggcagagggtgtggggacagggaagaagaagggagtttgagctccaggtccctgcacgggaaaaacattggcaatagcctccttaccaaccaaccgtcccatctctctgctccttctgacttactaggatggcctcagagaaggcacagtgttaacccagccttatcacagttgtggaagcgccaggggaatgggagagtcaggggattaataatagtaggagcaatgccttacatctagtagatgcttcacactttcccagaagctattacttaatgaatctcacttaaattgtgtctgtaccatattagaatatcctgtgcagggataaatatgcccacttgaccgtcttattggaaactgcacacagtgaggaaatgcagcttgttcaatgacaagtggcagagccagggctgggactcaaaagcagtgagatctgattgttggtccagaagtttgttattctctcagcttgattraactgcccttactcctgtttamaaaaaaaaaaaaaaaactcgag

SEQ ID NO: 380 - DNA, 1474 bp, Homo sapiens
ggcacgagcagtgtctgacatttcaatgttaaatttgtcaccgttaaggaaccaatgttggtacattactactaactaaaattcatttatttggattttgttagtttttacctaaggttcttttttggttccaggatcctatccagaatacgacaatacatttagttgacatcttcccttagcctatctgggctgtgatggcatttcagactttccttgtttttgatgactttgatggttttgaggagtattggtcaggggatttgtagaatgtccctcagtttgggtttgtctgatgttttcttcatggttagactgggattatgggtttgggggaggagagtcacagagataaagtgccgctctcattgcatcatatcaaggggaaatactatcagtacggcttatcactgatattgttaacctcggtcaccaggctgagctagtgtttgccaggtttctttactgtattgttttcccgtactcgtctttttggaaacaagtcattaattgtagaccacactcagtaggtctgttttcttaaaggggagctgtctataaaattatttggaattcttctgctatggatagtctttttttcttctccgtttatatatttattcaatcatttatttatatatgtatggactcatagatggttattttatacttggggtcataatcctatactactttatttattttgttgctcaaatttttctaccaacaggacatactccattgttttgttttttgagtacttccttactttctggcactagaagaagtccagactcatcttgtatatttcctgccccagccctagaatcagccatttttccaaggatccctggttctattttttggtgaatcatgttagaaaccaagatctggttactcagtgtgctcattgctgttggaatatcatgacttctaggccttttcagtgtatagacctggaaaatatatgtatgtatacacatatataactattatctgtatctatattgaggtaaacatgagttcatactgatgactttgactatcagtactatatagttcattctggctttactctgctatctattacctccctctccaaaagtgagaaatctggctcacgccatctgacatctattaacttatttgttcagtcccatcgtccatgtacagcacttttagaattgttaacctgtatctccatgagaaatgcctttaccaaaaaagaacagtgcttatatacagttctttttgttgttagagtttccagtttcaagtttcccaaagttacttaaatcaaaccttttcccctgacatctgtattttaattttatttttaataaattgatctaaattacatggtaattatatataaagcttataaaaaatttcccttgcccaactaaagatctttagctttagatgtgttttttttttcctcctgacttttgtgaccaaaaaaaaaaaaaaaaaa

SEQ ID NO: 381 - DNA, 2100 bp, Homo sapiens
ggcacgaggtgaaattggtgtgtacattttgggcaaagcaaagatacaaatgttattcatgcggtgcatcagtcttaaaggataccagtatccttctagcattaactgataaaattaactctccaaagaccaaaagaccagctctcactttctccttcaaaacatcttacactgaaatgcagatttatttgacagcaacttcaattttcattcactcacagcatgtgaaattattttgctgaaccttgtttacaacttatttactggcatcttaataatctattagcagaaattggtgttctctgtgtgtagtaactgttcctacttaaagagctggctcagcctaggctcctgaccagatctggctgacaagctagttttcaaaaccagtgaagtggtttctgcagggagaactgtgcttgcttttgataattgcctcagttttatgaaatcaatcagcctgaagggaagacctcattacagatctgacaagatagactccaatttcaatactagaacaactctctgtcctcaggctctgaaatctgcaattatttattttatttagacagagacaaccataatagagtacctctgggcacattctcagggaagtactcaacagataacctaatggtcagtgtgctaggaacctgcccttttcctgtcactcaggtggaaaattggtcaacaggaattacagcatggcctagagccagctcaaagcagacactgatgaatcaccatctttccaatcccctaccccaaaagatgtggagagaaagggtagctgctgtaactgttcccagggctaaactacaacaaaataaggctttctcttctcagttcctctgaagactgccagacagactttattctaaggaaaatgatagatcacccatctaccatctgtcactttgaactgttctatcaaatcaacatttttttgaactttgttttcaatgaggaatgtgattttgctgtgtttcccaagccttaaattggacaagggaaaaaagtcctgaagtgttcttcttcttgaagttggaaatatgtattttgcttttctgctcacggaacacaaacaccttaacagatttagttcagacttttctcgaataattcaccctttaccaggcctgggagatgtcagccccacagaaaaaacacagagaacattatgagtgtacgaaaatatggatttagagagaaatgatactctctctagtccagctgtagtatcactgctagcagtgttctgatagtacagcacccagatggaacagagcattcctgaaagatttgggaggagacatttccattgttaggggaaaatgtgattctttcatgttggacagttcaaggtagtgatgaatatggtctcctaaacagaatccaagcaaagagcaatcactgactactcccgcattatttattcatgatttactttaatggctttgtgttattaagaaaaagtaggttagaagaggaatgcaaagctaacatcttccaagctgtaaatagactgtagcctggaggccgaaggagccacactactcaaatgttcttattccatttttgagacaaatttatataaaccccccattgggttagaagggcattgacatttgtttagtgtccaacatgtgctacaccttaaacatacaatctcttatttaattttcctcactttgctgtaaggggggcattatcatccccattttacaatgcagaaacagtctgagagagatcaagtgacctgttttatacaccttgtaagtggcacacttagtaagtggcacacctagtaagttgcagatgtggctttgaatgcagatctgactctagagcagcactgtccagcagaagtttctgggatgattgaaatgttatataaatatgctgtccaaaacagcagccactagctacatgtaactattgagcacttgaaatgtgattagtgcaactgagcaactgaacttttcactttttttctttctttctggttttgttttttgttttttgtttttttagatggagcattgcactccagcctgggtgacagagcaaaacccctgtttcaaaaaaaaaaaaaaaaaa

SEQ ID NO: 382 - DNA, 1607 bp, Homo sapiens
ggcacgaggtcaccctaacaccagattactttccccaagacatgccaggatcatttcttctagcccagctgtgttcgaactagcccttcaccaagtggttcagtttccttggtggggcctgtatgattgtgaggggctgggggaagtctggaggcgggtgtcagggaagtatgaagcccagttcctgccacaaggttcacacccaatgaatggtcactgttattacacaggatggtaggcttgtggtttgttttttccctctattctttggtcacttttctataagcatattatttttagaatcagaaaaaaaaactcatgaaacaaaagaaatgtgatgagtgatttacagggagcaaagggcagagagagagagacagaaagagagagagagagacagatgctctttagaaaccgtggctctgggccccggaatttaatctgcagttaaggaggctgagagaggcaggtgggtgcacccacaggtctcctaactgagaacttcctgcctttgagcccacctactagtccccaggttacagatctcagggaaaccccagggctcccaccccctccacacacacacccactcccagtcaggcggcctgtgagcctgggttggggctaaccggaacccagccagcctctctcccaccttctaccttctgttctcaatgctgtgcccctgggctggggcagcctgagctaggtgatgtcgagccaggaacaagagccaaggaccacagaacctgcttttggttccacatgtctctgccccatcttccttttttctttttccacctcgtttctttttttttctcttttctttctctctcccttcctttcctttcccttgcctcccccattccccttcccttccttttctttcttccttccttcctttctttttctctttctttctttttctttctttctttctctttctttctttccctctctctccctcccttccttccttcctcccttccttcctctctttctttctttctttctctctttctctctttctttctctctttctctctttctttctttttcttagagaaaggatgtccctctgttgcccaggctgcagtgaagtagcacaaccatggctcactgtaaccttgaactcctgggctcaagcaatcctcctgcctcaacctcctgagttgctgggactacaggtgtgagcaaatgcacccggcacttttctccttttttattttaaatacttttagagtaattcctttacataaattgaacttcataaaaagttagaactttgcacattaaaagacactatcaacagagtgaaaagaccatccaagaatgagatacagtatttgcaaatcatatatccgattggggattaatccaggatatctaaagaactctaaaactcagtaacaacaaaaacccaaacaacccaattcaagaaatgagaaaaggacttgaatagacatttttccaaaaaagatatacaaatgatatactcatgttcataacagtattattcacaatagtaaaggtggaaacaacctaaatgttcactgacaaatgaataaataaacaaaatgtgatacaataaaaaaaaaaaaaaaaaa

SEQ ID NO: 383 - DNA, 1432 bp, Homo sapiens
ggcacgagagaaagttcatcctctgggcttggacacagtagtgatgacagcagttcacatggatgtaaagtaaatacagctccgcaggaatcctgaaaaataattctaatgttactatcttaggaatagcaaattatgtccagtcatagagaagaaagcttcataataatacattcttacctaaagctcactgtcatgatgttaggtatttaaattcttaaagatgttgggttgtttattagtggtatttttatgttgtcttattttaggtaagcttctgtgtaaagctaaaaatcctgtgaatacaatactatcctttacaggcagacattattggtaaacaagatcttgccctccaatgaaatgacttacatgttttaaaaaaccgagttggttttattgaatttaaaaagataggtaactaagtagcatttaaaatcaagatagagcattccttcttgtatcagtggggcagtgttaccataaacacggtgtatatgttgttaaaccctatgaagagtaacagtgtagaccagactgcctctctcagatatgtgcctgatattttgtggatacctcccctgcactggcaaaacactatgcttttgggtgttagactgaaatattttaagagtatttaacctttccagtattctgtttcacgcttagatggaaatgtatcttatgaatagagacatattaaaataatgtttacatcttagaaaaaacatagatagtgctagtaatattacttataactgtaatatatagattcagaaatacattttcattatccaaaatcagcttcaacaaatggtttctggagacaaataatttgttttcattatcattgtataatcaggttaatgatttattttttgactaaatgtgcaatttcttatcactagataactttcagtatcagtggtggttacttattacttaaatcagaggaaggattttataagattcataaatttaattttaccaataaatattcccataatttagaaaaggatgtcgacttgctaatttcagaaataattattcatttttaaaagccccttttaaagcatctacttgaagattggtataattttcataaaatgtctttttttttagtgtcccaaagatatcttagataaactattttgaagttcagatttcagatgaggcaacattttcttgagataattacccaagtttcatccatgttgaatggtacaaaatatttctgtgaaactaacaggaagatattttcagataactaggataacttgttgctttgttacccagcctaattgaagagtggcagaggctactacaaaaagcaaccttttcattttcactaagagtttaaaagctattgtattattaaaaagtctttacaatgcttgtttcaaagaaccaacagaaaaaaaaaaaaaaaaaa

SEQ ID NO: 384 - DNA, 2280 bp, Homo sapiens
ggcacgaggaattatgaagttgtgtgccccatgatggggagtggactttgagatgagacactggcctgcattataagggacctgtcatttccactggattttagtttgtgtggcttaaagagaatgcctttccagttaggtatgctcgtggctttgaatataaatgggaacagtctaacgctagctattttgctcctttccttctgattcccagctggtggaaatcggtgctgcgtactcagcaaccttacatagggcaggtatggtctcatgagctgggagcaagacaggttttctttcttgaaatgaggtccccccacttccctttgtctttgctgctttgctgctttctttccattgtcttgctgctttccttccttggatctgtagacactcagagaactgcctggccagaccctatagaggtacaattaggtcactctagggcatctgaccatgggtggcagttttccacaaaattcacttgttctgtgggttgaaggaaatatcaaaccagctggcaagttctaggcctcttgtcttcttggtatcttctagtcaaatttacagtatatcccttctgatttaatatttgcaggaaactgatgcatggagatgctgacatcccacgtgttaattctggggcaccctgatcctattctctaggatggcattgcccctttctgagccatcaatccaagtcctttccccgtatttctatgtggttggtatataattcagtgagacactctttcttgctcctgtacttgaatgtaggagtgtattgcagtggccctgaagatcccagtagagtctggggagggttgattaggacagagtgatttccaccctgcccctcctcaagcagaggagctttcttcaacctttttctctttgaagaaattgagactcagggaagaagtattgtcgcagatgtgatgcggtgagtcactggtttttaaacctctgttttggcgatgggctgggtatggatgagttaaggtttattcccctaaatctgtattacactctaagtcaacattgtgtccttaggctgggcgcagtggctcacgcctgtggttccagccctttgggaggctgaggcgggtggatcacaaggtcaggagatcaaggccatcctggctaacacggtgaaaccccatctctgctaaaaacacacacacacacaaaattagccgggtgtggtggcaggtgcctgtggtcccagctgctcggggggctgaggcaggagaatggcgtgggcccgggaggcagagcttgcagtgggctgagatcacgccaccgcactccagcctgggcaacagggcgagactccgtctcaaaaaaaacaaaacaaaaaaacaaaaaaaaccattgtgtccttaaattgaatatccttgatagaaaagggtagggccttagcgtactggctctatggaatacgtactctctgtctttcagtagaattcagcagtcattgttcacctgctttttgccagatgttgagctaattgctattggagtaggatggtaaagattggtcttggtatgcttggttgagaaggcacaactttttacacatgtgggcctgcaaatatctatgcagatttttttgagactttaaaaagcatgtttaaaagattatttcttctaatagagactccaaaagtactcaattactgtcttatcctctgggatcctagttcctattacttgtgcttgatttccctctgctgattagataagttaccttgaaagaggcaaagaaagccaaatgggaattgacttgtttttcttcctgtcattaaaaaaaaatggaaataatttcaaatttatagaagttatacaaataaaattatacaaagaatatttgtaatcctttttatccagaacctcctattgttcgtgttcattttaccccatttgctttatcatttgcacattctctctccatgtatcaatacataattgttttctgaatcattaagaggagagataattggcccaggcacggaggctcacacctgtgacctgagtactttgggaggctgaggcaggaggattgcttgagcccaggagttcaagaccagcctgggcaacagagtgagatcctgcctctaccaaaaaaaaaaaaaaaaattagtcagacatggtggcatgccgctagctactttggaggctgaagtgggaggttgagactgcagtgagctgtaattgtgcactgcgctctagcctgggttacagagggagacccttgctcaaaaaaaaaaaaaaaaaaaa

SEQ ID NO: 385 - DNA, 2261 bp, Homo sapiens
gtggccagtgccctgggctaggagagggataaagtcagctgtggccaagcagaagcagtattgcaggggaagggtggggagagactgtgctatgagctctgagcaggaggcaggacatggagagaagggtgggagacggacagagccagctgtgccagccgagggaccagagtgggcagtggggacggagcacagaccaccgcccacaagggtctctcctgtgacttctggcttcccgagggcagaggctgggctgggcatgtggcggctggcacccaggaggctccgccaggtccacgccaagccagcctggctcagctctggcttcctgctcacacgctggatgcctgtccccaggcctcctgacagggctctgcagcattggagaggcttgtggtggggccctcgctgtagaacaggcactgccagtgctcactgactcctcattgcagccagggcaggggcgctcccaccacctcggtttcagtcaggaagctggggggtgctgggatctgccagcagctctgtgtgctccccaggtgggctgcccggggccctggctctctggcttctacaccagtgcccctgcgaagcctcagcgcccaaggtctttgcaagccctgttcctgcatctctggagagggctgctccaggtgtgggcctggccagggcttccagaccagtccaggcactgcacctgcacattgacccccttctccactctctctcatccttcagtagccacaaagctggcagcagggtactcgcagatttgtgaggagagccgagcccttgctgactgtcctcccgtgcacggcagagtgaggcggggctcctggcctccttaggggctgcccgctctgggccacacagccagagaaacactgtccatctggctggcttggcctgtggggtgcaaaagaggtgttttcactttgctttggaaacatggaaattaccaagtgacttaaccataacaccaaatgatgatttttaaatttatgaaaattatggaaccagatgggacacagggaaacgagaacgatactgaaaaggtctgagtcctgtggggggtccaggtcccgcaagacagctaatcaggtgcccctgtctgttattcgggtaaatgtagcagctgggtccaggctcgggcagagcagctttctacagcaggggtgtccgccctctcccggggttcccacggggttcccaggggcctcttactctgccacgatgtgggagttccaccaccacagggacttgagcggcagctccggctcttacgtagaaacgcgcaactccagtccctaggttgtgtccgaggttgctatggtgccatcccatcttgccgctcactctgcgactgtgcggagaaacgcaagtgcccccgaagggtgggcgtggcctctgatgaatgcacacgttggtgggaggtggattccgtttgtacgaagcgcctcttcacgcgagcgttcacctcggtctcccctttgcttggtccagttccagaaacgccgctggactgcgaggtctccctgtggtcgtcctggggactgtgcggaggccactgtgggaggctcgggaccaagagcaggactcgctacgtccgggtccagcccgccaacaacgggagcccctgccccgagctcgaagaagaggctgagtgcgtccctgataactgcgtctaagaccagagccccgcagcccctggggccccccggagccatggggtgtcgggggctcctgtgcaggctcatgctgcaggcggccgagggcacagggggtttcgcgctgctcctgaccgcggtgaggccgcgccgaccatctctgcactgaagggccctctggtggccggcacgggcattgggaaacagcctcctcctttcccaaccttgcttcttaggggcccccgtgtcccgtctgctctcagcctcctcctcctgcaggataaagtcatccccaaggctccagctactctaaattatgtctccttataagttattgctgctccaggagattgtccttcatcgtccaggggcctggctcccacgtggttgcagatacctcagacctggtgctctaggctgtgctgagcccactctcccgagggcgcatccaagcgggggccacttgagaagtgaataaatggggcggtttcggaagcgtcagtgtttccatgttatggatctctctgcgtttgaataaagactatctctgttgctcaaaaaaaaaaaaaaaaaaaaaaaaaaaaaaaaaaaaaa

SEQ ID NO: 386 - DNA, 2455 bp, Homo sapiens
ggcacgagggccaatcgacacatgtccctgctgacagccttcatgcctgacagcttccttcggccaggtggggaccatgactgcgttctggtgctgttgctcatgcctcgtctcatttgcaaggcagagctgatccggaagcaggcccaggagaagtttgaactaagtgagaactgttcagagcggcctgggctgcgaggagctgctggggagcaactcagctttgctgctggactggtgtactcgctgagcctgctgcaggccacgctacaccgctatgagcatgccctctctcagtgcagtgtggatgtgtataagaaagtgggcagcctgtaccctgagatgagtgcccatgagcgctccttggatttcctcattgaactgctgcacaaggatcagctggatgagactgtcaatgtggagcctctcaccaaggccatcaagtactatcagcatctgtacagcatccaccttgccgaacagcctgaggactgtactatgcagctggctgaccacattaagttcacgcagagtgctctggactgcatgagtgtggaggtaagacggctgcgtgccttcttgcagggtgggcaggaggctacagatattgccctcctgctccgggatctggaaacttcatgcagtgacatccgccagttctgcaagaagatccgaaggcgaatgccagggacagatgctcctgggatcccagctgcactggcctttggaccacaggtatctgacacgctcctagactgcaggaaacacttgacgtgggtcgtggctgtgctgcaggaggtggcagctgctgctgcccagctcattgccccactggcagagaatgaggggctacttgtggctgctctggaggaactggctttcaaagcaagcgagcagatctatgggaccccctccagcagcccctatgagtgtctgcgccagtcatgcaacatcctcatcagtaccatgaacaagctggccacagccatgcaggagggggagtatgatgcagagcggccccccagcaagcctccaccggttgaactgcgggctgctgcccttcgtgcagagatcacagatgctgaaggcctgggtttgaagctcgaagatcgagagacagttattaaggagttgaagaagtcactcaagattaagggagaggagctaagtgaggccaatgtgcggctgagcctcctggagaagaagttggacagtgctgccaaggatgcagatgagcgcatcgagaaagtccagactcggctggaggagacccaggcactgctgcgaaagaaggagaaagagtttgaggagacaatggatgcactccaggctgacatcgaccagctggaggcagagaaggcagaactaaagcagcgtctgaacagccagtccaaacgcacgattgagggactccggggccctcctccttcaggcattgctactctggtctctggcattgctggtggagccatccctgggcaggctccagggtctgtgccaggcccagggctggtgaaggactcaccactgctgcttcagcagatctctgccatgaggctgcacatctcccagctccagcatgagaacagcatcctcaagggagcccagatgaaggcatccttggcatccctgccccctctgcatgttgcaaagctatcccatgagggccctggcagtgagttaccagctggagcgctgtatcgtaagaccagccagctgctggagacattgaatcaattgagcacacacacgcacgtagtagacatcactcgcaccagccctgctgccaagagcccgtcggcccaacttatggagcaagtggctcagcttaagtccctgagtgacaccgtcgagaagctcaaggatgaggtcctcaaggagacagtatctcagcgccctggagccacagtacccactgactttgccaccttcccttcatcagccttcctcagggccaaggaggagcagcaggatgacacagtctacatgggcaaagtgaccttctcatgtgcggctggttttggacagcgacaccggctggtgctgacccaggagcagctgcaccagcttcacagtcgcctcatctcctaagcactcctttcccctgctgttcccttcgaccctcagccctctggtgccgctctgcccgatgcacagccacctcagccagcccccaggtagaaacgtgggttaagctcttcctgccccgttcagcttcactcccaccctttcagcgtcctgccccttcaccttgacccgggttcccccactcccattccctggcctctgccataatttgttgttcaactgctccctccttcctgaggggcctcagggcttgtggggggtaggctgagaccccaccaccaaaggttaagtgaggtccccttgattgaggacttcaccccttgattaaagcaacttctgcttcagtgaaaaaaaaaaaaaaaaaaaa

SEQ ID NO: 387 - DNA, 639 bp, Homo sapiens
aattcggcacgaggatatacccaaatgacaaattgtttcttcataatgatcttccatttttaacactgataccactacacagtacatatgaaaacagaagctggggagaagaatgtttttttcacaattgaattgctgcatttctcaaactttgggatctatgaaagcggggagagggaacctgaatattaattatgagcacaaatttgaaggaaagaaaacaaagaaccattatctaatcaagctttgaaagtcctgcatgtttgccttttattttagtgttgacgccaacatagactgtctaaggtatttttttccccaaacacttgaatcttggtcgttggtatgtaatccactctctagagtccagtgtactttagacttcatctgagtccaatacatgtaccacactactgttttattaatgtaaaaaccttgtaaatgaatttcagatgggtgatttaagtgagtcacaagtcacaaaactttgctattcatagttaatcaaatagaactgggttttttttttcagagtgtggtgtaaataaagaaatataagaagttctgttctataactgctctgttaacatagtttttaaacattaaaaaatgtgaactaaaagtaaaaaaaaaaaaaaa

SEQ ID NO: 388 - DNA, 2534 bp, Homo sapiens
  SITE (174): n equals a,t,g, or c
  SITE (1350): n equals a,t,g, or c
agcaactctatagatcatagaggaaacggtacctgcagtaccggtccggaattcccgggtcgacccacgcgtccggcatgcatgggaatagcggccctggaggatgttagacttgctccctctccaagacagcagcagcctgcacctgccccgtgtgtgtggccggcctcytcntcacccttcccggcccccggccaaggacccaggcgctgcatacaggggaggggcgcacccacagctggggccggttttcctcagctctaggctgttctgtagcttatctgcccctcccccactttcaagacagatgagcaggagcttgggtctctctcggcccctgtctgttcccagcccctgcagattctgagcaaaggccctgggtaagaagggtgggagtggggcctttgccagcagagccagggcagggcgagctgcaggaatcacccctctgcccctgcagctggaatgtgccacagaggccccacctgaagggtgatgtgctggaggggtggcccagagccatactgcgtccaccctgagctcggggacaggtgacagtggctgctctgggaaggggcttttagatgtaacctacaattcagttaggctagagacagatgctggtggaggaagggctgggccaccagggatcacagaccacaggaagatgggaggtggaagcagaggccctgcccccaccccttcctgtctcactcttctgtcttgtccccacccatgcgccttcgtgcctgagaccagggtggccacacaggcagggcctggctccagtctcatcctcccattgcccagtgagccctgctcttctctccccagccccctcccaccgctgcctcgtagagtgacctcggacagagcccccctagcaatacagggaggctcccggggcctggacaggcgggctcggaggctacccgctgtggccggtgccagctgcccttgcagggtgggtgagctctcaggccgagagccttatttacctagtgcaaaaactgtaaaagtgtacagactcttcacagatttttatcttaattgcaagtctgccgattttgtaaatgttcttggtgtttgactgtaatgtaactatctcacctaatggttgtacatatcctttggtcctggtgctgccgagggctggccgggactgctgctctcccaagggttttattttatttctgaatctagagaacagtattgggcaggaggaaaaggcttggtgtctgcggggggtgtcttccctgcctgtggcatttgtgtgttggctttgcagctgctgtctgagtagtggccactggggtgccttcactgggccagtcaacggggggctcctgnccaggccacagagaacctgagttcccgggagctgggccctgcctgcagccagggctggggttgccagaggccctggagggaaggacagtccctgctggggaagaacagccccggggccccctggtcaccgagactcagcctctgctggagaaagccacgccctccctgctagcacagaggcctgactgacttttttgcttaacttccatgttctgggtgatggaaactgccaaacctcctgtcagtgaggactctttccgactgcccagaaagtgggggtggaggaccgaggctacagctccacacgccccggtcccccagagcatctgccccaggtacacctccccctgcgccccgcacgactgcgggagccagactgtccagggaaacagcctctctcttttctacacactcagccacaaagccccccagctcccacaccgcgtcccagctcccctcttttgtaagtatgtgaaaaggaaaaaatgcaaacgttggagtttgggctggagctcctccctccagctgcgacttttaactatgtaataatgtacagaggaagctgttggtgttctaagactctgtgtggctgtgcaatttctgtacatttgcaattagaaatattaaagatttatttagctattttaaaaaaaaaaaaaaaaaaaaaaactcgagggggggcccggtacccaattcgccctatagtgagtcgtattacaattcactggccgtcgttttacaacgtcgtgactgggaaaaccctggcgttacccaacttaatcgccttgcagcacatccccctttcgccagctggcgtaatagcgaagaggcccgcaccgatcgcccttcccaacagttgcgcagcctgaatggcgaatggcaaattgtaagcgttaatattttgttaaaattcgcgttaaatttttgttaaatcagctcattttttaaccaataggccgaaatcggcaaaatcccttataaatcaaaagaatagaccgagatagggttgagtgttgttccagtttggaacaagagtccactattaaagaacgtggactccaacgtcaaagggcgaaaaaccgtctatcagggcgatggcccactacgtgaaccatcaccctaatcaagktttttggggtcgaggtgccgtaaagcactaaatcggaccctaaaggagcccccga

SEQ ID NO: 389 - DNA, 1124 bp, Homo sapiens
ggcacgagtccagtgcttgggcctggggtggggggaaggtgttagaggactccaggagctcctgcacccctccccaaatgtccatctttctcagacggggctctgtctggggagcacccacaggctgcctttggggtcccagagcctgctctgtgcactgaccccagttcctccatcctgtggccagcctagggctcatggcatgggcccccactgggggagggaggcatcttgtttcttgtggttccctgcaggccagtcctgtcctcctttccctgttctgcccactctggggaatagggaggggaggagaggagaggagagggaggatcctggaggactgggaagatctagcctaaagaggcttctctgagggccagggccctacagcatgcccctacggccaggggactgtctgccagcctcccaggcccatgccctcctggtgcccctggcactgaggcacagatcgtcaaggcaggtaccccctcaacccttcttccactggagcccctgacaccacaggtgccctggagcccttgtgtgactcagcctctgttagctgggtgggtgtcatcagcccctgcctcccaggccagaacctgagaacgggcccagggtgctgtggagatcaacttcaaaagagctaaccccttcccacactccacccacccacctacatttcctctgtgaaatctacctcagagttgtaccctcagaaggacgggtaagcaggaggccagggggtccccagggctgaggtggggagccttctacggcgaaagcctgccaccccacaatgaatccaccctgctccactgcgcgcctctcccaggtctcagctctgggtggggagcagtggccgctaccgacagcgcatgtcccgctcttatccaactcttccaggccccacctccctgcacccctcccctctatagagcaggggagtgaaggggtatgtcaggcggggaaggggccaaggacacgtcattgtaccctgagcgtccccagggagtggaaatggggaagggggcctggagaggggaggcaggggcccctgtgctctctgaacaagttgaaagtccaaataaaacttacctgttccaaaaaaaaaaaaaaaaaaa

SEQ ID NO: 390 - DNA, 1786 bp, Homo sapiens
caaggaaattcgggcacgagtaaactactactaactaatctacggacattcaaattttgccagttttcccgatgatgtcctttgtctggtccagggtcccatattgcattttgttgtggtgtttccttcatctctgtcagcctgtgacagtttcttggtctttatctttcatgaccttgacactttggaagagtccaggccagttattttatagaatattccccagttttagtttgtttaatgtttttacatgatatgattgaggatctgcatttttgccaagacaaccacagaagtgatactgtgctattcttagtgcctcctagcggagggtggtggtaactttttgttttggttttttttttttttttgagacggagtcccgctctgtcacccaggatggagtgcagtggcgcaatctcggctcactgcaacctctgcctcctgggttcaaagtgattctcctgcctcagcctcctgagtagctgggattgcaggtgcccaccaccacacccagctaatttttgtatttttagtagagacaggttttcgccatgttggccaggctggtcttgaactcctgacctcaggtgatccacccacctcggsctcccaaagtgctgggattacaggcatgagccaccacacctagactaggtggtggtaactttgatcacatggctaaggtggtgtgtgccaggtttctccactgtaaaattaggaattttccctttgaaattaacaagaatcttccactttgaagctgtgtgaatgtcttattcttaaaattttgcctactgattttcatttccatcatcaatgattcttgcttataacaggtattaatgttatgcttgcctaatggtgactttgtttcattattttacctgtatttattaattggtattctactataaggaagagctgtcccttttccccatttatttatttgataatttatatcagtatgaatgagtggatatctgttttattctacaggctacaatctaatgctaacagtttatttggttgctcaaattggctcagatttggccagtgagaactcattgaagttggcactgtgttgtttcgacattgcccctgtcactttttaagcattttctggcaccacaagatgtttcaggcttcctcacattttccctatctcagcccwrgcatcagtcattctcyaagaagctcccagttccttttattccagaaaaaaggaacttagaaaccaagttgtttcttgatgccactggaaaccaagatctggacagaatatatactcctggctagagtatcattggcggagtgtcattgcttgtaggcctgctcagcagacagagctagaaaacatatatgtatatatgttaaaacatgcaaatacaagcacctgaatttattattctatccatctgtatgttattaaaaaccgtgagccaggtatggtggctcgtgcctgtatcccaggactttgggaggccaaagtgggaggatcacttgagcccaggagttcaagaccagcctgcgcatcatagcaagacctcatcctccaaacgtttaaaaaataaaaaattagccaggcatggtggtgcattcctgtaatcctagctacgtaggaggctgaggcaggaggatcgcttgagttcagaaggttgaggctgtagtgaactgtgattgtaccactgcactgcagcctgagtgacagagcaagactccgtttcatatttttaaaaataaatraaaatcatgagtttaaaaaaaaaaaaaaaaaaaactcgag

SEQ ID NO: 391 - DNA, 1688 bp, Homo sapiens
ggcacgagggaaatcttttacagtctttatatgtaagatccaggcgggggcagggggaatggcttggtctgttatctgccagggtttaattttgagacatggccgtttcacaactgcagggtgcgggaagattagatgacctgaatgctggtggtaagtaaagcctcacacttcacattattccttaattgtctgtttttaaaaatttgtcttaaaaaaatattaaggtggcaacatattcaggtggcaacagagggtggggtgaccagtgacaaactgacttccatgtctctggctaatcttgatttctggagccaggctccagactaagtctggacaatcaattaattagcctttctatatgtattgcctgatgaatgatttcaatgctggacattgaacaatggtctgttgcaacagggtgaggccattgtctctggcaggtggggagatgggggctcttgttagctccatttgattacaagagccttgaatcaccaaaacataaagatgtactcgaatagaagagtccgttgtctgactggtaaatttaaggatgtgtttgaccctcgtgcattaaaacagacaattggcggggtgcggtggctcacgcctgtaatcccagcactttgggaggctgaggcaggcagatcacaaagtcaggagatccagaccatcctggctaacacggtgaaaccccatctctactaaaaatacaaaaaattagccaggcgtggtggcgggcgcctgtagtcccagccactcgggaggctgggacaggagaatggcgtgaactcgggaagcggagtttgcaatgagccgagttggcgccactgcactccaatctgggcaacagagcgagactctgtctcaaagaaacaaacaaacaaacaaacaaacaaaaccagacaattgaggcggccagctgcatttcataattcctcccataagcttcctcctatttgccacttgtttagcaatggaaatggagaacgaagatggcctcaaagtgactacatcaccagtgttacaaaaatgggccagaatttaaggcaagaattatatgtttcttaatagagggatgtttctctgtgtgtggctacttgtattcctgtggatttttaccagattataagagctgttaatttctgatcagaacagagaccaaaaattggagatatggatgtggggatgattcttttgggtaccgatagactgcaggaatcgcagggcttcctttaaatccattacagcttataggctagtggatgaataagataagtggagattttctcttgaaatatttccttctatgaagaaaaggccttgaaatgtgcatcctctttgggttgactaatttctatgcctttacagctttaagctgacattataagattattctagtttggatcttgtaagataattaacaaaatggaaataaaatgttttgtttttaaaaatgctaataaattatttattttcctttgtcttagttagttttaatacatattcagtgcttaaagaacaccagtgcaggaaaactcaaactaaatggcatcatcccccatctctataattctatatgcagtagccattcatgcgaagttagaaattagaatttatagcactaagcattctaagaaaaattaagccagtacgtttatctcttgaaaaaaaaaaaaaaaaaa

SEQ ID NO: 392 - DNA, 1487 bp, Homo sapiens
  SITE (840): n equals a,t,g, or c
  SITE (892): n equals a,t,g, or c
ggcacgagacaacgcaagctggggacgaaactgcagtgaccagtgggtgtggctgggtccagcctccagatctggcccgcacgatgccttgcaggatggacaggatgacagacagggacgaagcagagacctctacagacccaagtcaccaagtggagcctttttttttcttattttaattttaatgaacaaggtggaccaaagggctgaaccagcccctcaaccaggaccctggggggcctgctgcctgggggccgtggccagagaccctcgctgtgctgctgccagcccctggctggggcagaaagtgccctcggcatgggcacctgggtgtggggtggaggaggagggctcgcgcctctggtctcggggccaggaattccaggtggcgtgagaagtacacactatttattttttggttttgtcagaggcaggcaggattttggagctggaagaatctgctctccggtggctgccctgtgaacagaggctcccggtcagcttcccaggcccttcgccctatgcccagagggcagactgcctctccctgggccggggtggcctgggtgccaggaggaggggagcataccccacaccctccctgccaccgttgccgttccagaacctcggtcagtgtttccctgtctgggggcagggcccagagcgagcacgcgtctggcggctgctgtcgttgtgttctaccccgtactgacccaacaccacaagggctttctctggtcccctgtccctaagacaataatcgctttctgacaaaggagcctgcacatttgggtgagcagacccaagctgtttacagctctttcttgtcctgccatccantaacagttagtcttcatccccacgtgaacaaaatgggaaggaccgtgagganaagaatgaggcaacaggcaccgaaatccctcgtccttccctctgtgtgctctgaatatgtccttgtccttcctgaccatctctgaacaactggaacctgcttgggtcccctaaacctgtgtctgggtgtggctcacagatccctatcagcctggttcgtgggagggctcttcctaaagggccccccatctctaagtcactctgaaagggagttgtggagaggagacgcctccagactctcagaagttttgaggactgaactgggtcactcgggatctgtgttcgaatcctccccacccctttctttgtggagtttcctaacctgctgctgaagcacaatgttttggtgctttcttttctcatttgttaaaggcagtgtccaaaagccattccagatgccaagaccaggggcttatttctagggaaggtaggtcggtttccatgtttccctcccgttatttttattttttactttttgcctgagacaagccgagtatgaggtggtttgatttaagaaaaatcaatgaaattgtttactactgttttaaaataaaaccgtaaactctggaaaaaaaaaaaaaaaaaaaaaaaaaaaa

SEQ ID NO: 393 - DNA, 2834 bp, Homo sapiens
aggagatgtatctgctcaaggccctcctcaggtctcctttttttgatacagggtctcactctgtcgcccaaagctcactgcagccttgacctcccaggctctgatgatcctcctgcctcagcctcctgagtggctgggactacaggcacatgccaacaagcccaggtcctgggatgacccgagcaatcctgtgcctgctactctgctgcccaggacactgagagaaccagtgttctctgggaggaaaccactggtcatggtcttactgctatgccctctctgatccagggatacagcagtgaaaggtcaccccacctgcaggaaggggtcgctgactccagatatgctgtgttctgtggagtatcccattgtcaccagagtccggaggatgtgtaccagctggggtaccacctggagggagggcacaactttgggcattcgttctaatcctctccagctaaagccccattccttccccactgaccctgtcttccaggcccagggcctgccccttcaccagcccacctttcggaagtgcctgagggctgcagggcttcgttcgcagagctccgtgatcagcgtgatgctgcccagcaggatgcctggggtcagcgtcggggaagtgaatggtgggggccaggggcaagagagtctattgcgtgtgtgcctgtgtgtgtgcactacccttctcctgtgagctggggttcccatccgattttcaattcttctgtccatagacctgaagcaaaggatggggggccccacagccttaccatggtgacgctcatgaagcagttgggcacagggtgggaggaagacactggagagttcagggaccttccggatcatgtgcactgcagtcagaatagcctgcagaggtcaggggcctcagacaggggtcagaggagatggacccctgcatctactactatatagcacgcagcaggcagtgtgcaggagcacgtgccaggagtcccggcatctcaccttcttgcgcacgtagggactgggctgcaggagcagtttctccacctctggggccaggtctcggcacatctcagcagagcccatggtgctcaaagtgcacaaggccaggccttgtactggctgaatcccctggctcaggtcactgcagggtttgggaggacggtcagtcaaacctctgagaaaatcagtccttttcaatacccacaacaggcagtcccctgggatttccaaggtccctactctcccatctccctgattccaagtgattgccagaaccctctcacttcttgatgctgttggtaatgagcaggtgggcatcgtgcctctcatccaatagaagcatggcccccaggtagcccaccctcttgtctgtgaatctggaggaggcgatcagtttcaggcactccatctatagtgaagggggcagaccaggaagaggcaggggtgaaaccatagacactcacatccctgttccatcttcctctttaaaaccagattaacctgtggggcatcatatctcatcactctcccttcaacaagaggagaagcttaggaaattcaggcgttagtgggtaggaggaactaggagttgaggaggatgggagcggagaggaggagatgcctgccctaaaggaggctggccagagaatgaagggttcaggccagctgatgaccagtaggggtagcaatggggaaagaggtttgcagtgcaggctgtgaagactctgaaattgtagaatttaaaaaaccagggcataaacaggtgagagagtctgggactctgccccactagccttcatcaagctcaggagggaggtattcctggccagtacctgtccaaagtgggcggggtagcccaacatgtggacgtagagcagtttggccagctgccggtgcctgtgcactgggtccccgtcgcggaaggaggcccggatgtgggcacactccttttggatcacctcccgctcctgggcctgagtcttggccccgcgaatctcttcgatgaggtcctgaagcttcagcgaaggcaccaccatcctgactggcagagtccgggagtggagaaacactctctggtcgggcgtgcctgggctttcggcccaggcccgtcctgtgtcaagaccctaagagcccgggtcccacaggtaccctaaaattgcgcccgcattttacctttcccgaagtgggtctccaaattccgcgcccaccccaccgcccgagaagcccactacgcatgcgtccgcaccccaccggcgccccttcctattgagcatgcgcgggagccccacctatttctctctaccgtttcctccccctacctggtaccccatccctagctcagccattgcttttttttccacgaccctccgctgtttcttccgcgagcttcctcccccgatttccatctcaggcagcggcagcggcagcgacagcctgcctaccccaggactccagcctcacctggcttctgcctcaactccgctcctctgccccccagcgcttcctggtacggggccgagcaggggttggtgctccgtgcggtccttccctctccccgcctccaccacgggaccccgccctcctgggccgactgcagagccttcctgaatcctctgacctcgggcctcaggctttagcggagagacagcatgataggcctggagttcttcaagaggcctcctcgcacatccttaccacccggagagcctcagtttggatttgaagccatcgcaccccaaaggagatgacaatccccccccttttttgaacttttttattaatatattttttttgttaaaaaaaaaaaaaaaaaaaaaaaaaaaaaaaaaaaaaaaaaaaaaaaaaaa

SEQ ID NO: 394 - DNA, 1380 bp, Homo sapiens
gccctttgcaaaattaactctatttaaaatgaagattttagtcctttgaaatctctgcttcacaggagcattctctacagagggcctcccaagctctatgttcccattccttcaaggtaggatctcaacatgggagtggcccagcctgagggggagacacagaggctcaagcaactccagtgcaacagaaaggaacagtcagttttggattttggttgggtggaatatccaccgtataaactcccttggattcttccttcctcttgcttccagggggcagacagcatatgctttgctctctgattacacttagaagtctctttctggagtcagtgcagttggccagcaaaggatgttctgagcaaaccttttcagggttaccctacagcacagaatttattcattaaagaattttaccactacaatataaatgggaaataagaagatatactgctaaaatgagacataaaattgggtatataaattgctattttctgattaaatctggggagtacagtcactggggatggagtcaaattccttcaatacatttccttatgttttgacgagacagggtcattttgacctttcaaatgcgttaatcaaattccaggtgtctgtggttgacacatgggatagaaaaagtaagaagaaaataaacaattttatgctttaaatctgtgggagatgagtaaacaatgtgagtacatgaataaaattcctgtttaggtccaaaacatcccacataaacagattatttttataaaatggttttggtaaatgttatatattcaaactatttaaattgattcagtgtaaaaatgaaagtacctcatggagtaaaactttatgttaactcaatgtatgtctattttcatttatatcacaatttattattaatatctattaaggtatatatagtgccatctgtatttgagataattcattcaccctcagtttaaatatactgtcactagcaggcttcagataacataagagattaggcaaaatgcaaagcagggaatataacagaatggacactttatgttatattctgttactaaaagatgcagagaggctgggcatggtsgctcacacctgttatccaagcactctgggaggccaaggtggcagatcacatgaggttgagagttcaagaccagcctggccaacgtggtggaaacccatctccactataaatacaaaaattaggagggcatggtggtgggcgcctataatccaagctactcgggaagctgaggcgggagaatcacttgaacccaggaggtggaggttgtggtgagccgagattgcctcactgccctccagcctgggcgacagagagagactccacctcaaaaaaaaaaaaaaaaaactcga

SEQ ID NO: 395 - DNA, 1140 bp, Homo sapiens
gtgggggcaggccttcgtgcacgtggccgtggccggtggcctctgtgccgtggctgtgttcacgggcattttcgacagtgtttccgtgcaagtgggctatgaagcactacgccgaggcgcccgtggccggcctccctgccttcctggccatgccgttcaactcactcgtgaaacatggcctacacgctgctggggctgttgtggctgcacaggggcggcgcggtggggctgggtccccgctacctgaaggacgtgttcgcagccatggccctgctctatggccccgtgcagtggctgcgcctgtggacgcaatggcgccgtgccgcggtgctggaccagtggctcacactgcccatctttgcatggcccgtggcctggtgcctctacctaaaccgcggctggcggccctggctgttcctctctcttgagtgtgtctccctggccagttatggcctctctctgtgcatccccaggggcttcgaggtcgcactgggtgctcacatgtggccgctgtggggcaggcgctgcgcacccaacaggcactatggcaacaccacctcggctacctactcacctttgggggtgcccctcttgcctgggctttgtggtcctcaagctgtgtgaccatcagctcgcacggtggcgtctcttccagtgcctcacaggccacttctggtccaaggtctgtgacgtgctccagttccactttgcgtttttgtttctgacgcatttcaacactcacccaagattccatccctctggcgggaagacgcgttgaacccagggaagaacctgctgaaaaccgatgacccccagcattgaaatggactctgagatggcagcgtggtgccagtgtcagacatcctgtgtgtgatgatatgcactgatcacacaagactgccctttcctgagaagctgcgggcttcggtgtggaggggtggagtgctgtgatctcgacaacttactttcaaagacataaagcacagatctccgcacaggggatgtgtgtgttcctgatgtaatttgcataacttttctgtagtttgaaatgtttccaaataaatattggcaaggggagtggaaatgacaccaagaagcccctcatgctcatggttggacagagaaaaaaaaaaaaaaaaa

SEQ ID NO: 396 - DNA, 1305 bp, Homo sapiens
ggcacgagcaatataaaatatgaaactcaataataaacagtgccacctgtacatgggcaccatgccctcctcctcgtgctgtgttttctagtgcatgccacagttcgcagtagagggtgttttcaccttccaagacatggggcaaagtttggagacacctggttgtcactggagggggtggtgctcctggcttctcctgtggagcccggggtgatgcataaaatcctgtgtgcctgggtcagccgcatcacagacaatgacttgacatgaaatgtcagctgtgctggggcagagagaccttggaaggaagctcttggaaaatacgttgtatctcagtttgatgaaccaattcacaagaggctaggccctctctagcaaagttatgggctgctttactgaaaacagaatggaagccctgaagtcaacactccatggagaagcgtgtctttcctaatgtcctggtgttctgttgatttaggtgcttgggaacacaatgctcccagttctgttaggacaggcatactgttactttgcaatatccactttataaaatagctcctgcccagtggctcttgattcctgtcaaatgtggacctgtagtttaagaatgacaggtggttagagacccagatatttaaaaataggtgttcaataagggaatactgattgtgcattgtatctggatagcatgcctaattgtgcatttctgaaagttaccaattcaaaatgtaattggaacagttatctttgattagacaagcctgggaagagaatgttgaggtgcagagctcaccagccaagttcatgcccctctcgggcctttgtggctgagaagtgggacagaaagatgattaaggtaatgtgtcctccctgtagcattgtccagggccgttgtgtagatatttgacttcactgacagaaaagaaaccagggagtttgtagagactgtgcatttttagtataacattttcaccatctgatatggtttggctttgtgtccccacccaaattgcatctcaaattgtaatccccatgtgtcaagggagggacctgatgggaggtgatgggatcatgggggtggtttcccctatgttgttatcataatagagagggagttctcacaagatctgctggttttaaagacagcagtttcccctgctgtcactgtctctctcctgctgccttgtgaagaaggtgcttgtttctccctctgccatgattgtaagtttcccgaggcctccccggccatgtggaactgagtcaattaaacttcttgtttataaagtaaaaaaaaaaaaaaaaaaa

SEQ ID NO: 397 - DNA, 1962 bp, Homo sapiens
ggcacgaggacggactgggcagcagcctgtcgctggccgtgcccccaggccccctcagctttgaggcgctgctcgcccaggtgggggcgctgggcggcggccagcagctgcagctcggcctctgctgcctgccggtgctcttcgtggctctgggcatggcctcggaccccatcttcacgctggcgcccccgctgcattgccactacggggccttcccccctaatgcctctggctgggagcagcctcccaatgccagcggcgtcacgtcgccagcgctgccctagcagccagcgccgccagccgtgtcgccaccagtaccgacccctcgtgcagcggcttcgccccgccggacttcaaccattgcctcaaggattgggactataatggccttcctgtgctcaccaccaacgccatcggccagtgggatctggtgtgtgacctgggctggcaggtgatcctggagcagatcctcttcatcttgggctttgcctccggctacctgttcctgggttaccccgcagacagatttggccgtcgcgggattgtgctgctgaccttggggctggtgggcccctgtggagtaggaggggctgctgcaggctcctccacaggcgtcatggccctccgattcctcttgggccttctgcttgccggtgttgacctgggtgtctacctgatgcgcctggagctgtgcgacccaacccagaggcttcgggtggccctggcaggggagttggtgggggtgggagggcacttcctgttcctgggcctggcccttgtctctaaggattggggattcctacagcgaatgatcaccgctccctgcatcctcttcctgttctatggctggcctggtttgttcctggagtccacacggtggctgatagtgaagcggcagattgaggaggctcagtctgtgctgaggatcctggctgagcgaaaccggccccatgggcagatgctgggggaggaggcccaggaggccctgcaggcttcattgcccatgccattcgccactgctaccagcctatgggaggaggagggagcccatcggacttctacctgtgctctctgctggccagccggcaccgcagccctggcctgtgtcttcctgggggtcaccgtggaccgatttggccgccggggcatccttcttctctccatgacccttaccggcattgcttccctggtcctgctgggcctgtgggattatctgaacgaggctgccatcaccactttctctgtccttgggctcttctcctcccaagctgccgccatcctcagcaccctccttgctgctgaggtcatccccaccactgtccggggccgtggcctgggcctgatcatggctctaggggcgcttggaggactgagcggcccggcccagcgcctccacatgggccatggagccttcctgcagcacgtggtgctggcggcctgcgccctcctctgcattctcagcattatgctgctgccggagaccaagcgcaagctcctgcccgaggtgctccgggacggggagctgtgtcgccggccttccctgctgcggcagccaccccctacccgctgtgaccacgtcccgctgcttgccacccccaaccctgccctctgagcggcctctgagtaccctggcgggaggctggcccacacagaaaggtggcaagaagatcgggaagactgagtagggaaggcagggctgcccagaagtctcagaggcacctcacgccagccatcgcggagagctcagagggccgtccccaccctgcctcctccctgctgctttgcattcacttccttggccagagtcaggggacagggagagagctccacactgtaaccactgggtctgggctccatcctgcgcccaaagacatccacccagacctcattatttcttgctctatcattctgtttcaataaagacatttggaataaacgagcataaaaaaaaaaaaaaaaaaa

SEQ ID NO: 398 - DNA, 1880 bp, Homo sapiens
ggcacgagagacgccagaggtgcagctccagcagcaatggcagtgacggcgttggcggcgcggacgtggcttggcgtgtggggcgtgaggaccatgcaagcccgaggcttcggctcggatcagtccgagaatgtcgaccggggcgcgggctccatccgggaagccggtggggccttcggaaagagagagcaggctgaagaggaacgatatttccggtgaggctcaccgggtcccaagtccagccctggatctcccaatggccttccaatccttaaactgccaatcgccccacccgttcctacctggtgccttgggcgccccatcccccaacagaactcccgggccccaatccagtataccctaacccttgatgtcccgaccgttgccacgtatagggcactcccagttacctgcacaacagtttcaggcccccaaaccgtttccaccggcgggtctccaaaacaacccacggctcaactcctcctttatcattaccatctcccgcgtggagttctcctcaggtcgtgcgaaacaccccctagattcttcgcacagtgtctagatccgaccgcccaacgtttgcctcccagcctgactccctcggcccttacccacctgtcaccccctctacgctctccttcctcgccagcacgccttagctttgcaagcctgcatgcattcaggcttctcaggtgtttctagacccccgactccgcaagagtgaggatgatgggagctggtcatgggagctacttatggttggacaccatcttctaaaggcttttgccctactcagcccaacctagacctgtagatttccctctcctgcttaggagtatggagtgggctgggcctccctttgccagccttgagttatctttaactgacttctgtccactctggagagcagtgaggaattaatcttgcttttgcttgtcctttggcctttcacttctgccttctgttgagaattatcaccatgacacctgccataccgtatagagagccaaggtacagccgttagagactatctaattgagcccctacattttgtagttaaggaaaactgaggcctaaatgtgaccaaaccaacattgtaatccagtcccttcttggaacctaaattgaactgccaagtactgcgcatgcaagagaccctttattggccttacagtgggccattcatttctataggcaaagaaagctctagacagattggaataggaaatggatatttgccttttagctacacccctttgtctgtcttcctcattttgttcctttttttttccctaaaggggagtcaagttccctgggttgttcccctcataaggtattagggacttgtgtcaaatctttctggagttttctattttaaagaggaatctgaaagcaataagctctttggtcttcttaagatggctacacctcaatttaagatggggtattctttcactagttgaggagtagaagaggatgaccagctagactcccatggaattggaactcctattccttgcttagacattacaggttatgctttgagatctctttggggtgaaggattgaaattaaaccctgagccaccgtgtccttgtagagcacagagtagagaacaactggcagctttgaaaaaacaccatgaagaagaaatcgttcatcataagaaggagattgagcgtctgcagaaagaaattgagcgccataagcagaagatcaaaatgctaaaacatgatgattaagtgcacaccgtgtgccatagaatggcacatgtcattgcccacttctgtgtagacatggttctggtttaactaatatttgtctgtgtgctactaacagattataataaattgtcatcagtgaaaaaaaaaaaaaaaaaa

SEQ ID NO: 399 - DNA, 878 bp, Homo sapiens
ggcacgagccctcccaggtctggttagggcagttgttacatatgaggggcgtggagttttgtcttgtattttggccttgttggtaaagcattccaaagcttcgacacaccctcctttcagcccattaggaaaggctgttgattgtaatattcacacagctccctgggctatggttaagagccttgcagaaggactgggagaagccctgtgtgtttgaagtattgtagcatcagaaaaaaacaccggaagaaggcaggtggggacaaggagcctatgtctgctccttggaattcctttccttactgtccgaggcaactacagggaaagcaaagcgtgagcccccaaatccacacctgggaggaacgttcccctttgcaaggcatgggactggctggccctgtgtctcacgggggctctgagttttgaggtcacactagcctcctgaggcctggctgagagggctgggttgggggtcaggaggccccctgtagccacgaagctcctctggggcattgttaaaggttcaccctcttttttgtgggtatcctggaagatctcaagaaactgagcttggaagaagagaggctgagagggtctcccgccgcctgcgttctctgcagctatggccccacagcctccagtgaccatggaggggaaggtgccacccgccttggctgctgaaagggtgatgctcttatgcctgagtcttggctcctgtggtcctgcagagaccctgtgggggccgcccggtcgtcacctgcactcatcttgggttttccttccttttccaccctaagctgaaggtatttttttcctgttttcttcactctaacttggggaagaaggaagatcctttatggaaaaaaaaaaaaaaaaaa

SEQ ID NO: 400 - DNA, 2320 bp, Homo sapiens
gttaatttgtaaaatattttacctttttttccccctgccctctccagaaatgttacagaaaaagattgagtacatttctgccatgatgcagagaaagaaactggtccattattactcattgtgtaacaccataagaaggttcaaaggagctcataccttctgtatgttgatgccaggaactgtgtataatgaactggccttctatagttaggattggtacataccgctcattcagcaaatgagtattacagtgatattcaacatgtgtccattgactacagcatcagaagcactaagtgctattaaaatgcagattctaggcctcatcctactcctgctgaatccaggtatctcaggagggaattcatgagactgcatttcaaataaataccccatgtgattcttgtgcatgctgaaggttgagaaccactgatttattaagtatcttgtgtgttcattatgctttatcccctctaatcctcttgtctaggactccttaaatttgagatttagtattccctttaatataaacattaaaattgagattagtgtaaatttgtaaagagactatttagctaatctggaggaaaaagagtaaaaagcactgaatttagcagcaatagaccttccacttggctgctgtagtaagtaaacatttgcaaccacgtgtttggatttaacaaatgttattaggacttttcacagagactctagagtcttgcccagagcaaaacattcagaaacgatcctctctgagagtgcagggtttgtttttttgttgttgttgttttgttttgttttttaacctgtctagtttctgttaagatgctactggccaggtcttcatggtcccttgacattggcagctgtctgttcatcacacttgggacacaagaaccttccgaccaaggagcccagtgccatgggtctctggggccgggcacggtggctcacgcctttaatcccagcactttgggaggctgaggcaggtggatcacctgaggtcaggagttcgagaccagcctggctatcatagtgcaatcctgcctctactaaaaatacaaaaattagccgggtgtggtggcaggtatgggtctctgctataccacatgaccatttctagcaaaggctctgcttccaccacaggtggtaatagggaactggatatataatttatgtactccaaagtagtagccacaatccactgcctgttcccttcctggagcagtgtccctctttctgatttttctctctcactattctccaaggcaatccctgctctctcctacctctctaggaaatgaaacacgatttccaaaatgaacttaatctttcatgagaaactgaggatagagatgtcaataaggcagccactgtttccacctccccacctgaagagctaggaggacaactacaaagagcctgactgccttctcggaatgaggagagaggaaaacagcaacagtatcagtatgttagccttctacactaaatctcaagcaagccaacctttcagaccttcagtttgctcatatgtatagaaataatcattatactaccaatttctcaagttagtgtgtaaatcagaaagccaatgtctgtattgtaggatgtttagcaagaaaataaaaaataataacaaaaagccaatgtctaacagataataagagctcagtaaatgtgattgaattactaacaaagtatgtgaaagcagacgacacagtacctggcacactactaaactgtaaatgttttcaaatctgaatctgagaattctgtaaggttttatgtaatatgaatatcattagctattatggctctggaatttttttttccaggttttcaagatggcagcatctatgcatggtcagcccagtccttctctagaagatgcaaaactcagaagcccaatggtcatagaaatcatagaaaaaaattttgactatcttagaaaagaaatgtaagagaaatgcccaggctgaaaatcagttcattttatttgcaagtcttttgtattgccattgtttctaagatcctattctttcttaccttttctgttatctaagatcctattctttgagttggctatgaagaacacatctttaaaaaaaagaatgggggaaacaagaacagatgaaaatggtggtttgttggaatatttcggattgtggataatttcttttgtttcttaaaaagtatccaaaagtattgctaaaacttaaagtataataaaaaaaaaagaaaaagaaaacagcttaactagaacacatattcaaaatttaaggttatttatataatcactaaaaaaaaaaaaaaaaaa

SEQ ID NO: 401 - DNA, 1669 bp, Homo sapiens
  SITE (1554): n equals a,t,g, or c
cccacacgtaagggacaaaagatggacaccaccgcggtggcggccgctctagaactagtggatccccgggctgcaggaattcggcacgagttagcttttaaaatgtatttttgtttttacttaagagttttaaaaagtagtcatattttaaatttacatattgttgggaaaattctgccaatggtaggataaaacaatagatttcaattgaaatattgaaagcaacttgtgttggtaaaagatgagaagtgaaggtggaagactgattaaaactaccaaaaatatcatagtggtaacacttttatttttctttttttgtgggggtggggatagtaccattataaaaatacaaacataagctgcttttgtacatcaccaaataattcattgaaatttaaggaaatcaaccagttatgtgtgtacacacacacacacacacacacacacacgatctcatagagtgaagggttaattggaatactgactgagtgcaatgtacaagaaaatgtacacactgaatacaaacaagggaaaaaaatcaactttgcctaggagaataataaatataattataggaaggaggggggacagggtaggtgttaaaaaggagtttcctgggaaaataaggaagtgaagaaaggcattccaggcataaaatatgcttgctatgtgcaaaacaacagtgggaaatagcatagactcttccatgtacatactgcaagtgggtatgtgatggtggagctacagttggaaaggtaggtaggggtcgtatcatctagcccgatttactagagtttaactttatttaytcatgaataggtagatcttgacagattttaatgaggggagggacatcaggtgccaagtacctacaaacatttaaacaagggaagggttttatggttgcagtgattaggacacgtttgaggaatatttagacaattaagttagtggaacttatatttttataggatgtaaatgaaggggcacagggaagccaccgaaggtgatttctgagattctgttttgcataacttggtacatgatatgccacagacataaaggggaaatgctttcaaagagatctgtgtttttctcaaattttacccaatatatttgcataaagctcaatgtagattggaactatggcaatttgattcagttccacagcttaagtaagtgttattttgttcagttaattgaaaatgaaactatacctgacaggaagctgattacttatatgctaatgtgacagtattatagatcataggacttataacacctattaatttggtaaatgggaaaaacaaaactgtatactgtgaaataagaatttacgttatgtatataagaaatagttgatttaggctgggtgtggtggctcacacctgtaatcccagcactttgggcagccaaggcagctggatcacctgaagtcaggagtttgagaccaacccggccgacatggcagaaccccgtctctactaaaactacaaaaattagccggatgtggtggtgtgtacctgtcgtcccagctgcttgggaggctgaggncaggagaatcacttgaacccaggaggcagaggttgcagtaagcccaaatcgcaccactacattccagcactatactccagcctaggccacagagtgagactgtctaaaaaaaaaa

SEQ ID NO: 402 - DNA, 1668 bp, Homo sapiens
  SITE (1553): n equals a,t,g, or c
cccacacgtaagggacaaaagatggacaccaccgcggtggcggccgctctagaactagtggatccccgggctgcaggaattcggcacgagttagcttttaaaatgtatttttgtttttacttaagagttttaaaaagtagtcatattttaaatttacatattgttgggaaaattctgccaatggtaggataaaacaatagatttcaattgaaatattgaaagcaacttgtgttggtaaaagatgagaagtgaaggtggaagactgattaaaactaccaaaaatatcatagtggtaacacttttatttttctttttttgtgggggtggggatagtaccattataaaaatacaaacataagctgcttttgtacatcaccaaataattcatgaaatttaaggaaatcaaccagttatgtgtgtacacacacacacacacacacacacacacgatctcatagagtgaagggttaattggaatactgactgagtgcaatgtacaagaaaatgtacacactgaatacaaacaagggaaaaaaatcaactttgcctaggagaataataaatataattataggaaggaggggggacagggtaggtgttaaaaaggagtttcctgggaaaataaggaagtgaagaaaggcattccaggcataaaatatgcttgctatgtgcaaaacaacagtgggaaatagcatagactcttccatgtacatactgcaagtgggtatgtgatggtggagctacagttggaaaggtaggtaggggtcgtatcatctagcccgatttactagagtttaactttatttaytcatgaataggtagatcttgacagattttaatgaggggagggacatcaggtgccaagtacctacaaacatttaaacaagggaagggttttatggttgcagtgattaggacacgtttgaggaatatttagacaattaagttagtggaacttatatttttataggatgtaaatgaaggggcacagggaagccaccgaaggtgatttctgagattctgttttgcataacttggtacatgatatgccacagacataaaggggaaatgctttcaaagagatctgtgtttttctcaaattttacccaatatatttgcataaagctcaatgtagattggaactatggcaatttgattcagttccacagcttaagtaagtgttattttgttcagttaattgaaaatgaaactatacctgacaggaagctgattacttatatgctaatgtgacagtattatagatcataggacttataacacctattaatttggtaaatgggaaaaacaaaactgtatactgtgaaataagaatttacgttatgtatataagaaatagttgatttaggctgggtgtggtggctcacacctgtaatcccagcactttgggcagccaaggcagctggatcacctgaagtcaggagtttgagaccaacccggccgacatggcagaaccccgtctctactaaaactacaaaaattagccggatgtggtggtgtgtacctgtcgtcccagctgcttgggaggctgaggncaggagaatcacttgaacccaggaggcagaggttgcagtaagcccaaatcgcaccactacattccagcactatactccagcctaggccacagagtgagactgtctaaaaaaaaaa

SEQ ID NO: 403 - DNA, 1677 bp, Homo sapiens
  SITE (40): n equals a,t,g, or c
  SITE (91): n equals a,t,g, or c
  SITE (99): n equals a,t,g, or c
  SITE (1155): n equals a,t,g, or c
aaaaacaatcctcccccaaccctggccaacaaaaactgangggccaaaaggaaagggcctggggttttttcaagccttcctgggaaccccngaggaaanaacccccaaccctcactccctcccttccccccagtaccatccagacctggtttaggaaggccatcccccagaaggggccagccctcatgccccccggtttccagccccctaaaggtaaatgaattgtccttgaactcctgccttggcatttcgcctcggaatcacggcagacttggagtgtttccttccaaggcaggcatcctgccttatgagccaaggtcaaagatttttcaaaatattgtgcattaattcattaaagctactgttaaatatttgctgtttttagattggcgtccgtgctaattctgcagttgtagcactgtatattttatctcatttctgtgccaagaaagttcatctttatgtttttctaatacacaatcttgatcatgtttccaaaataaagcttcagctccttggtcaatagaagtaagggtgtagccatccagggtctcccggctctaggcagaccggatcccgcggttcatcccatggttgttgaaatgtacctcgatcagtcatctctggtattcctcactctggccatgagccattgccatcttatgggcccgatttgggtactctgaattatgtcatggagtagacagttacttctaaatcccagcaaccaagttgcgtatccttccttatagctagtttctatagagaagtgaaaaagaaatctgggcttccttaataagatagttgagcctatgacattaaggagcagcgctgctggcggaagattctagattcactgggtggtttaagagacccagggatttagttcttactggtgcataagtgttttcccatgctaaccggaaaaccactcacccaggcttcccccacttcccctcaaattttctcagctctgccgctggtctccatgaacggcaaggggaaccaccactcattcactgtcagtgtaggtaagacagaggatgcccttgcaaaaattgggactgaggacagtagcacacggaatggtggatcgtacatttgcacccagagctactaaacgctcagtgaccccagagaccattaatttcccanagtgaargggatgggggtagagctaattggaatttttattatccaggactcatcctaagaagaatgttggcctctcttcatccctggcttagccgtcaggtagaacgcttactcacctgacaccgacttcttagagaagcgagtcttttttgaatggaggagcgatggtaaccccactagggggcgcccatgatcggctcccagtgcacccccttaagggtaagcaggccrcatatctagagtctgatagtctgtgtgtacataaggtctagaagtctgtggaaacgccctgaaacytgtagtattatcttaactaccctcttatgttaaggtttacataataggatttttaaacaaatgtgtttaattttttaagatctcttgtattaaaattttcttttggaataagctgtggaaattttgttacaacctggttgagatcaacctctttacaatgacacaaattgtgacattttataaattagatacttcagtgaaaaaaaaaaaaaaaaaaaactcgaa

SEQ ID NO: 404 - DNA, 992 bp, Homo sapiens
ggcacgagcagcgcacaatgactggacgccagtccctccgtccaggctgcgccttactgctcctcccctcagtcttctcgcagctgctatccttaggggcacctgggagtgaatgaagctgcacgaggtccgcgagcctctgcccagcccctgtccctgcagcctaggatgcaaagggaggctcagaacccaggtcgccctgactgtggccttggtaaagtctggaaacagtcctcagcctctgatatgccagatatccccagggctgctggttccgatgtaggaactgcccagggtctgcacgctcggcccggtccatcctaccacggccgccccctgaggggcccagggcagcatctcccagccccaggggcaccccaacctgctgtgtctggggaagtggaaagcccggatcctccagtatgggggcggaactgcccctaccaccaatcccctaatccaaaggcacatgtcaactaaaagataatgtggggtctcctggtttgagtgttccctgggctgcgccttctcaacatccagcgtgccaccgcagacacccccaagtccccccatggtggacttacctacaagaaccacagccacttctcaccacagaactcctcctaatggctctgggggtcgcatgggccacagtccaccccctcccagcgctccatcccccgcttaaggaggtgtgctgggcccacgagctccggagcacccactggagccacggcctccctcccactgcacactcccagcactgagctggggagccagggcgcctacctgtcccgccagccctcccacccacctcagcccccccacccacctcagccccaagacacacacaggccggcctggggctgcagactgagttattttatttcgctatttccagtttgaagctactatcatgggcgtttagagttatacaaatgacacttacaaaaaataaaagaccaagacacccaaaaaaaaaaaaaaaaaaa

SEQ ID NO: 405 - DNA, 2150 bp, Homo sapiens
  SITE (13): n equals a,t,g, or c
  SITE (1984): n equals a,t,g, or c
acccacgcggttnggacccgtggggccggcttggctagsgcgcggyggccgtggctaaggctgctacgaagcgagcttgggaggagcagcggcctgcggggcagaggagcatcccgtctaccaggtcccaagcggcgtggcccgcgggtcatggccaaaggagaaggcgccgagagcggctccgcggcggggctgctacccaccagcatcctccaaagcactgaacgcccggcccaggtgaagaaagaaccgaaaaagaagaaacaacagttgtctgtttgcaacaagctttgctatgcacttgggggagccccctaccaggtgacgggctgtgccctgggtttcttccttcagatctacctattggatgtggctcaggtgggccctttctctgcctccatcatcctgtttgtgggccgagcctgggatgccatcacagaccccctggtgggcctctgcatcagcaaatccccctggacctgcctgggtcgccttatgccctggatcatcttctccacgcccctggccgtcattgcctacttcctcatctggttcgtgcccgacttcccacacggccagacctattggtacctgcttttctattgcctctttgaaacaatggtcacgtgtttccatgttccctactcggctctcaccatgttcatcagcaccgagcagactgagcgggattctgccaccgcctatcggatgactgtggaagtgctgggcacagtgctgggcacgrcgatccagggacaaatcgtgggccaagcagacacgccttgtttccaggacctcaatagctctacagtagcttcacaaagtgccaaccatacacatggcaccacctcacacagggaaacgcaaaaggcatacctgctggcagcgggggtcattgtctgtatctatataatctgtgctgtcatcctgatcctgggcgtgcgggagcagagagaaccctatgaagcccagcagtctgagccaatcgcctacttccggggcctacggctggtcatgagccacggcccatacatcaaacttattactggcttcctcttcacctccttggctttcatgctggtggaggggaactttgtcttgttttgcacctacaccttgggcttccgcaatgaattccagaatctactcctggccatcatgctctcggccactttaaccattcccatctggcagtggttcttgacccggtttggcaagaagacagctgtatatgttgggatctcatcagcagtgccatttctcatcttggtggccctcatggagagtaacctcatcattacatatgcggtagtgtggcagctggcatcagtgtggcagctgccttcttactaccctggtccatgctgcctgatgtcattgacgacttccatctgaagcagccccacttccatggaaccgagcccatcttcttctccttctatgtcttcttcaccaagtttgcctctggagtgtcactgggcatttctaccctcagtctggactttgcagggtaccagacccgtggctgctcgcagccggaacgtgtcaagtttacactgaacatgctcgtgaccatggctcccatagttctcatcctgctgggcctgctgctcttcaaaatgtaccccattgatgaggagaggcggcggcagaataagaaggccctgcaggcactgagggacgaggccagcagctctggctgctcagaaacagactccacagagctggctagcatcctctagggcccgccacgttgcccgaagccaccatgcagaaggccacagaagggatcaggacctgtctgccggcttgctgagcagctggactgcaggtgctaggaagggaactgaagactcaaggaggtggcccaggacacttgctgtgctcactgtggggccggctgctctgtggcctcctgcctcccctctgcctgcctgtgggccaagccctggggctgccactgtgaatatgccaaggactgatngggcctagcccggaacactaatgtagaaaccttttttttacagagcctaattaataacttaatgactgtgtacatagcaatgtgtgtgtatgtatatgtctgtgagctattaatgttattaattttcataaaagctggaaagcaaaaaaaaaaaaaaaaaactcga

SEQ ID NO: 406 - DNA, 939 bp, Homo sapiens
ggtagaacctgattgttttcttctaatggaaataaataacaaatgtataggagccaagtgtttaaatatttgttatttcaaatgtaatagtttatctactgcttatgtttgctaagaccaacatattttatctgctggatatatttgctaggacagcattgacttttgtgcatttattttataattggccatgtactgagctgacttagaccgtgactaataggttttcagatggttcttttgagagttcttgctagtcatttacatcatttttatttctcttttacaatatgtatatttcaatctgcttatatattaacccttctgttggtggttttaatgacatctgactagaaatactagttaaaacattaatgtaagtaaatgagggattgcatatcmaatatgaccacgtggaagcatgcaawtaacataaattcacaaaacaatacttcaggtgacaagaacactataaaaatgttcacatccctagtaattaaaataatatacattaaaaatggtatactactgggattgcaggcatgagccactgcgcccggccacggaagatttccattttaagaaatatgycttgaaaaaagtaatttgataaatattaaaatgcttgtaaacagrtattwaycataataagaaaaaaaggcmgcmatataatatctaaaccctaacagtcattctccagagatgctgttctttgtacctgcaatgtggttaagaaaagcattttatttttctttaataattatacattaacatgtaaaaatcccatcagagtcccagcacagtggcttatgcctagctgtaatcccagcactttggtaggccaagcagggaggatttcttgaggccaggaattgaagaccagtctgggcaacatagcgagacccctgcctctacaaaaaaaaaaaaaaaaaactcgag

SEQ ID NO: 407 - DNA, 641 bp, Homo sapiens
ttttttttttttttttttttttcctgcctcaggtttatttgtacaaatagcacaggaggaccccagccccatgcagatggtagcccagggcgggggtggggggtcgcaccagtccttctgtcctcatgttggcagagatatctactctgaagcctttgtaggggcctgggtacgtttgggagcctgagctggaactgaagctggggctgcagcctgggccttggtttgatccttggccttggccttggcctttggccggcacagcctgagccccttggcaatacgggcacgagcacgcttcccaagcttggggtgggcaatgtaggcaagtcgatcgagcttgcggctgacaccctttgggatcttgggcttaacctccttgggctttacgagggccttgatagcctcggcacgtgcactcatggccttggcattgttggcctgcatcttctttaggccctttttgttgtgcttcttggcaaagcgcatgttcctcaggaacttgggtccacccccttaagagattcgtatctttgtgatcggggtttcttgataccatttctgtgccattttcgggactggttgtgtgtggtgtggttcttggacttggccatgtctgcaccataagccgcgctcgtgcc

SEQ ID NO: 408 - DNA, 883 bp, Homo sapiens
gatctgggaagagagtgcacagtaagagactgaaggacagatcctgactgaggacaggtagaggagttgacaaaggagcatgcagagaggcaagggaaacttcaaaagcagaatgtcacaaaagccaagagacagcttcaaaggggacagtgtcagcaaggtaaaggctgccaagaggtcaagcaagaaaagtactaaaaatatccatagcattcagtggacaattcatgacattggcattcgtgaccttggttagagtgatttcaaccatcataggtggaatggccgaccagggtgaggtgaaaagtcagtgagaaaatggagagaaaagatgatggagatacttaattcaaggagtttggccttggggtgaggggagtggacagggagagggcagtagctgggagggcatgaggtccagaacttcttttcaaggtggcagagacctgagtttgtttacatgtggaaagaagaggccaggagagactgttggaaaatacgcaagataaaagaggtacattatggggtggggagtgcccttgactgaaggaagagagtctcttccactatcctagaagggaaggaggaaggagagcatgagtgtgaatgccagctggtgggaagctaaaggaactccagacccgtggcttcaattttctctgttcaaatgttcttctctgagagcaaggatggagcggggaaggtctgaaatagagtaaaaatggggggctgggcacggtggctcacatctgcagtcccaacaccctggaaggccgagccgggcagacgacctgaggtcaggagtttgagaccatcccggccaacacggtgaaaccccgtctccaccaaaaacacaaaaaaaaaaaaaaaaaaaaaactcgag

SEQ ID NO: 409 - DNA, 1350 bp, Homo sapiens
ggcacgagtgttgatcattacctgtaaatgaaagaccttaataggaaaaaaagagtaaagctcagtgtgaatgcaaacatccacaaaatatgatcttcgtttatattctgtgatgttgtttataaatgaatgcctcagttctctgctacccttttcacagctttgtactgtttgccttatattctatttgtgcttttaaagtgtgtctgttgggaaaacaaaatgtgtaggtggtttgtaagtgaataatttttatttcttcttgtattaaaattttgtttttttctctactttgggagatgtttatttacattgtcagactattcacaaaacagattctaaaatttgtttgctcgtatgctgttcccttcaatgtgatatcagagattactatgaatgttagtttcattccgtgaaacattacttccatataaagacagatctcttaataagtgaatctagtggaagaacataggtatcattctaattccatggtaaattttgtcatgattctatatgaataatggggtccttcaggaagttggaatttttgccttctcttttaattgcagtgaagttctctttataacttctaaaattcggaattctagatccttgcttttgcagaatttggtgctcagacaatatttaaggacatttcagcgagacaaagtgcatgtttttatcgagtaccctgtgcaccacattatatctggcaattctttttgtttcattatgtgcatcaatatttttctcagctactattacctgaaacttgtttaacatgtattagacctagaattttcattttctttctcacatagttgcttcctggtatctgatttagaaataacatttaaatgccaagtatctgggggattgaaggaagggtctatatgagcaggtgaattagcagtactgtttttgtttagtggatattgttagtgactttttgtgtgtgttttgctttgggacctttttattttggtgttgcaaaaagtaacatattttcatcattgcttcatacgacatggagttaggacagggaaaaatcattcaacactccttatgcattaaatgatcaaataaaccagtgtaggatattaagactatcaattggtgggattaggcttgacattttatttttataaatatatattttttctgaatgtgtctgagtccaagagtgggcaaaaaataattttctactttggactaatctatagaggtttttgaaagtctgcattactaacttgttgaattcatgatattctgcctatggcacaaattgtaaacctttgtttttctaaaataaagtaattgaaaacctgcaaaaaaaaaaaaaaaaaa

SEQ ID NO: 410 - DNA, 2541 bp, Homo sapiens
aattcggcacgagcaaggatgggagaagcgaaatctgcctcactgttacttcatcaatcacagcttcaaatgtctcaatcagcagaagattgtaaattcgatctttcagggaaattaatctattctgaaaggcaataacatgaagcaaggcaaaggaggcactgatggtttagtatactacataagggatttttttgttctattattaagaaaatctagacctgaaatgttttctcaactcttattgtactgtgtatatttatattgttgtcgtggcggctgtttttaaagggaaagtgttggttctattaatttgttaagtgtccatccaggtgggcctacctgattccacatatataagtacatatctgcttataaagcgctgtaaatggcagcaaggctgtttttggagaagagtttgggttttcctaccatccctttgaatgctacacatccgtctattttaacccaagtagttcrtatttcagatatattttctcctttcatctcctctcactactgcagagtccagtaatacctagcataggattctgtcctgtgtcaaatggctaaaataaatttttgccccaatagacatgctgcctcattcaaaagagctgccgctgtcatcttgaggttccaggtagtgagagaagaaactcgacctgccagggtcaacagccatgaagaggtsgggggagtcatgattcataaacactgaaagaagtcaaggcttttggcagagagtgttgatttagatttttagtcttgattgatgggcagtatgcatcggtgtctagctgaagttgtctttaaatgcccttactcgtcacagtttaaacacttaggatgtggcaatcttaagtatcaatggcattttatgtccagctaacatcctaaagcattagaaattaaaaacgaaagacttttaaaaacatacatcaaacatgcttgcaccagagaagctttttaaaataatacactctcatagccaggtgctaatttaattttacttatgaaattaagagaggtgatgggttctagcaacagatattttcacggacatattctaaaaccactagagaattcgctacctctcagagccatcgatgctttgagctacctttataaacagggcacaaatgtttactgctgtggtttacaagaaaagggctactcacttattttgaaaccaacgaaccaacttttaactagggtgaacaaagcactcaaagtgctttgtgaaattggagcatacagagattttgagcttcaagtatttgctagttttaaaaagaatacaccttttctttaccttgtagcagcaattaaaagtcacacaaagcttgcatcgagtagggccaactgccacttgggtagcctatggtcacattcaatactgagaatgacttggaactcacagattaatatgaaagaagcagcgttcatcccaagacccatgctcacaattacagctccgtgccctgaggtagagttgagatttggattaagaaatagatttctaatacgactcaagatcatcctacaatattttctttggaaactaatttagcccatgatattttaaagagagacaagagaaggcctatttatcttgtctaagtgaacggcatttgtatattcataagctatttttggtaagaattttaaatcttttagctcaaggcctacagggcatcatgatctttgccttccttgaaaatacaatttaaattgtacaaacactttataaaaagctaattattggtgttagaacatgaccccacacaatgctgcttgacccctgaaactgacattcatgagcataacctttgttacattgttctttttgatgtaatttgtagaaatgttttttagttcgtaatggaaaatgtatgtascctgawaaattacttattttgtttaactttggtataaaggtgttgggcattttcttggggagggggggattacaaaagaagtttgtctcccacatcaaaaaacgttcaaagaaattaagtatttattatattttttgcagatgtttccatacaattcacataacctttttgtaaagagagatgaagaaatggattaaagatttttaatatttgaaatggtaaatagaactaatttattgtaatatatttctgttatttatagatgtttccttaatgttttactgtgcattaccactttcatttaagccttatccttgtgaatttaccatttyttttttaaaacatgtctagatgcatattttaaataactggaatgtaaatcactagcatatctgaattcccaaatgtaatttttaaaaattattttggtttggaaaaaaaagattcatttgaaagccttcagatggaggggtgggaacatttttatggctttatgaattggaatttcataggcttatttacctagattgtgtgtgaacaaaaaaatattgtaaatagatgaatgtttcccataatgtaaaaagaagaaattaataaaataattaatgcactgctaaaaaaaaaaaaaaaaaaactcgag

SEQ ID NO: 411 - DNA, 647 bp, Homo sapiens
  SITE (594): n equals a,t,g, or c
gtttttctctgtgtacctgatactttttaattaaaggtaaaaggtaaccgaacctttaactcttgagccagtgataatgagaaaataaaatttcatttctaaaattagagataatggaacttaaaaaaaatgtgttctctgtgtcatctctgtgcaccccctcccactattcctctcacacgctgcactttttttttttttttaaagctgcattaataggctgttatatcctttgaaataccacaggtcttgagagggatgaatgatgaaatgtaaagatcagtgattgagcaggaatgggagaaagattagggattgggttttctggcacaaggctcctttctgtcaaaggactgcaaattttcctgggttgacgtgggcttaattttttttttttccccaaggcagaagaatttttcttagtacagaacaaaatggagtctcctatgtctacttctttctacacagacacagtaacaatctgatctctctttcttttccccacatttcccccttttctattcgacaaaaccgccatcgtcatcatggcccgttctcaatgagctgttgggtatttcaaaggatataacagcntattaatgcagctttaaaaaaaaaaaaaaaaaactcgagactagcggcacgag

SEQ ID NO: 412 - DNA, 1203 bp, Homo sapiens
tccaacagggcatgtcccgggaggaccctgagtgccagattcccctggacgctcctgctgattctktcggcagttgaaggcccgtctgaggccccgcaatgcgagggtcctgtgtcccacttcactgctccgaagggaactggctggctgtccgtccagtgagcggcccagaccccacctctgcgccattgtmaccagggccctgtcctggctgcctcacccatgtmaagctactgaggctgtgtcttgtttgttttctctgttacatttttgtttgctgttgtcacagtcagctggtttcggcgtgatgttgaccttttratgtacatactccgttttaaactcatttccactctagttgagttctgcagcatgcagcggtatgaccctacgggggtcaggagagccctgcggcccccacccaccagctcagaacctgtcactaatacagctgcctgtgaccctgggacccgcaaccttccagctgcttccctttgtcaaagtcacgagtgcgtctgccttgacagccctcgtcaacagaacttccagtgggttgtgggttcatttcctttctttttaagaacagggttgggaccttttctgcccctgccccttagctactgaggcatagggagaggaagttaatttcagagccatacaaaaataagccacaaccagcttcagaattaattcccaatcccccattccaccagggctgggagcccattcccagtgcttcccaaggccctcggggacatctaccgccaacccagctgcttctggcaggggctccaagccccagcgtggggaagggccctggagaagccctcatcctcatgggaaccacactgcagtgggtggggaaggttgttgtcagcaccgcccccggctcctccaggtcctgctggctcctcgggggcagggttccctggacctcccagttctgcgccttggggccagccagtactcagagaggaggaccttctcaaccacgtacagaacacgggttttcatggctgcctttggtttggttttctgagaagataggattggattggattttgcagagggtgagaacttctctgtgcctgctcagaggcgccctagggaagggccatgtttgagttttgctttgtatgttgttttgcaagtatctgcctggtactttgatttaaaataaaaacaattttcataaaaaaaaaa

SEQ ID NO: 413 - DNA, 1561 bp, Homo sapiens
  SITE (1507): n equals a,t,g, or c
  SITE (1527): n equals a,t,g, or c
  SITE (1544): n equals a,t,g, or c
  SITE (1560): n equals a,t,g, or c
ggttttttttctcaaatccacaatctaaaaaacttacttaaaattattttatttttataattaaatggattttgagcatttctaaagttagactgctgtatttgttttctttctgcatgtaggtttttattggaaacataaggtagtcataggaacaatggtggctagatgctttctgaccttcctgcgggtaaacagcctctctcaaggaactgtagagatgggggtctggtctgggttccctcctcagagcctcctcatcacagcacagtgaaggcactctgtgattaggcgtgtctccttaagtgttatgttctctgttagaatctgtcatctggaagcctgcagacaggtgtgtttgatgacgtttcatggggccttcaggagacatgcagaacttatggtcagggcatccataaacatgtgctatgaagagagtgcctcctgagatgtatycagtgggccttaggttgcaaatggggctcagtggttacagtttgtgaggacaggaacagtgtcttcctacaccgtggtattccccacaacacttaccacagggttaggtgcttaagagctggtgaagtcatcaggcaaggtggaagacagacgacgtgcaagaagtgtgtcacagccactcagctggccacacccctgcccatctggtcacgcagcttccttaaatagctgcttctcaggcaggccttgctcaaggccagagtcaagggagcctcagagacaagagtttgaacacttcctctcatgagaggacttcagcccagggatttcacaaagtcagtatctgcttcgcaattggtttcatgttctgatcccccatcttactaaacatgtaatctgggacaagccactggctctctcagaacctgtttcttcatctgtgaaatgggaatgcaaacaccagtttcaccagctgtcttaaacccaaatgagataatgcataactacaaaatgatacacaaatgaggttgactgtactattcttatyccttgatggcattaaagttttttttttttcataattagtactttttctttgaatgtgtgagtggtagatgcaattggaacccttttgcaactcttcttggttggaaagttatctaaagttgctaatcagaccctctgctaatgtaaattctatatactgagacactgctaaacacccattaattttaactttctcattaaaaaggatgacatagaaacccttctttgtagtcaatatagatgtattttctcaaagtgaatcattaaacttaagggctttgtcatgtgaggcctctgaaaattgtacaatattagaaacatcaatgtctgtgtttaataaacttactggtagctttactgtgttgaatgtctccacctaattttgtttgtttaaaaccttgcttttggaaatttagcccttcaacttttctttaacaaaatcttggaatgaacttctgatttaaagggggccccggtacccaaattggcctataggggagccgantacaattcactgggccgcgntttacaacgtcgtgacncggcaaacccctgggng

SEQ ID NO: 414 - DNA, 2071 bp, Homo sapiens
ggcacgaggatggctagtttcgcaaagtaaagcacagagccagtgaactgggggcaaactacacgttttggataatgtgagcctaaaaagaaaaaccctaaaacttttaaataaatttctaaaaaccaaaaccttttagtatatgaatttactggcttaaaactataaatattatagttttaataattttgtagatcaggaatttaggtgggactcagctggccatttgtttccatgtcatgtatccaaagctcactctgtagtatcacctggtagatgggttgacctgaaaggtccaaggtggcttcccttatgtgtctgccaccttacgggagatgggtgggaagctggctcatctggggctattaaccagaatactggcatttgtcctgtcctctggggtggatttgcccatcaaaacttgaagttctagcagggcagggtagatactcctactatagttccaactacctgggaggctgaggcaggaggatatctttagttcagcccgagcaagctagcaagaccccatctggggctattaaccagaatactggcatttgtcctgtcctctggggtggatttgcccatcaaaacttgaagttctagcagggcagggtagatactcctactatagttccaactacctgggaggctgaggcaggaggatatctttagttcagcccgagcaagctagcaagaccccatctcgggctattaaccaaaatactgacatttgccctgtcctctggggatcttgtaaatctatcaggtgactcaggagaaaagtccatgtgcctctctccattttatggccaccagatgagttgaaggatgtaatgcttctttatgtagtaattttgtatttttattaagatgtccatgtttaccaataggaatacccatttgtccaatatatcttagacttcatacaaaagtgtaccattttcttttgtacagtactctgttctagttattatttctccaaatgctacataccttaccaggcatgtctataaatacttacatttgttgcaacatttttctggaaatctgtcatttgggaatgtttaactgatagtttgaatgtaaaatgctcctaagtttattcctgatgctagtcaatcatcaagcacttactgaacttattgagcatggggagaaaaatagtgagctgcggttgtgctccctgggggtgtcttactggctgccacggtgcatactggagggaaaccaagtgccgaacaatgtagtgtggatattaaatagtaatgggaggatgaaggcttggggagtcttgtgcatcctggaagatggacacttggggcttcaagctctttgaaggatgggtgttttcaatgttaaaacttgtttgaaaggccttgccgaaggaagtccttgaagtagctttcttgtctgttgaggtatttctcactacctgaatcttctacagcattcctgcagactggggacatcgaacccattaaatgaagccattgtggttttgaacagttccatttttcgggccgccttccttttattaagctgaaatctgtatcacttcaccttccatacattgttctgatctcgtcccttggagacttagaggattcttgccataacgtcttcctcatggaggctcttcatgtgggcctgtgtagttggcacaccccctgcctgggcttctggctataggctgctcaggcctctgcttcctgcaacagccgttctgggtgaggtcttgtggacctttatcattcggccctttgtaaaaattgatgtctacaaagaggagaaagtggcaacaatggccccagccgtgtcccccagccagggcggcccccctcccctgcccagccctccttacccagcaggcaggcaggtatgcatgcatgtgtgttaacttagtgcctcctgggtgtgcatcagtgcacagttcctagactaacataaagtcacatataggttgtgtttgttctgttgagttgagcatgtctttatcccagctctcatttcccacaatgagaaagcattaatgttcggatttagtaaaaaaaaaaaaaaaaaaaaa

SEQ ID NO: 415 - DNA, 990 bp, Homo sapiens
tcgacccacgcgtccgtgaaaacatgaagaaagagccatcattctgtattttttctttctggataacgagccatgtactaaacatctttactgttatttttctactaatttcataggagacaaagctttataacttacttttgtgaatgagattctttttatttccttactactgtttcattctttcctgtcattcaaaactcaccttcttcggtatgttctttctttacctctgtccgttcagatcagctcttgattctttaggaggcttattacagtgggtatgcctcaatatagtaatacctcatgtagctgactgggaaactctcttattcaattggtgaaaaatggatgttctcagcatcagaattttccacctgttggagttataccagttaagaaataaaagagtccaagaagggatgttccagataggggtgccccacataacacagaaggataagagttcctagaactctgactcaagtctgcaaagataaattaattaacgtatagctaatcctacatttaaaaagaaattgttgagggtttgtttttttttgtcactaagttccagtttaggagctaacacattcaaatcaaatgttccttaaaagaagctttataaaaatcagattttctctgattattgcaattaagggttaacttaaagaaaaaaaattaatttccctaagaattccacaggcttccacggacttcacgtcattattggctcaactttcctcactatctgcttcatccgccaactaatatttcactttacatccaaacatcactttggcttcgaagccgccgcctgatactggcattttgtagatgtggtttgactatttctgtatgtccccatctattgatgagggtcttaaaaaaaaaaaaaaaaaaaaaaaaaaaaaaaaaaaaaaaaaaaaaaaaaaaaaaaaaaaaaaaaaaaaaaaaaaaaaaaaaatcttctatagtgtcacctaaaac

SEQ ID NO: 416 - DNA, 1780 bp, Homo sapiens
cccacgcgtccgttttggtttgttttaatcctaagttttgcattgagcaagatactctttttcctcttttctaagtctaacatctgtgggtttgcttttcagccatagtattgattacatgttaagtcttagctctctaagtcgttgtaagctttatgtgtactggctttgttctttgattttatttcatgggaaatacaaacaattcagtgcatataaatactggaagaagttgagttgaattgcagacactaatagtcgcagcagtgtcattagtgctgcatccgaagacacctcaccagggccctccagcgtcctggcttgtttcgctggtcgccatggttgttagtgcagacataagctttgtgaggctgactgatggcagatggagggacccggctgctccccactctaacctctagcataaggaactggctggaggataaatgggttaagcatgctttaatgtacatttaatgtacatttctattctcaaaacatgttgattatttttttgccttgatgaaaacaataatcctataaaatattaattgcctgctttagaaggaaaacttctgaactggaagcaactttcgttagctatagacctttaatgaaggcagaatttcttatataaaaaaggagctaggaaagtagaagtgtaaatagaaatatagttcatcaacattactatccacttctgatgtggacattaaagggatattaatcttttaagtccagaggctctcctaggtaagtcttatgacccctcagcttaaatctcttgcccagccctctccctgaactcccaagttgtgtttctgtttgctgacttggcgtcactgatggatagctcagacctgtcatggcacaaaactgaattcctgaccattcccaaactgttctccccacggtcttcccaggttcattagtggcaaatccttccttccatttggccgcctgagatcttaaaagtaatccctgattccatacccaacatcccttgagtcaacaagttgttttgtttctgacttcagactagaacaagaaccttccacctctgagctcctcttctgcttccactgtagcgcaagacctctgaggtagaagttcagccccacagggcaagcacttctctctgtttcattcatcactgattctcctgtgccaggatcagtgcctggcacatagtagggatacaataaatatttgcccaatgaatgaattcagaaactgactttaagtatataatgttaaactataaattgcacttgaatgattaaaaatacaattttatttctaagcaggactagaattttaagtaattttggaactctagtttgtcatcttgctaataacattatctaccatttataacctgctttccatatgccaggtactgtttaaggtgctataatacataattctcaagacaaacctagcagataagaagaattttatagacaagaaaactggccgggcgtggtggctcacacctgtaatcccaacactttgggaggctgaggcaggcggatcacctgaggtcaggaattcaagagcagcctggccaacatggtgaaaccttgcctctactaaaaatacaaaaattagccaggcgtagtggcacatgccattagccccagcttctcgggaggctgaggcaagagaatcgcttgaacccagcagacggaagttgcattgagccaagatcatgtcatagcactccagcctgggtgacagagcgagactccatctcaaaaaaaaaaaaaaaaaaaaaaaa

SEQ ID NO: 417 - DNA, 869 bp, Homo sapiens
tccacgcgtccgcttaccttccctctctcctcttcctcttcattcttcatggccttctcactgcctggctgttaaagctcaggtcgaaagcctacattgtaaggtgcccaagggcgcagatgttcgtggatgtttcttggtttctggtctttaccctgctcccctagggagcttcatgagaatgtctagagctgcacctggtgcttggtagatgttccataggtgtttgttggaggaaggaatggatgagaatgagaagggagggagcctctgtgcctgccccctctgcagaggaaaccctgctgcggtgcagagacctggcctcctccctgcgcctcctgcgggccgactgcctcagcacgggcatggagctgctccggcggatccaggagaggctgcttgccatcctgcagcattctgcccaggatttccgggttggtcttcagagtccatcagtagaggcctgggaggcaaaaggacccaacatgcctggcagtcagccccaggcctcctcagggccagaggcagaagaggaggaggaagacgatgaggatgatgtgcccgagtggcagcaggatgagtttgatgaggagctggacaatgacagcttctcctacgatgagtctgagaacctggaccaagagactttcttctttggtgatgaggaagaggatgaagatgaggcctatgactgagggggcagatgcaggaaacacctagagcagccccagagtcacggggctgagggggcgggagctgcccctgtcatagggagggggattcccagcgtctgtagtgcttcctgtttgctgaataaaggtctctttctcacaaaaaaaaaaaaaaaaaaaaaaaaaaaaaaaaaaaaa

SEQ ID NO: 418 - DNA, 929 bp, Homo sapiens
tttttaatccaatgcaaatataattttacagatgagaaatgattttgcctgcagttatctgcttccaaattagaatgtatttttaatttctgatgagtcacttttcgtgtgtaatactcattttgactggtattaggtggcatgggttggtttttagtcaattccagaatatcttcttacattgttttaatgtaaagaaaatgaaaatttgatgcttctgatctttcctaatacctctatttagagcaagatggagcatctgtctccttggatcctttatatgtctagctacattgtggatgtttgatagaaataataccatgcagtatagtctccgccccgacactgaaaaaaaaaaggagggaaagtatgtagaataaaaagacaaacagtgtaacgagctttattttataacactggaacattgaacttatctgttgaggtggtactaagtaacataacaacttcaaaaacctggacccggcaggcagctaatttagctacttgaaaatcactggggaaaaggaaatagatgctaagattactgaaaccagcttaacacctgccaagttacatcgcttttaaaaaatgctaggaaggcccaggcacggtggctcacacctgtaatcccagcgctttgggaggccaaggtgggcagatcacaaggtcaggagattgagaccatcctggccaacatggtgaaacactgtctatactaaaaataaaaaaaattagccaggcacggtggcatgcgcctgtagtcccagctactcaggaggctgaggcaggagaatcgcttgaacccgggaggcggaggttgcagtgagccgagattgcaccactgcactccagcctgggtgacagagcaagactccgtctcaaaaaaaaaaaaaaaaaaaaaaaaaaaaaaaaaaaaaaagggcggccgc

SEQ ID NO: 419 - DNA, 1759 bp, Homo sapiens
  SITE (367): n equals a,t,g, or c
  SITE (896): n equals a,t,g, or c
  SITE (1747): n equals a,t,g, or c
  SITE (1748): n equals a,t,g, or c
  SITE (1754): n equals a,t,g, or c
gaaaacatttaacaattcaaattatatgcaccttttacctagttgaaaaaaatacacattcctgtkttcacattatagcaactgattaagctgaagctgtaagtcattttttatagatgagtgatccgcatctccatcaattagaacactggaaaagatgttttataaaagaggtatttaattttgtttgtaggattaactcatgcaaataataaaaaagatatcctgttggttcaatagtacactgtctcctttaaggaaggaagcgtgatgaatgaatgatgtgtagacttgagggatgactattaaaggggacgtaggatgaagagaaagaacctacagatgacaatgaatgtaaacttatttntcttcatgtgtaagcagtgtgctcgctggtgatatccagatcctaacaagattacttggttagctggttaggaccagtaactggattgcgaccactatgataatattttgaaccaaatgttaatgcttgatgcagaattgtaaagcagcatctggttcctatatagccttaaggattaattttagtgatcctcaaggaattaaatagggaatttcagaaatgtagactgcaaaggcagtatacaggaaaaggtggagtgggttttgtttatgagggtgtctgaaaactaaaattgagcgggatatcatggtatagttggacagtattggtccttcacactttggccatattgtataatggagcttttaccaaagatgtatgagaagtgtaagactataaaaaaatgaactattcaaagtaaaactcttaacaaacattttacttaaagcagatgcaaaagggtattctcatgtaggctcctgttggtgcagagggatttttttgatttcaggatacaactaaagtacgnagttctcagtttcactttagtagaaagagctctagaaatgaggctgataaacacatctaagaacactggttgctttctaaaatttccaaagctccaccataaatgtaatttttagtgtttcaaatgattgcattttaaagtatataaatatgggttatccaatatcaatgctatagtaacatcctgaaacaaaacaagcacaaaggtataaatgcctaaactggaggaaacttgaaaccctcatgttaaatcttaaatgtagtatttctaacttgtgaagacagattggtaggcagccatttttttgtgtcttaaaataactgggggcatagttaaaattttatacatcaagtgattgctattattgaatgttgcaggtgagatgtggttatttttagtttatttgaaatgtttgactggaaaggggggagggggaagcaaatatttgaaatttggaaaaccctaaaccttttggtaagaaattgtaattttcacttaaaattttctttaaggatataagaggtttataattgatgtagttaaattgaacaataaccattggtgactggagcaggtaattatagcctgcagaaaaaattatctaagaattttaaaaataagatcctgaagttgtttaattgcatccatttctgtatttatgtgaatttataaactgcagtaagttttgaatgaggttaatcttgtttaatataagtaaatgagtctgtagactgtgatctccccaaactaaaaagtacagtacttggaattgtgttctttatggttgtagtgttggtaaagcactaatatgcagaaaataaaggaattacacagtgmaaaaaaaaaaaatnnaaaaanaaaaa

SEQ ID NO: 420 - DNA, 1718 bp, Homo sapiens
tcgacccacgcgtccggcctacctcctcctcaccagctacctggcaacttttgacttgttccttagaactctctttagttgtggtcaagtcatgaagcttttcctgccccggcctctctctgcagcgagagttaggggccttctcttttgcatcttcattgcactcagacatctggtactctgtgattatcacacttattaatgctctcaagatagagataaaatcttattcatctttttgctctcaggcattagcacatggggagttctcagaaaatacctgtcttataccaggaattaatgaataatcagtaggaatgagcatgacatgttcatgggacgttggagggtagtgcatggctgcagaggagaatgggaaatgaaggtcagataagttacgtgagggatctctaaggccaagagaagccatttaggtttgatttggttggaaaatgagcttattgaaagtttaaggcaagggactagcatcatgaacacatctttttagggaagtgtgtcttgtggtaagctgctggctggtttaaatgcagcagaatattccattggggatgccagctgggagacttgccacagttgcagcctgcagcagaaagaccctgggccagaatgggttgtgccatctgtcaccagatattgccaaggtagatctggctgactttgtgggacagcttgtttctcaataatcactttgcaggcactcttgaggctgtgagcatgctcccagaagatagcattacttctctctcagagcaggctcctttctaaggaaatgcaagtctaggcctgccctgctgtaatcytcatgtggaaacagcactctagcaaagamcaaggaacctgatgagcttttcaaaggaaaatcgagtagatmcaggaaaccaagaattttctaatgagcagatagaaaagagcaggtaggtgagaagttggtattagaaaaattaaagatttgaagggcttgaggacagagatgattgttggatgtttcatttttccaggcaaaatatgtggagcaaataatcaaatgacatggacttaccccacaattagggacggagatgaggaagggttaggaatagtttctgttagaatggtagggatggaagacaattgaaaattaaagagaaaataaatggagaggaaatctaggcagcagccattcttcattctgggggaaggtggtcaggaaaaggaaggaagaaaaatgtatagcatagtagctagagtggtccggcgtgatcaaagtgttttcaatatcatgttgactgacctgtttacgtttgaaggcagagaagatagagccagtagaaggagagaaaaatcaaagctgttttacggagttgtgaaagagctggataaggacaagactaaatgagttatttttaggccaggcatggtggctcatgcctgtaatcccagcactttgggaggccaaggcaggtggggcacctgaggtcaggagttcaagagcagcctggccaacatggtgaaaccctgtctctattaaaaatacaaaaattagctggacatggtgcatggtggcaggtgcctgtaatcccagctactcaagaggctgaggcaggagaatagcttgaacccggggggcggaggttgcagtcagccgagatcatgccagtgcattccagcctgggcgacagaacgagactccgtcaaaaaaaaaaaaaaagggcggccgc

SEQ ID NO: 421 - DNA, 2927 bp, Homo sapiens
caaagtgaatgatgtggttccatgggtgttggatgtgattttaaataaacatatcatcagccccaacccacacgtgaggcaagcagcctgcatctggctcctttcccttgtcaggaagctaagtacccacaaagaagtgaagtctcatcttaaagaaattcaaagtgcatttgtttcagttctatcagaaaatgatgaacttagccaagatgttgcatcaaagggscttgggttggtttatgaactaggcaatgaacaagatcaacaggaattggtttctacacttgtggaaacacttatgactggcaaaagagttaaacatgaagtttctggagagacagtggtatttcaagggggagctcttggcaaaacaccagatggtcagggcctttctacttacaaggaactttgttctctggcaagtgatcttagccagccagatctggtgtataaatttatgaatttagccaaccatcatgcaatgtgggaactctaggaagggtgctgcttttggttttaatgtaattgctaccagagctggagagcagctggctccttttctgcctcagctagttcctcgactttatcgttaccagtttgatcccaaccttggcattcgacaggccatgacaagtatttggaatgcgttggtcactgacaaatccatggtggataaatatttgaaagaaatyctycaaratttggttaaraaccttacaagcaatatktggcgarttcsaraatccagctgtttagctttgaatgatttattgagaggaagacccttagatgacatcattgataaacttccagaaatttgggaaacgctttttagagtacaagatgatatcaaggaatctgtacgaaaagcggcagaactagctctgaaaactctgagcaaggtctgtgtgaaaatgtgtgaccctgccaaaggagcagctggccagagaaccatcgctgcccttctgccttgccttctggacaaaggaatgatgagcaccgtgacggaagttcgagccctcagcattaacacccttgtgaagatcagcaaaagtgcaggagccatgttgaaaccgcatgcaccaaaactcattccagctctgctagagtccttaagtgtattggagccccaagttctcaattatttgagcctccgggcgacagagcaagaaaaggctgcgatggatagtgctcggcttagtgctgccaaatcttctccaatgatggaaacaatcaacatgtgcctgcaataccttgatgtgtcagtgctgggcgagctagttcctaggttgtgtgaactgatcagaagtggtgtaggtcttggaactaagggtggctgtgccagtgtcattgtgtcattaactactcagtgtcctcaggacctaacaccttactcaggtaaacttatgagtgctttgctgagtggcctgacagatcggaacagtgtgattcagaaatcttgtgcatttgctatgggccatttagttcggacctcacgggatagcagcactgaaaaactcctgcagaagctcaatgggtggtatatggagaaagaagaacctatctacaagacctcttgtgctttgactattcatgctattggacgatacagccctgatgtattaaagaatcatgcaaaagaagtcctgcctctggcatttttaggcatgcatgaaattgctgatgaggagaaatccgaaaaagaagaatgtaatttatggaccgaartgkggcaggaaaacgtacctggatcctttggtggcattcgattatacctgcaggagttaattactattacccagaaggctttgcagtctcagtcctggaaaatgaaagcccagggtgcaattgccatggcatcaattgcaaaacagactagctctctagtacctccatatctcggaatgatactgaccgcattgctgcaaggcctggctggaagaacgtgggcaggaaaggaggagctattgaaagccattgcctgtgtggtgacagcttgcagtgcagagctggaaaagtctgtgcccaatcaacccagcacaaatgaaattcttcaagctgttctgaaggaatgtagcaaagagaatgtcaaatacaagattgtagcaatcagctgtgcagctgatatcttgaaggccaccaaagaggacagattccaggagttctctaacattgtcatacctctcatcaagaagaactcacttgaaagcagtggggtccggacaaccaaaaatgaagaggagaatgaaaaggaaaaggagctccagctggaatatctgctgggtgcctttgaaagcctgggcaaagcctggccgcgaaacgcggagacccaacgttgttatcgtcaggagctgtgcaaactgatgtgtgaacggctaaaactcagcacgtggaaagtgcagctaggagtcctgcaatcaatgaatgccttttttcaggggttaatgcttttggaagaagaacatgccgatcctgaggctttggctgaaattctgcttgaaacttgtaaatcaatcacatattctttagaaaataagacctactcatctgtgagaacagaagctttatctgtgatagaattgctgcttaaaaaacttgaagaatctaaacagtgggaatgtttgacatctgaatgcagagtgctcctaattgagtctttagctactatggagccagacagcagacctgaactgcaggagaaagcagcgttactgaagaaaacacttgaaaatctggaataaattagaaggggaagaaacaaacaagtgccatgttcattgggggttgaagtggtggtgttctttgaaaaaccaagtgggaaaaagtaaagattaatctgtagcatgcatcattccttggctgaaataaaaagaaaaagccttaaaaaaaaaaaaaaaaaaaaaaaaaaaaaaaaaaagtcgtatcga

SEQ ID NO: 422 - DNA, 1677 bp, Homo sapiens
tgccgccagagtaaagctttctaccctttactccctgcaaagaaacaagagtgcttatcccagctaagctccagggtaatgttatcatgacagcttcaacttttagaccacaggcaaatgctttgttaaaactctatgctggtcattcccttcaggatttggcactcaccaacatacccttctttcaagtgaaaaggcatctcttttaatggtcctgacctttggaataggaagcatgtaccctggacagagcacttcaaactagaggaaccataaatccatggctaaccttgacaaatacactgaaacattcaagatgggtagcaacagtaccagcactgctgagatttactgtaatgtcactaatgtgaaatttcaatactccctctatgcaaccacctatatcctcatattcattcctggtcttctggctaacagtgcagccttgtgggttctgtgccgcttcatcagcaagaaaaataaagccatcattttcatgatcaacctctctgtggctgaccttgctcatgtattatctttacccctccggatttactattacatcagccaccactggcctttccagagagccctttgcctgctctgcttctacctgaagtatctcaacatgtatgccagcatttgtttcctgacgtgcatcagtcttcaaaggtgcttttttctcctcaagcccttcagggccagagactggaagcgtaggtacgatgtgggcatcagtgctgccatctggatcgttgtggggactgcctgtttgccatttcccatcctgagaagcacagacttaaacaacaacaagtcctgctttgctgatcttggatacaagcaaatgaatgcagttgcgttggtcgggatgattacagttgctgagcttgcaggatttgtgatcccagtgatcatcatcgcatggtgtacctggaaaactactatatccttgagacagccaccaatggctttccaagggatcagtgagaggcagaaagcactgcggatggtgttcatgtgtgctgcagtcttcttcatctgcttcactccctatcatattaactttattttttacaccatggtaaaggaaaccatcattagcagttgtcccgttgtccgaatcgcactgtatttccaccctttttgcctgtgccttgcaagtctctgctgccttttggatccaattctttattactttatggcttcagagtttcgtgaccaactatcccgccatggcagttctgtgacccgctcccgcctcatgagcaaggagagtggttcatcaatgattggctaaaattaagatatctctttaattacgcctttgtttacctacgttccttgtctttttccaaaggccagaattgtcaaccaatttctttaattgaacattgtaaaaaacaggaataagtacttttgtgtaatattcacagtcaacaggggtgtgatggtgaaggcagagtgtgaaaaacgtgagagaggaagagaaaatagatttacctgattcctctttaaaattcaagccactttcttatttaagaaacctagatcaagtttttacagatgtaaataaaagttgaatagtttaccttaaatttttttcaataagtaagttattgttaataatgcacagtaaatatgtgaatttttcctagatgtaaaaaaaaaaaaaaa

SEQ ID NO: 423 - DNA, 1343 bp, Homo sapiens
ccacgcgtccgcttatcttccccaagagaaaatgcttcttttgagcacactgtacctaccatctgcattgagcagaaagacttttgttttactgaagacaaaagatgtttttattttagacccagaagagaggagtttgctctgaatttgtaaataagtcttccccattcctcatactcgagcctctcctctctggttgcctcctgccaccagcatccatggctcatttgacacctttttaaatatcaggacaagtctgaaacaaagtagtaaaatgtatataactcttacctgttgtcattctttttcttttaaatttgttgctaatctctgataatgaagattcttactctgattctcagctgagctgtgagggcttccagggaaaatggaacaaaatggtgttcttaggtaatgggttgtagatactgagtcttcctttccttttctgacccttctcgaggacatttgctttcctcacacttttgtagtctctctttacatattactatatggaaatgaattgctctgtgctgaaatttgaagaccagataatgaaactgaaaagcaaacaattttactgaatctgtctacccttcattcatgagaactccagaatgagtgttgaccactgaagcatcttttaagtctgtgttccattgtgccattcaggtttgctgtcacatatgcatcatctgaaatcatttgaaatttttgtacaataaaatatcctggatttgatcctgaaggaaactagtaagatcagatttttgggtcatgtctgttgtattttcagtaatgtgatttcagatggtcatctggattctcccacttctctactccattatttctctacttttccttccagcaaacctgaaacgtgagggagatggattaatgtgagtaacaggaatgtgtctttaaaaagctagagtggttacatttaatcaggcgtaagataatttgggttcttgagttgttttggagtaatatcccacaactggggtaggaagctcaggacttttttctttaaagctagtcatttcaaaagcatattgtatttttttgaatgactacagtatggacaatttcaaaaaccaaaacccactttggattggtggaaataaaaactggtaactcactcaagtgaatgaatggtcttgcattttaaaagcttatgggaaactcaatttgaaatgattagaaaatgtcaagtattataagctggtatttaagatgcttgtaaatactatttatgtttttaattttgtaaaataaagatttctttttaaaaaaaaaaaaaaaaaaaaaaaaaaaaaaaaaaaaaaaaaaaaaaaaaaagg

SEQ ID NO: 424 - DNA, 1523 bp, Homo sapiens
gggttcagagcctggcagaattgtcagctttagtctgacataatctaagggtatggggcaaggatcacatctaatgcttgtgttccttatactctattatatagtgttattcatgattcagctgatcttaacaaaattcgtagcagtggaaccttgaaatgcatgtggctagatttatgctaaaatgattctcagttagcattttagtaacacttcaaaggtttttttttgtttgttttctagacttaataaaagcttaggattaattagaagaagcaatctagttaaatttcccatttgtattttattttcttgaatacttttttcatagttatttgtttaaaaagatttaaaaatcattgcactttggtcagaaaaataataaatatatcttataaatgtttgattcccttccttgctatttttattcagtagatttttgtttggcatcatgttgaagcaccgaaagataaatgatttttaaaaggctatagagtccaaaggaatattcttttacaccaattcttcctttaaaaatctctgaggaatttgttttcgccttacttttttttcttctgtcacaatgctaagtggtatccgaggttcttaatatgagatttaaaatcttaaaatgtttcttattttcagcacttacatcatttggtacacagggtcaaatagggcaaataattttgtctttgtataatagatttgatatttaaagtcactggaaataggacaagttaatggatgtttttatattttaatagaatcatttatttctatgtgttatgaaattcacttaatgataaatttttcaacatacttgccattagaaaacaaagtattgctaagtactataacatattggccactaaaattcatattgagattatcttggtttcttggaagagataggaatgagttcttatctagtgttgcaggccagcaaatacagaggtggtttaatcaaacagctctagtatgaaagcaagaagtaaagactaaggtttcgagagcattcctactcacataagtgaagaaatctgtcagataggaatctaaatatttatagtgagattgtgaaagcaaccttaaagttttgaagaagactgatgagactaggtgctttgcttcctttcatcaggtatctttctgtggcatttgagaacagaaaccaagaaacatggtaattactaaattatgaggctttgctttttgtttgcttttaagtagaaaaacatgttggcaacattgagttttggagttgattgagataatatgacttaactagttttgtcattccatttgttaaagatacagtcaccaagaatgttttgagttttttgaaagaccccaatttaagccttgcttatttttaaattatttccattcagtgatgttggatgtatatcaattatttagtaaataatctcaataaattttgtgctgtgggcctttaaaaaaaaaaaaaaaaaaaaaaaaaaaaaaaaaaaaaaaaaaaaaaaaaaaaaaaaaaaaaa

SEQ ID NO: 425 - DNA, 1691 bp, Homo sapiens
tgaagagatcacactgtactgaaacctacattattttccaaaatctctggatctgcttctgtcttgcaggcagagagctcatccagtagcccttagctcttcccagccccctcctttgatttgtgggtgccactgcrgcagctgctgagtctcagtggtttctagtcttcaccaagttctgcccacccagatggtttttacctgtcctcaccagaaacctgcactgtctagattgctgaggctgcttctccttaaccgatctgctatctgtattccaggggcaccccagggttagaggtaaatggcacaggccttgaaatctccaactgctctgactccaggttggtgcacttcaatgccaagtactaaccacacaattacaggatgccaccaaaaccttgatatggggctgctgcatcctaattaaaaaaaaagttaatagacattattttttagaacagttctaggtttacagaaaacttgagtggataatacagagagttctcctaggctcccctgtcctccagcacacaattttccctactagtatgttgtattagtgtggtccattcattmcaattgatgaaccactgttgatatgtcattatcaactaaagtccatagtttacattggagttcattctttgagtttcacagattatgggttttggcaattacataatgtcctaaatccccaatacagcgtcatgcgaaagagtttcactgctgaaaattccctgtgcttcaccatttcacgcrtcctcctctcctccacccctgacaaccactcaccattttactacttctatctttttgactttccaagaatgtcctagagttggagtggtacagtatgtgggtttccagactggcttctttctagcattatgtactttaagttccttcatgtcttttcatggcttgataacttgttttttaaaatcagtgaatcagatttccttgtatggctacaacagtttgtttattctttcgcttggtgaaagacatcttgggcacttccaagttttggcaatgatgaataaaattgctgtaagtatttctgtgcaggattgtgagtgaacttaagttttccaaagtgactgtacccttttgatttccactagcgatggaaagttctcgttgctcctcatctttgacagcatttggtgtgttcacctttttgaattttagccattctaaacagcttatctgcccctactgtggaatgatgtgacagacatagaataacacttacagtgattctagttcaaaatgaggcaacatggaagggataaagaagtcactgacccaaaatagtttggaaatggagctgggcaaaatccagcagaagtttcttaattaggatcgacagcctgggamcggcccgccgtcctgtgggtctttgcctctgggctgtctgctgkgcatttcttggaaccattattatttatctttttttctcgcacttttttgggtatggcttctatcgcactccaaatgtttttgagattcatccwtgttgttctgtgtgtcaccagtttgttcctttagccattccatggaatgagtgtatcacagtttattgatccattcttgtattgacagatacttgaatgttttcagttttttgtattatgaataaaactgctatgaacattaaaaaaaaaaaaaaaaaaaaaaagggcggccgc

SEQ ID NO: 426 - DNA, 870 bp, Homo sapiens
  SITE (18): n equals a,t,g, or c
  SITE (26): n equals a,t,g, or c
  SITE (30): n equals a,t,g, or c
  SITE (42): n equals a,t,g, or c
  SITE (50): n equals a,t,g, or c
ccggtttttattaagggnaaaccccntttnctcttgggttcncaattctnctcttggctgccacccatttaagacatgccttttgccttccctcccccagacacatggaactgtgagtccatttaaacctctttttctttataaatgacccagtcttgggtatgtcttaatcagcagcatgaagaagaactaatacagagaggctgagtaaacaccatgtggggtgtttgcatcactgagtatcacacagccttttcactcatggttagagacggagcagaaaggtggacagacaccccagcacaaagccgagtgaagaactctgaggaaggatgcgtgcttgggaatgatgcctcgaccctggtgcctgaagccgtgcctggtgcgtggggcgtccctgtttgctgaaggaatgtggggacagagcacaggagcaaagactggctgggaccgtgtgaaagcagctctctgctgcctctcatccagcccgctgtgtccttccacagcactcatctcaatttgtggttatttgacttttctcctgtccctctgggccgtccgcccccttcgttagaatgtaactgtgtggagtgcaggcctcgcctgtgttactgtgccctcatctcaagctcagcaccgcgtcctgccctgggggcccccatgaacatgtgccgaatgaacgagcggaggaatgggggttggggcatttttattagttttccattcgcccaatcatttctaatgtggatcattttctttcaaatgataagagcgatgtttacttttctatgtttgaaaataagataaaataaaacaaaagacgcctgttgttttctcgggcagaaaaaaaaaaaaaaaaagggcggccgc

SEQ ID NO: 427 - DNA, 1622 bp, Homo sapiens
  SITE (1607): n equals a,t,g, or c
  SITE (1610): n equals a,t,g, or c
cccacgcgtccggttgagttggtttctttctgattcctctactcatgtagaaaacacttgtacttctggaaatggactggagactttttaaatttgagtccactattgacatggaaaccccagtggaatcagattttccctcaaagaccatgatggtatcggactagttttcagacactgcctgttgctgtccatcagcacttggtctcttatcttcagtgagaaggtgacccgccttcttcccatggtggctgcctaaagtgcttcttttctaacccaaaacagttctactcacttccttttacagaattcaccggccattttcctgttacctgatccttctacaggatttttaaaaagtaagagagtttcagagaagccgatcccataatccccagtgcagccagggtttgtgtgtcatcgtactggagtagagggccgactcttcccatgaaggtgagcacagctgtgagtgagtgagctcatatctccatttgtcagtgctggactggtaccagatcgtaaccttcccgttggtcggaaactttccatctgtcgccctagaaaaagagaaagcttaccatcgagggtgtggttgatccttgaagctgcttggtaaagttatcatttcctcagtcttttcttttgtactcctatcatgtattcattaatatctaccagtcccttttcattctaagacaaaacatttctcctaaatctctgaataaaatcagtgctgtaggaagatggactgtgttgatcatgggtgtaagcaacccagtttaagaaacatggcaactaaagggatacctcaggctttctttcccagtgggtcatttttgtcctagttcagtgtgtctgttactatttaaatatttatacaaaagggtttttgtttatagcttaaggaatgatactgtgctctgcttggtgcatggagaaaaaggaagacccgtactctccacaccctagagcttttctctaaatattgtgcaaagtttttgctagttttatcttctgactttgggactagtttttgctgcagagttgtgttgctttgtgattttcctctgggatagtgtactgtacacaaccagatgtgttccacactccgtgactccgcagtttgtcctggagtgacatacacatccaccatggaaagggaagcatctctgcctgtggattctcaagtacttggaagcacctctcctgaggaacctacaggattctaaggtttcctaggtcactgaacaactaatcttggtccctgaatatttctaggtttgtaagtgcagcagttttatttcctctagaactcatcctgtttcaagggaagtacctaagaagatatagagtgtttctagggtaagggacctgcaggtgtaagcatagatgaaataactgtcctgtcacatgtgcagcaggccatggagtgtagcgggcatcgctgccgccattcctgcagcatcaccataagcagtgcagggtgtctccatcgagctgtttggttccatgtgtgtttaacatgtgcagaagtagcttctctgtttaagtttaataaagttgagtttcaccaaaaaaaaaaaaaaaaaaaaaaattactcggncgncaagggaattca

SEQ ID NO: 428 - DNA, 1482 bp, Homo sapiens
tcgacccacgcgtccgccggggcgcggagaagctgcatcccagaggagcgcgtccaggagcggacccgggagtgtttcaagagccagtgacaaggaccaggggcccaagtcccaccagccatgcagacctgccccctggcattccctggccacgtttcccaggcccttgggaccctcctgtttttggctgcctccttgagtgctcagaatgaaggctgggacagccccatctgcacagagggggtagtctctgtgtcttggggcgagaacaccgtcatgtcctgcaacatctccaacgccttctcccatgtcaacatcaagctgcgtgcccacgggcaggagagcgccatcttcaatgaggtggctccaggttcagggaggcgtggcacagctggtgatcaaaggcgcccgggactcagagcgggagcccagcagggcctgagcagagcctccgctgaactgtggaccccagactccgagcccaccccaaggccgctggcactggtgttcaaaccctcaccacttggagccctggagctgctgtccccccaacccttgtttcatatgccgcagacccatagccgcctgcaaggcagagaggacacaggagagccagccctgagtgccgaccttgggtggcggggcctgggtctctcgtcccacccggagggcacagacaccggcttgcttggcaggctgggcctctgtgtcacccactcctgggtgcgtgcagacccttcccctccaccccccaggtcttccaagctctgcttcctcagtttccaaaatggaaccacctcacctccgcagcacccgacttaccaggacgcatgcccctccctctgccctcatcaaacccacagacccggactccctttctgccaccccaggctggtccggccccaggtgtggggtccgctctctccactcccagggctccgcgcccaagtgagggggcccctgccggagcctcagacacactccagttcagggctgtggggggccttggccacatacctgtcccttggctatgagcaggctttgggggcccttccgcggcagccccgggggccgaggtagggtcgggggcttagaggctgggatggctcctggccccaccgccagggggcagcgcaggccgggctgggaggcggcggcggcggctcgggctggggggtcaggtggacgctgccctccggggctggtcgcgcatccctcagtccctcggccacccgggggtcgctccctcgtgcccaccgcacctgccgagcctctttggacccagatctgttcatgcttttgtcttcgtcactgcggcggggccctttgatgtcttcatctgtatggggtggaaaaatcaccgggaatcccccttcagttctttgaaaaagttccatgactcgaatatctgaaatgaagaaaacaaaccgactcacaaaaaaaaaaaaaaaaaaaaaaaaaaaaaaaaaaaaaaaaaaaaaa

SEQ ID NO: 429 - DNA, 1041 bp, Homo sapiens
  SITE (660): n equals a,t,g, or c
acccacgcgtccggtgagtgagggctggcagctgctgggccacctcctagggaaccatagatgacgttggaccctaaatgtctatttcagtcttttctcttctgcttagtttcctcatagatggatccttcagccttctgcccaggggctgccagaactttgcttcatagctagagaccaagaccttttaaaatttgtagtagagacctcacttccttttccctaccctatccactgttgtgaatctagagccttttttgttcaatctctctagagagtaagcctttgctatttataactggaaggctctagtataagcatcttaagacttgatagacattacaagttatactctgatcaataatgtatgaatattcctgtcttacatcctctgtgtaaatacttggtattttcctttgaaaaattcaccagtgtaataaatggaaaatgatattttacatatgtttctttgattgttagagaggttgttttccatatgttttatgggatttgtatattttgtgaattttctgtccatgtctttctttggtttttattctcaagtgcttactgaattttgaattctcttgctggtgtctggaagcaaaggsctcctttawttttgctggttggcatgattttgkctcctgacatggctcnggtagttcttgtgarggtggargcacctgaaacactttatcaggcacatgatagacattgccwatcaaatggctcaacatcagttccacaaaaaacctaaatggccattcaagacctgtttctgcctgtttcaagttccatataggaattagatcagtagttggcaaatgacggcctgtgcgccaaaatctagcccagtctgtaaataaagtcatgctggaacacagctgtgctcctttgttgatgtgttgccgtgttgcctgtggctgctttcacatcacaatatcagaaattgagtagttgatacagagactacgtgggcagcaaatctagaatatttaccatctagctctttaaaaaaaaaaaaaaaagggcggccgc

SEQ ID NO: 430 - DNA, 1783 bp, Homo sapiens
attggatctttgggattgaattctccatcaatttccacatctcttttattccttctttttgcctcataaggggcttgtcctttttaattacacaggtgcttcttcttctttcttatttccttcctcagagctccctgcagagattttgccacagttgattgataagaagatattgattccaaggtcagagttcagaaatattcttataaatgaatcatcttgttaataaagggtcacccaaaaagttcgaggatacagatgttgctgaaatcagagctctcagcaattgtagcaagagagataaaatggcccaatgtcccatgctcaagaaagtaaattaaaggaaaggagagatagaatcaaaattaccatttatcaagcgtctataatatggatgcaagagtcctgtttctacaatacaaaccttatgaccttgggcgagcttcttaccatcccccaaatcttagcttcttcaactgtaaagtggtatcattaacatcttcaaaggctgttgtcaggattaaatgatgtatgtaaagtgctttgcacagctgctgtcacataataaccaatatagaaatggtcgttgttaactagcattattggaattatttgtgcttttgtttaaccatcaccagtatcctaagtgataggcatcaactagaattctaggttggaaaatcataaagcaaagatattacacaactcttgcttgttgctagtgcaacagtgtttctctttatgatttacatatgaaaaacagaccaagtgatggctattagaaaagggagggatgtagaaaaataaagccagctgaggggcagaacttgtgcattttgcaaccatcctcagtttaatgtttggcattcaatcctcattactgactatgtatggcttcacaataaatcaagagtgtgctatatgagaaaatgaagatttatacaaagcgaaattgaacaaatggtgaataattgatttagctgacctgacaacacccacttataaataacacagaatgttttactttggcagtaatttagttttctgggcatcctggcttctagcaattctctatagcggcccagtgctttctgactttcccatacagaagaaaaaaaaacttagatcatgagctctgtcctcccagtatcaccctggcatgatctatagcaagtatggttcacattagacattccctgaagaatgtaccgatcctttatttagtcctctgatttaagaatatagtttggcctctacatagcaaaacttgagacgtatttagttagctttaagaattacagtgtttaccagtcttataatacagtcttaagaaaaaagtaaaataaacaacataactataaaataaaccatattgtgtcactgtttaaaatgcctttgctggcctctggatataatacatttcatcttagagcacattagtgtaggaagcatttatttccaagtttattatcccaaagaatggtatagatgaatatacaaatccttgggcatatccacaccaaaggctatatgaattcagagatggcttactaaacaagatacagaagcaaatgaggacattttggcagacatctttgtagcattccagaatcatagaatattaggattgaaagtgtcctgaagagattattctgtttaacctcttgattataggctcagtttcattcaataaacatacagcgaacttctggaatgtgacagggattaggctgggattaggtgatgggtatgtttagggaggggaaatgaaaaaaaaaaaaaa

SEQ ID NO: 431 - DNA, 2208 bp, Homo sapiens
cacacctctgctgccctggagactgtgctcttgacctgctccgcccccttccctggagggagcaccctctggacagacagaaccatctgaggctcacctttgggttttgtgacaagaaggggacgtgttgggtttttcttccttacactatattttggctgcacacatgtctttaacccaggagcccaggggtagacaaaggaggactaaggtaatcaatttgcacctttttttatttttattttttttctttttttcttcagtggtgacttccttccctttatcttttttcattcttcccggtcctctgccctgatctgtgtaactcttatcttgggtacttgagcagacggtatattccagaggtgggaggtgggaggggaagggagaaatccaaaacaaagtgttcttgctctgacagaatattaatcttgtacgcttggattgagttatttaatttttttttcttttgcacatttttcttgtattaagattgctcttcccaagagccacaagttcctggttttagtaaacccagctgcctgcattgcctgggactagaggctggggaggctaccatgaaacaaaggtccctccctccctctgactctttgcccagacctctttagtttgggggatcctcctcactctcctgaagtgtctcaagtataccagtgggagtgcargggaggagcacaggccttcagatggggcttcccacgtgtagctactgatcccatatttcctactcaccttccaaatggtgcgacccaacttcatttgtttacttgaaaattccccctcgaggttgagagaacctctgaggtggctgtattttctcctaagcttgagatagggggctgtggtccttcctttctcctgaggaraaagtccttgctctggtgacctgtaagttgcagaggagggtggagtgagagtgtcatgtattgggatagtcagggatccctgcctttggcctttcttcttcttcttcttcctcttccatagttggatcatgtatattttacttctaaaggagagaatgtcaaaaagttctgtatttttttatattctatatattaggtaggtcaatcttaattggtctcaagaggaagaactgtctgtcatttcggtaagtaggatactgtgaggaagaccaaaaagagatatggatgcttcctcgctcaggaggcctgagcttggtccttttcctctctgcttggattctggaccaccacctgggaccaaccttcagctctggaaccttcataaagcaggtcagcgtggcctgattgtcccaggacctgaagggagcaaggatggcctcagggcctggtgaagtctgctactctgtccttactgctgaacatcctgcttgtatcaggaaactcagaagcagtttgccttgtcaaattcaatctcaatggccattgtccacataactgatcacccatggctgcctctcctattatctattatcactgaaacttagtagcctgctytttttttttttttttttagagctattgcgtatcttccctgtttgggatccttgtacctggtttgggttttcccttccttgtgacaattataatccagatgcctcttctttctgtttgaattacggtagtgcattgccttagtggcttgcctgtgcctctgggtggattacatatgatagtaaagcccacctgtttggatgggagtagaggaagttggtgtagaccagctgtggagctgaaggcacagtctgccccacccccacctccccactgtggttagtcagaggcatcctgctccaagctctgcttttccttcctctgaaacaatgccattcttgcttctattgctacacatctccttctggctcaggtgaaatccatgcccttctgcttatagacctaaagttcaggtacttattattggccattgatcttgaatttgccctctcctagtgctgcagtcccacttcaaagccattttctgaggaggatggtttaggtctggcaattgtccttgaaaaatcccacccatgttgtaccaccttggtgagtcatatgccactcatcagcttgggaatgatggctgccaactcccaatctcccaggaaggcagggggcagaatctttttttcacttggcctgctacctccattaaaaaaccattctcttacagtttaaaaaaaaaaaaaaaaaaaaaggcggccgc

SEQ ID NO: 432 - DNA, 1097 bp, Homo sapiens
tcgacccacgcgtccggtgcagccgagtcactactgcctgcctgcctgcctgctacggctcagcagcaggtacgtacccaaccatgggctcgcaggccctgcccccggggcccatgcagaccctcatctttttcgacatggaggccactggcttgcccttctcccagcccaaggtcacggagctgtgcctgctggctgtccacagatgtgccctggagagcccccccacctctcaggggccacctcccacagttcctccaccaccgcgtgtggtagacaagctctccctgtgtgtggctccggggaaggcctgcagccctgcagccagcgagatcacaggtctgagcacagctgtgctggcagcgcatgggcgtcaatgttttgatgacaacctggccaacctgctcctagccttcctgcggcgccagcacagccctggtgcctggtggcacacaatggtgaccgctacgacttccccctgctccaagcagagctggctatgctgggcctcaccagtgctctggatggtgccttctgtgtggatagcatcactgcgctgaaggccctggagcgagcaagcagcccctcagaacacggcccaaggaagagctayagcctaggcagcatctacactcgcctgtatgggcagtcccctccagactcgcacacggctgagggtgatgtcctggccctgctcagcatctgtcagtggagaccacaggccctgctgcggtgggtggatgctcacgccaggctttcggcaccatcaggcccatgtatggggtcacagcctctgctaggaccaagccaagaccatctgctgtcacaaccactgcacacctggccacaaccaggaacactagtcccagccttggagagagcaggggtaccaaggatcttcctccagtgaaggaccctggagccctatccagggaggggctgctggccccactgggtctgctggccatcctgaccttgcagtagccacactgtatggactatccctggccacacctggggagtaggccaagaaggaaaatctgacgaataaagacccccgctgccccataaaaaaaaaaaaaaaaaaaaactcgtag

SEQ ID NO: 433 - DNA, 1123 bp, Homo sapiens
  SITE (755): n equals a,t,g, or c
ggctgccagcgagagccgcgggagagtgtgcagccgagtcactactgcctgcctgcctgcctgctacggctcagcagcaggtacgtacccaaccatgggctcgcaggccctgcccccggggcccatgcagaccctcatctttttcgacatggaggccactggcttgcccttctcccagcccaaggtcacggagctgtgcctgctggctgtccacagatgtgccctggagagcccccccacctctcaggggccacctcccacagttcctccaccaccgcgtgtggtagacaagctctccctgtgtgtggctccggggaaggcctgcagccctgcagccagcgagatcacaggtctgagcacagctgtgctggcagcgcatgggcgtcaatgttttgatgacaacctggccaacctgctcctagccttcctgcggcgccagcacagccctggtgcctggtggcacacaatggtgaccgctacgacttccccctgctccaagcagagctggctatgctgggcctcaccagtgctctggatggtgccttctgtgtggatagcatcactgcgctgaaggccctggagcgagcaagcagcccctcagaacacggcccaaggaagagctayagcctaggcagcatctacactcgcctgtatgggcagtcccctccagactcgcacacggctgagggtgatgtcctggccctgctcagcatctgtcagtggagaccacaggccctgctgcggtgggtggatgntcacgccagcgctttcggcaccatcaggcccatgtatggggtcacagcctctgctaggaccaagccaagaccatctgctgtcacaaccactgcacacctggccacaaccaggaacactagtcccagccttggagagagcaggggtaccaaggatcttcctccagtgaaggaccctggagccctatccagggagggctgctggccccactgggtctgctggccatcctgaccttgcagtagccacactgtatggactatccctggccacacctggggagtaggccaagaaggaaaatctgacgaataaagacccccgctgccccataaaaaaaaaaaaaaaaaaaaaaaaaaaaaaaaaaaaaaaaaaa

SEQ ID NO: 434 - DNA, 382 bp, Homo sapiens
  SITE (11): n equals a,t,g, or c
  SITE (18): n equals a,t,g, or c
  SITE (55): n equals a,t,g, or c
  SITE (378): n equals a,t,g, or c
attcaattatnggaaaanttgttacgcctgcaggtacsggtccggaattcccggntcgacccacgcgtccgcctcccccgtgtccgtattccttacctgcaccttttcctgcaggtgggactcagggtacttgttcagcacatgtgctttcctcttcgtcttctaggagggagtggttgggtctgggctccctgttcccaagcccacgttgtgttcatggctgtggctgcctgggtgatgagtgtgagtttgcacctgggttttccctgggccttaagcagacagcgtcaccctcagagccatcaccactgtgaatcatttggatctttttccatctgggcataaaattgtatgtgtagacaaaaaaaaaaaaaaaangggg

SEQ ID NO: 435 - DNA, 750 bp, Homo sapiens
tcgacccacgcgtccggtgaagctgtctggggaagagcattccaggtggtgggaacaggcttggcaggtgtgaagatgaggaaggaggcccctgaagagccggcgggaagagcgggtggatgggaacacagtttccccgtccgccagcaggtggcactgttggcccaggactgctcgggcatggctgggagagcaggtggggccgcgggttctttgacctcaggtttgtgattctggctgtgggctcatcacaggctctacctccaccctctggggagataagccctggccgggggcagaagagcagttgtaatggtttcctggctgttctccttccccaacgggtcttgctttcagtgtttctttgcttgctccctctccagaggtgacttccctcccggtttctgggtatctgtgtctttgctctctccttttgcttttctttttgctcccttggtctcttctcctccctctctcattgctccctgggggggcaggttcctgtctcaaagattaattacttgcttttttttttttttttttttttttgggaaacctcgctctgtcgcccaggccggaggttgcagtgagccgagatcgcgccattgcactccaacctgggcgacagtgagactccatctcaaaaaacaacaacaaacaaacaaacaaaaataatactgcgatttcctagcaatgcccagtgacttaccctaaattcagtgaaagttgaaaaaaaaaaaaaaaaaaagg

SEQ ID NO: 436 - DNA, 1238 bp, Homo sapiens
ccacgcgtccgctttccggaagggtcgactcaactggatgagcatggatgtccactgctggggagagcaaagagcttgatattttaatgctttggtttctctcagaagaatgaggcaggaagacttaaccgggctttgtaaattagttaacatactatttttttttctccagttttatactcttctcagttttttttttcttttaaaaaatgtgcacaaactatttgttgcagccgtgataatattcgtagtaaagagccaaaggtgctgcgtggctgggtctgcatcaggcctgggcctccgactgcacggctccaactacacagttgtttatggagaccagtcccggcctcctctgctgagagtaaaaacaggtgtgaaaggtaaggcctaagggtttcttttgtaaacctgagctctgaggctgatggacgagttttgggctggcctgccctcctcaatacagcagaaacgcttggtaataaaagtggactcaataatttaccttagtgttttgacaaagaatgcattgtctgaattatactaggtagtatattccatcaatcagtcaacaagtgtttattaaacacctctgggcttccctggcttttgctatttggtgagaaacccaactcagtaacctaatacctgcctttgtgtgtgtgtacaaaaataaatgatgcaaaattgtaagtttcaaagacttgaataactttattggctaatattaatttagcattgttaaccatcagattaattttaggcttggggcagttttagtgattgggggagaacaagagatggacttttgagttttaggtatctgtatgtatgtactttcttgacctctgttatatttctccagataagtactgtttaaataacatataaagatgtcagatgagcaatagatagataagaatggtgcaaaaaaaaatcaaaatatgaagctactgagagcaatttctgagtctcagcatactgagttttggccccaaagtgcctggggaaaatggacatatcatctaaaaagctgtaaataccagccaacaacaggaagtcttagactcctgtcccacacttctgagctgcagggtgtgggggaagccccatgcctttatctcactgtctctatctctagcaaggaaacctgtttcctgactctgcagaatttcgctttccccctttttccttaaaagcagagttacaaaaaaaaaaaacaaaaaaaaaaaaaaaaa

SEQ ID NO: 437 - DNA, 829 bp, Homo sapiens
ccacgcgtccgctaaaatacaactttatcatacaatcaaaccaggtagttcatataaaacagtgtaatacaagttttctataaagtcattactgttgcttaaacatatttcatgcctattaaaatatattttctactggtgatttcaacattatttctcatactgacttttattactggaaatgttcctgtacatgttggcagcagataaagatttttgaatgtttgaatgccctctgccttgatttggttggaatttttgctaaattggtaatgttgcttgaactttatgactacattttcttttaacttttttcatggacttccttatatgtacataataattaaatgttgaaatttatgaaatacttttatgaatttagataatttttaaatattgttaaaatttattgaactaaaaagtaatgtaaataaaataattcatgttaaagatggaacaaaataattaactttacatgtttggtgatacagatgcaaatgtttttgatatatggagatgttgagtcttttgactttactaaaggtgctgaatagcattaaattcactattttccttttctgttttacttgtgaaaataaaaatgcactaaggttgggtagaagttctgtttgcactcactaattgtgacagacagaggtttttgtaagtatttattgtacaattgatgcatgtttatttttagcgttgttattgcctctggtgttaataaatgaacaaatggctatctggaggaacagctacaaaaaaaaaaaaaaaaaaaaaaaaaaaaaaaaaaaaaaaaaaaaaaaaaaaaaaaaaaaaaaaaaaa

SEQ ID NO: 438 - DNA, 802 bp, Homo sapiens
cccacgcgtccgatcaaagcctcggtacgtggtggctcatccctgcaatcagagtactttggtcgacccatgtgaactggtcacctaaggtcacaatttcaaaagcaccctaacatggtgaaaccccatctctactaaaaatacaaaagttagccgggggtgttggtgtgcacctttagttccagctacttgggaggctgaggcatgagaattgcttaaacctaggaggtagaagttgcagtgaaccaaaattgtgccactatactgcagcctgggtggcagagtgagtctccatctcaaacgaagcaaaaaataacaaaaaaagacctcaaaaatgcttttcttctcgtataatggacttccttctttttctttctggttcctcttcatttctctctttatttttatttatttatttatttatttattttgcagtttgagtttgagataaatctaagttataaaagttgtatttcttaatacataatgacttctgaaagatgcctttgcagcatcctataatcagctcacatcattcgtttctgtacttgtatattttccagttattttccggttgaccccagaattcgttagatttttttaaaaaacaatttcaaaatagttgctgttttaaattagttgcatccagttcatatcaatgtctgcatgctttctagtctttgttatttattgaaaacctttggtacctaaacttaagtttgattgtttcagtgtgtacttggtaaatatgtcagtggccttttaactaaacatcaaaatgtactttaaaaaaaaaaaaaaa

SEQ ID NO: 439 - DNA, 1148 bp, Homo sapiens
tcgacccacgcgtccgctcctggcctcaagtgatcctcccatctcggccttccaaactgctaggattacagccgtgagccaccaggcccggccgagcttttcttaccatggtattcttgtgttcttccagagatttttttaaaatgcctcttccttttctcactccctccctctttttcttttaacacagatgggagcattgtgtgtgcattgttgtatacttgctttttgcacatacggatcagggatttctctgtttccttacctcctgatctgcctgcgtggcaggaacattcactatgcaatgactatccctgtgctcgtcaacgttcccgtgtgaccttgcagttaggtgggaccatgtaactacttctggctagcaaactgtgagaagtgagttgtcccacttcggggctgaagcactaggaacctccagctctgccacagaagctgtgtgtcatgtggtggagcctctatcagcctagatccctgagtgattacgtgaagccgaagctggcccttcccccctggcccctgctcagacccaacctatgctgaacacgtagttgagcaagaaataaacttctgttatgttaatttgtttctacatcacacagctcctcttgatatagctggatttctttttaatagctgtgaaattcataacactttgaatgaacccagttcagatgatcaaatgcttaagaacaaaaaagcatctaattaaagaataataactttaaatatacaaatatcagatcaatgcatcttatcccaatgtgttgccacgcaaatatcygtatacataatttctaattaaactttttaatttttttaaatttatttttctgagatggcgtctcgctctgtcgcccaggctggagtgcaatggcgcaatctcagctcactgcaacctccatctcctgggttcaagcaattctcctgcctcaacctctgagtagctgggactacaggcacatgccaccacgcccggctgatctttacatttttaatagagacagggtttcaccatgttggccaggctggtctcgaacatctgacctcgtgatccgcctgcctcagccaaccaaagtgctgggattacaggcgtgaaccactgcacccagcccagcccataattaaaaaaa

SEQ ID NO: 440 - DNA, 1095 bp, Homo sapiens
  SITE (69): n equals a,t,g, or c
tcccccgcgcsttgcccgattcattaatccagytgccacgacaggtttcccgactgaaaccggccagtnagcscaacgcaattaatgtgagttagctcactcattaggcaccccaggctttacactttatgcttccggctcgtatgttgtgtgaaattgtgascggataccaatttcacacaggaamcagctatgaccatgattacgccaagctctaatacgactcactataggaaagctggtacgcctgcaggtaccggtccggaattcccgggtcgacccacgcgtccgcaaaatttcttcagtttattatctgtaaattgtacagttttctttttgaaagttttaatattgtcttcctttttaataacttattttatacatattgtgcagatgtaaatcttgtaattaatggtcaaactgtataaagggattggtagtcaaaacatgtacaaagaaatacctgtaaaactgttttgtctcatgttttattggaccaaagttgtggtttgtatggagtgtagtagtagtgtgtacaggtagaaaacttttaaatacagcatgcaggtgtttcagttagcttgttttcatcaccataactgcaaagatgtggcttagttgtattgcatgcttcctataatttaactctccataattgatgcctgcagtagtgtaaggcatttcatactagtctcctctagtagacctgtgacttactgtgttggacatattatttagacttagtcatacaaagaaacttagctcttttttcatctcacagtaaagcctatttccccaggaaaaaaataaatgcctttgaatgaaaattctgaaattgtaaatgtctattttaatattcacctatgaaagaatctgtgaatatatgtaaatacgtttaataaattttattggtcatgttaaatcattgtaaaacttttttacattgcttaatgttttaagcttaatagcctttgcacttttaaaataaaaaccaagtatgcaaatcaaagatatttggtagtcaaaataagtaaaagaaatataggaatattccagtcaaaaaaaaaaaaaaaaaaaaaaaaaaagggcggccgc

SEQ ID NO: 441 - DNA, 1393 bp, Homo sapiens
  SITE (13): n equals a,t,g, or c
  SITE (24): n equals a,t,g, or c
  SITE (39): n equals a,t,g, or c
  SITE (58): n equals a,t,g, or c
  SITE (76): n equals a,t,g, or c
  SITE (1296): n equals a,t,g, or c
  SITE (1299): n equals a,t,g, or c
  SITE (1372): n equals a,t,g, or c
  SITE (1373): n equals a,t,g, or c
tcggatgttgtgnggaattgtaancggataccaatttcnccccaggaaccagctatgnccatgattacgccaagtntaatacgactcactataggaaagctggtacgcctgcaggtcccggtccggaattcccggggtcgacccacgcgtccggggaattcttccataagttgggtaaattatatttttaactctggcatttgttcttatggtgagagttcattttttagcttctttagataaagctggccccactgatttggccctaagattaatatctgctgtaaagtataggcagtctctactgtagattctgtgcagccatgcacatatcagaaagtggtggccacaggacatacacctgactgtagctgtggctacactatggtcatcctctggacatcagtggtgagtccaaagctagttgtgaggagggaaagactatgaatgagtaatggaatgtaggaactaatagtacttgtgaactcagtagacccagactataggatttccatattgctttgaccacctttggttataatgatggaatcagaggtcttttaattatgatggtagttcctttggttttattataagtgacttttttctttctcaactgatttggtccatattcttatttcttaaactgaagtagacgtatagatccacattatatgtttcataagagttaaattatccttacatcctgaaaatagctgtctagtgtctagcccagggtcaaatgcaatgaaagaaagccaaccagttttttgctgttgttttgtttttgtttttgcagtggtacaattccacagtcctgcctctcatatatttaacacctttagcccacataattcaagaagcacattattaaggtgttgtctggctctgtgacccactagtatgcatcagtgaagccagtgctaggtttggatctgggtgtttatgagaaatgtgttgatgagaaattaagttttcccttgatacagcaggaggatttgaaatgcgttatcacagtgttctcaaggtagatgcagcaacagttgtagtaatggtagaattagaaaatttaatttgggaatattttttaagatttcagccaggcacgatggctcacgcctgtaatcccagctactcgggaggctgaggtaggagaatggtgtgaacccgggaggtggagcttgcagtgagcagagatcacgccactgcactccagcctgggcgacagagcaagactccatcttaaaaaaaaaaaaaaagggcggccgctctakaggatccaagsttamcgtaccncgngcatgcgacgccatagctcttctataggggcaccctaaattcaattcacctggcccgccgtttacaaccgccnngacctgggaaaaaaccctgg

SEQ ID NO: 442 - DNA, 1597 bp, Homo sapiens
tacgccgtgcaggtaccggtccggaattcccgggtcgacccacgcgtccgcctgcctgcagtaaaccactgcctgaaccgtgttcctaggtggtgctgatgctgggctgtctcaaaagcccttagtctgtttcaaagcttcctgccaatggcaagaatgtggatgatgtgattagaaatcaaatgaatgtaactgttacattgccaaaataccatttagctctcatttggctgctttttcactttgggtgggcattattatcagtttgctcaaaaacagtgcttatgratctatccaatgtccacaatgctgttataggataaaagsccatttcttattagtccaaataacagagtgggagacttttattcttttaattgattgtgaggttctaaaagagataattgtaaaagcaacaacaacagcaacagcaatcatggctgtatgcttatttgaacaagactagaaatgagagcagaaatttgaaaagttaaagtatttgaatgaccaccagatggcagtgtggggccacctggaagctgaagccaaagtcgtggttctgtctctctaggcagcctctgaaagtgtcagccccaaagaggcaattgctgtaaatgtataaggctaaagtatcttattaaatgattataaaatatatttaaatgcattttaaaaatgaagttcataagaattattttaggaaactgaaaggtttacatttactctaatacaaaattttagcccacaagtcttcaaaatataattaactcagagaagtctcataaatcaagacagagaattaatgaccacatagagaaaatttaagaaacaataattgatttttttaatagggaagagatcattaagcaaccacagccattacccaaataattatttttctcctaatggctacaaccattgtgcatgaaaatgatatgcataagtttcacttactctagaagaagtcaaactattttcacaaaatttctgcgtgttaaggtgaaaaatctgctgctgctttttaatacatcgtgacacaggtatggcaagcgaattcacaaggtaataccagagtattttggggtgtaaaaagagaaatccattttaaagtttgagaattcttagtttaaaatatactacaagaacgagcctctttatccctgctctgcccctgtcatagtgggagaatgtgccacaaaggccatattaatgagaggactggaaagaacacaaggagatacaaaacttcaagtcagtgaaaaagttacatgttacatgggattttggtaaattcaatgttctttccctttttccctctagaatcacaatttcaaagatgctttaatttcctccctccctccctgcctccctcccttccttccttcttccctcccttactttcttctgctctttcttgttttgatttacctccaagtggcagtaagtgctagctagcatttaaattctctacttgggtgttttatattaagttatttcatttaattatatctattcagtgaattagttatgattactggtaataataatgttaataaaatcaattttatgacaaaaaaaaaaaaaaaagggcggccgc

SEQ ID NO: 443 - DNA, 1641 bp, Homo sapiens
cccgggtcgacccacgcgtccgctaagtgaacaccatggtcagttgtgagcattttggtttccgcaaaggatggatggtgagcatcatgggaaagctgtagtttagtgacttagcccttagtgattaatagatttgcatgtacatagaagtctttgttggccttataatctgctgttatatttggcatggattttcatggttttgagaatgacatcctggccctgtggtccccgagggtcatggtccttgtgacctggcccctgttcactgcccccttcgctagcacgagttgctgtgcagggctggaggtagctaccatggcttgtttcaaggaaggaaactctggtacggtggcaccctcaggagtggaggacagtgaacttccttgaagagggagtgactaaggtgacctccaacctgccctgagccagctgccctgcaggtgccacgtgagcctgctctggcatccacaggatgctcctggagcctcttctctggctgctacctcagggcatggttgtggccccaccaacacctattttccaaataattattcattcttgtgacagtggcctgaacatgtttttaattttctcaacaagcatttagccagcacttatccagtgaaacaatttgataaggtttcaaggagtatctgatgggttaggaagtcacgaaatgaggagttcttgccacatttgcagagtccctccttgataaggtttggcggtgtccccacccaaatctcatgttgaattgtagttcccataatccccacatgttgtgggagggacccagtgggaggtaattaaatcatgggggtggttacccccacactgctgttctcatgatactgagttctcacaagtcctgtttgttttataaggggcttttcccccttttgctcaacacttcttcctgccatcatgtgaagaaggacgtgtttgtttccccttctgccacgattgtaagtttcctgaggccttcccagctatgtggaactgtgagttaattaaacctctttcctttataaattacccagtcatgggcagtcctttacagcagcatgagaatggactaatacactccccaaatgttttgaagattgttgcaccttggaactaccagtgtgcacacaatctggctcaatgtatatattggcccagcaaggcaaagaactgaagttccaggatggaagaacctgtgttctcctcataatagtatagaataattcaagataggcaagaaggacagcagtaaatgaagaccatggaagaaaagaaggaatgccaaagatcgaggaaatctaccaagactagtagggtagtccagaagaagctgtttcagggcctgttgccagctatgcctttgagaacctcgggatcccaaagaatgaggggaatttcttcagaaagacaatctcggcatgcattatttctttgttttgaagattcactcatgttgcatgcatctgtagcttgtgccttttttattgcctagtagtattctgtcatatgcctatcttacaatttgattatctattcacctgttgatgaatgtttgaattttttccatttgaggaattttatgaataaagctgctataagcatgaaaaaaaaaaaaaaaaaaagggcggccgc

SEQ ID NO: 444 - DNA, 1470 bp, Homo sapiens
acccacgcgtccgcaacattgtcctcatgtgtgtcacattcttatctgcttgctgcatctatgccttttatttgttgttgttcagtcttttcatacaagtgacaaaaaggatgctggagcaggcttggtgagaacaggaagggaacccatcaaggggcagagacactagaaagggtgtgaaataacatgaataactttctgacttcaccatggaccatggaggggtggccatccaagagggtgctgtacgaagctttcatagggagagccactctcttgtagatctgcataggtaaaccttcccaggtgagggcatcatggccagctttgcagtcttggaaactaagtttttaaagagaggaacacaggatccctggtgtaaccctgtgtgggaatcacagctacttgctgatgtaccctaaagggaaaacctgtgattatggtagaggggagtttttttcctcgcagcgacagttttgccatgaatttccaggcctcacttgatttcaggtcagggtctcttgggcaatccagaagaaattgtacaaggcaggatgactgaacaggtacagcaaatcagctcaaaacatatgtcaaacaaggtggggcctgaataaataaatacagatgagtagttcacttggctggagcatacagtgtgttgaggagagtggctacaagtagagctgactctgtgggctggaaacagattgcaaagagcttggcacattagctcaagagttttgggtttgacttgcctggcaggtggaagcctttgcagggagaatattaaatccaagcagcactatctatatactgaaatcgtaccactttgcatttaggtaatatgtggaaacttgcaaggtactttctcatttgtcatctcatttgagttttataaaaatatccttgaagtaggtaataccgcttctatcttatggattaggacactgagactcagaatggttaagtggcctctacagatctcagctaatgcgtgcagagcagaaggtgaaccaggtcagagtccaagaccatggtcatacccaccacatcatgcttctctgttaacttcacctggcactgggtgcatcacgagtcccacaaatgaagttttctagttkgtctyctgtgatattattttcagagtatcatgtataccatatattatatttgcttgtatgctctagacatttcattgcattttatagggcaatgcttcccaaacttggctactcattagaattactgtgacatttgatgaatacagatttctaggatctttcctttgagattctgatttaataggtgtaggttgggtcccagagatctgtattttttaaacatctgaccattactattaattatgagatttccttcaactttgaaacatgcttatttagtatggtttctaacatatctgacttcttgtggttcctaatggtaaaaaaaaaaaaaaagggcggccgc

SEQ ID NO: 445 - DNA, 604 bp, Homo sapiens
tgatgaaaccccatctccacttgccattacttttccttcccactctctccaacatcacattcactttaaatttttctgtatatagaaaggaaaactagcctgggcaacatgatgaaaccccatctccactgcaaaaaaaaaaaaaaaaaaataagaaagaacaaaacaaaccccacaaaaattagctgggtatgatggcacgtgcctgtagtcccagttactcaggatgattgattgagccttggaggtggaggctacagtgagctgagattgtgccactgtactcctagccagggagaaagagtgagatcctggctcaaaaaaaccaaataaaacaaaacaaacaaacgaaaaacagaaaggaagactgaaagagaatgaaaagctggggagaggaaataaaaataaagaaggaagagtgtttcatttatatctgaatgaaaatatgaatgactctaagtaattgaattaattaaaatgagccaacttttttttaacaatttacattttatttctatgggaaaaaataaatattcctcttctaaccaaaaaaaaaaaaaaaaaaaaaaaaaaaaaaaaaaaaaaaaaaaaaaaaaaaaaaaaa

SEQ ID NO: 446 - DNA, 981 bp, Homo sapiens
ctcctcccttcagaccctggcaaccactaatctgctttctgtctctctagatttgcctatctggacattttatatcgatggaatgatacaacatgtggtcttttgtgtctggcttctttcatttagcattttcaagcttcatctaagttctagtttatgtaggtattgcattgctggataaaattccattctagagatagctaccacattttatttgtccattaatcagctgatggacatttgagtttctgttttctactttcggctgttatgaataatgtcactatgaaagtttgtgtacaagcttttgtgtgaatttgtgttcagctgtcttgggtacataccttggaattgaattgttaggtaatatggtaactccgtgtttaacatcttgaggaactgccaaaatgttttccaaggtgcctataccattcccaccaggaatttctccacttcctggtcaatacttcttaatgttggtcttttttgtagccatcaggtgggtaggaaatggtatctaatgattttgatttgtatttctctaatgactaataatctgataatctaatgactaataattgagcatcatttcatgtccttatcagacatttgtatgtatcttttttggagaaatattgatttatatccttttgaaaaattggggccgtgcatggtggctcacgcctgtaatcccagcactgtgggaagctgaggcgggcggatcacgagttcaggagtttgagaccagcctggccagcgtcgtgaaaccccgtctctactaaaaatacaaaagattaactgggcatggtggcgcacacctgtagtcccagctatttgggaggctgaggcaggagaattgcttgagcctggcaggcagaggttgcagtgagctgagatcacgccactgcactccagcctgggcaacagagsagagactgcgtctcagaaaaaaaaaaaaaaaaaaaaaaaaagggcggccgc

SEQ ID NO: 447 - DNA, 1653 bp, Homo sapiens
  SITE (1555): n equals a,t,g, or c
  SITE (1581): n equals a,t,g, or c
  SITE (1584): n equals a,t,g, or c
  SITE (1611): n equals a,t,g, or c
  SITE (1626): n equals a,t,g, or c
ggtcgacccacgcgtccgagcagatcatcagccgcctcttccatcgtcatggggggccagggcccggggggccggagccagagctgtcccccatcactgagggatctgaggccagggcagggccccctgctcctgccccaccagctcccattccacccccggccccgtcccagagcagcccaccagagcagccgcagagcatggagatgcgctctgtgctgcggaaggcgggctccccgcgcaaggcccgccgcgcgcgcctcaaccctctggtgctcctcctggacgcggcgctgaccggggagctggaggtggtgcagcaggcggtgaaggagatgaacgacccgagccagcccaacgaggagggcatcactgccttgcacaacgccatctgcggcgccaactactctatcgtggatttcctcatcaccgcgggtgccaatgtcaactcccccgacagccacggctggacacccttgcactgcgcggcgtcgtgcaacsasacagtcatctgcatggcgctggtgcagcacggcgctgcaatcttcgccaccacgctcagcgacggcgccaccgccttcgagaagtgcgacccttaccgcgagggttatgctgactgcgccacctacctggcagacgtcgagcagagtatggggctgatgaacagcggggcagtgtacgctctctgggactacagcgccgagttcggggacgagctgtccttccgcgagggcgagtcggtcaccgtgctgcggagggacgggccggagagaccgactggtggtgggccgcgctgcacggccaggagggctacgtgccgcggaactacttcgggctgttccccagggtgaagcctcaaaggagtaaagtctagcaggatagaaggaggtttctgaggctgacagaaacaagcattcctgccttccctccagacctctccctctgttttttgctgcctttatctgcacccctcaccctgctggtggtggtccttgccaccggttctctgttctcctggaagtccagggaagaaggagggccccagccttaaatttagtaatctgccttagccttgggaggtctgggaagggctggaaatcactggggacaggaaaccacttccttttgccaaatcagatcccgtccaaagtgcctcccatgcctaccaccatcatcacatcccccagcaagccagccacctgcccagccgggcctgggatgggccaccacaccactggatattcctgggagtcactgctgacaccatctctcccagcagtcttggggtctgggtgggaaacattggtctctaccaggatccctgccccacctctccccaattaagtgccttcacacagcactggtttaatgtttataaacaaaatagagaaactttccttataaataaaagtagtttgcacagaaattgaaaaaaaaaaaaaaagggcggccgctctagaagatccaagcttacgtacgcgtgcatgcgastcatagctcttctatagtgtcacctaaattccaattcacttgggccggtccgtttttacaaccntcgttgaatgggggaaaaaacccctnggncgttttaccccaaccttttaattccgncctttgggcaaagcnccatttcccccccctttttccgcccaa

SEQ ID NO: 448 - DNA, 939 bp, Homo sapiens
ccacgcgtccggccccacagtgaacactactctgagaaacctgggagctctgtataggcgccagggaaagctggaggctgctgagaccctggaggaatgtgccctgcggtcccggagacagggcactgaccctatcagccagacgaaggtggcagagctgcttggggagagtgatggtagaaggacctcccaggagggccctggagacagtgtgaaattcgagggaggtgaagatgcttctgtggctgtggagtggtccggggatggcagtgggaccctgcagaggagtggctctcttggcaagatccgggatgtgctccgcagaagcagtgaactcttggtgaggaagctccaggggactgagcctcggccctccagcagcaacatgaagcgagcagcctccttgaactatctgaaccaacctagtgcagcacccctccaggtctcccggggcctcagtgccagcaccatggacctctcttcaagcagctgacattcaacccggcccccaggtctgctgggtccccccacccccacagccctcacagcattccccattgctcctggctcttccccacccctaggtgggacagtgaaggggagcagtttaagccagaagattgctgctgcccttagggtctcagctccctcctcaggaatccctcttaggaaggaccctcaggacaccctctctgcaccctgtggtcctctagagtagctagctctgaggccccaaggtgggtacaaagcaggtatggccctcagagatgcagcctgctgctggcttttcagtcagagggttgggggctggccagccaagctgccttgccctggccgctcttactccctccctctgctgtctcacttcaggtccatgtatttcacttttcttaaataaaagaatcaggtaacctttcaaaaaaaaaaaaaaaaaaaaaa

SEQ ID NO: 449 - DNA, 737 bp, Homo sapiens
ccacgcgtccgctgaccccagagcagaaccggaacaccaggttggggccctggtgctgccacctcctctgctggtcgggctgggaccctttgccccttaggagaggtgttggtcacagatgtttacctcagtttatgtcactgtcgaagaaacaaaaaataatagcaaaaaataacactgtagacatgaagacttagaagacaaaaaaaaaaaaatcacacaaaaaatctcccttgttgcgattcttctgtgaaggtacagtgtgtatgtgtgtatgtgtgtatgtgtgtgcgtgtctctgtcccagaccctgtgtcccccacactgcccccctgtcttcggtgcttcccagagacccctctgagctggcctgtggggcacgggaagccccctggatgggaggcggggccacaggtcggctagagggtctccaccaggcccactgaacagaaccccacggctgccagaatgttccctgagcctacactgtggccagtgggacagtcctggtggctgacatcagcgtccatgcttggctcagggcctggggcggggtcctgggtagagtcctagccccagagccccagcccctcatgtcttgccgcccttcctccatgtgtttgtaaatactctggcatcctttggccctgagaaggtttttaaatgtgttatttacttctctaaacatgacgattgctataaaaataaacaaaagtttagaaaaatgaaaaaaaaaa

SEQ ID NO: 450 - DNA, 2286 bp, Homo sapiens
gatggcaatattgctagagctgggactctggtgagcatccgtcatttttagtccttcttgaggacattgctgaaatttataagaggtcgaatgtttctttctttcctttctcagtctaaaagtagagttatatgytctttgacttactatgattcaagcaatagattttgaagtcagtaatcgttaagctgggacataggatgcattctccaaaaacattaatttaattagacattagccaccctatatattttacatagattaatataaaacatatcctcattaaaaaatgtttttcttgaatgtaaaagatagtcttccaaaggatagaaatattttagttccaagagaaaagccatcatattacttgggatctgtagttttcatgcctatgaaatatttataatcctccctcaccccaaataaaaaatctcctacatgtgaacatagcctgtcactcatttgccatgaggtatgtgccatctccctgcagtgctatagttctcccattgtcttcctgtctggttaatgagcagctttgtagatgggtgtgtctagttagttcttgctttttgatggagttttttcctagaggccaactactgttgctctcgtttattatgatattgacattttgggttaagcaaggtgggtgggaaaggtggtcagatgttaaatataacttattaggaggaacagtgaactgtgaagtggttagaaaaaaaataaaaacttcttattagattagacctaggaaattcaagctgacccctttgcctaacttccctagagaaaaacctagaacttggtcatccctttataggagacccctaagttgttctcagggtttggagatgatgttctggagggagtacaagcaaataatctacttctggtaatctgagggtgctttgcgtatttggccattgctcagaagaatagaggttacattatattacattatatgaaaattatttagtttttctatagccctttgtagtttgcaaagcacttttccatatgtgtgtcctctcttccacaccatagccccctgaggaagtaattgttgtccccattttatagatgaaaaggctgaggcacagaggagctaaatatcttgttcaaggccatacaatgtgtgtgattattaggcttggaatcagggcctctaactctaaagcacatgttttttcaactatatgcagaaattgcctagccatggacacaagaaagctgggaggaagagttctacttgtggatgtttttaattttttttaaatatcaggagcaatccagggccatacagctatgaagcacttagtgaaaagaacacaagaagatttactaactgaagttagtattagtgattagaaaacaaaactgccagtttgtgcttcattaaggtgaactcatctctccaagcaggaagggaaaatttgctttccctagcagttgctgcatatgtgtgtacagactgcacaattctaagaaattgtgcaaaatggcatacctgtctttctcccagatacaccgccccctgccccccccaaaaaaggtcaggattaaaggtggtgagaagtgaacatttattaaacagaagttaaaccaatagagagaaaggaggtttgttggagtctaagaggattttgaccatgtagaaattccttgaaacagaccttaaaaggtattgaaaaattgaatcacaaagaaagtttacctttaaatacttgttaatggctcctagatcatggttataatttttctcaatgggaaaaaaagtcttaaaatttgttttaaataagatcctctaatgtctcgagctttttgattctggaaataatttgctttaaaatataaatcaatcagaaagtgatctaccactgaaatcattctaggaaactagcatgggatgcactgcacaatgttctttcctctaaaggcatgggccccataaactgtggcatctggcagcaggatgccatcagtcctttagaaagcctaattttgggccgggtgcggtgctcacgcctgtaatcccagcactttgggaggccgaggcgggtggatcacaaggtcaggagttcgagaccagcctggtcaacatggcgaaatcccgtctctactaaaaacacaaaaattagccgggtgtacgtgcctgtagtctcagctacttgggaggctgaggcaggagaatcacttgaacctgggaggcagaggttacagtgagccgagatggcgccatttcactccagcctgggcgacagagcaagactctgtctcaaaaaa

SEQ ID NO: 451 - DNA, 1875 bp, Homo sapiens
ccacgcgtccggaaatgtccaagttttactctcagctaatagttagaggagtgcttggactcggcgtgatttttggactctggacgttacaaaaggaagtgagacggcacttcggggccatggtggccaccatgttctgctgggtgacggccatgcagttccacctgatgttctactgcacgcggacactgcccaatgtgctggccctgcctgtagtcctgctggccctcgcggcctggctgcggcacgagtgggcccgcttcatctggctgtcagccttcgccatcatcgtgttcagggtggagctgtgcctgttcctgggcctcctgctgctgctggccttgggcaaccgaaaggtttctgtagtcagagcccttcgccacgccgtcccggcagggatcctctgtttaggactgacggttgctgtggactcttatttttggcggcagctcacttggccggaaggaaaggtgctttggtacaacactgtcctgaacaaaagctccaactgggggacctccccgctgctgtggtacttctactcagccctgccccgcggcctgggctgcagcctgctcttcatccccctgggcttggtagacagaaggacgcacgcgccgacggtgctggcactgggcttcatggcactctactccctcctgccacacaaggagctacgcttcatcatctatgccttccccatgctcaacatcacggctgccagaggctgctcctacctgctgaataactataaaaagtcttggctgtacaaagcggggtctctgcttgtgatcggacacctcgtggtgaatgccgcctactcagccacggccctgtatgtgtcccatttcaactacccaggtggcgtcgcaatgcagaggctgcaccagctggtgcccccccagacagacgtccttctgcacattgacgtggcagccgcccagacaggtgtgtctcggtttctccaagtcaacagcgcctggaggtacgacaagagggaggatgtgcagccggggacaggcatgctggcatacacacacatctcatggaggcggccctgggctcctggccctctacagggacacacaccgggtcctggccagcgtcgtggggaccacaggtgtgagtctgaacctgacccaactgcccccttcaacgtccacctgcagacaaagctggtgcttctggagaggctcccccggccgtcctgagggggaccaggcagccctcagcagccacaggccttccaggagctgttatcactaccagtttctggcacaattccagcacaattatgacaattcagagaagcaagtcaaaggactgggcacctgcctctgacagacaccagaccaggtccagggcctcctccacagcctcagctggggctctcagcaccaaagaacgaggggcccaggtcttgttggcaccccgggagccactgcccagggtgatggtggccagctcagggcttcctgcgggtgactgtcgcccagaccaggtgccattcatgactaatcaggagcagcgggctcacccaggcacctgtctgccaggaggccacgtgtgtcctgcccacccagggggagctgtattttggcagcaccccacgcttgctgcccgagggcctcttggggcacctaagacagcaccccctttcaggggagaccatggtggccccggccgcacccccccaccctggtgccaccactgcaacttttgtattcacaggcatcccatctccatcacagataaaatcttaggagataaacacattcaaaaaggaatgagataaaaagattaaggcaataaatgttgattggaacctctcaaaaaaaaaaaaaaaaaaaaaaaaaaaaaaaaaaaaaaaaaaaa

SEQ ID NO: 452 - DNA, 518 bp, Homo sapiens
ccacgcgtccggacgtaacggaggcaggttggagccgctgccgtcgccatgacccgcggtaaccagcgtgagctcgcccgccagaagaatatgaaaaagcagagcgactcggttaagggaaagcgccgagatgacgggctttctgctgccgcccgcaagcagagggactcggagatcatgcagcagaagcagaaaaaggcaaacgagaagaaggaggaacccaagtagctttgtggcttcgtgtccaaccctcttgcccttcgcctgtgtgcctggagccagtcccaccacgctcgcgtttcctcctgtagtgctcacaggtcccagcaccgatggcattccctttgccctgagtctgcagcgggtcccttttgtgcttccttcccctcaggtagcctctctccccctgggccactcccgggggtgagggggttaccccttcccagtgttttttattcctgtggggctcaccccaaagtattaaaagtagctttgtaaaaaaaaaaaaaaaaaaaaaa

SEQ ID NO: 453 - DNA, 1413 bp, Homo sapiens
gccttgaggtggaaggcgggaaaatggcggattcctcggggcgaggcgctgggaagcctgcaaccggccccacaaattctagcagtgccaagaagaaggataaaagagttcaaggtggaagagtgattgagtcccggtatctgcagtatgaaaagaagacaacccaaaaggctcctgcaggagatgggtcacagacccgagggaagatgtctgaaggtggaaggaaatccagcctgctccagaaaagcaaagcagatagcagtggggtcrgaaagggtgacctgcagtccacgttgctggaagggcatggcacagctccacctgacctggatctctctgctattaatgacaaaagcatcgtcaaaaagacgccacagttagcaaaaacaatatcaaagaaacctgagtcaacatcattttctgcccctcggaaaaagagcccggatttatctgaagcaatggaaatgatggagtctcagacactactgctgacgctactatccgtaaagatggagaacaatcttgctgagtttgaaagaagggcagaaaagaatttattaataatgtgtaaggagaaggagaagctacagaaaaaggcccacgagctgaagcgcaggcttctcctctctcagaggaagcgggagctggcagatgtcctggatgcccagatcgagatgctcagccccttcgaggcagtggccacacgcttcaaggagcaatacaggacattcgccacggccctggacactaccaggcacgagctgcccgtgaggtccatccacctggagggagatgggcagcagctcttagacgccctgcagcatgaactggtgaccactcagcgcctcctgggagaacttgatgttggtgattcggaagaaaatgtgcaggtgctggacttactgagcgaactcaaggacgtgacrgcgaaaaaggaccttgagctccgaaggagctttgcccaggtgctggaactctccgcagaggcaagcaaagaggcagccttggcaaaccaggaagtctgggaagagacccagggcatggcgccccccagccggtggtatttcaatcaagacagtgcctgcagagaatctgggggagcacccaagaacacgcccctgtctgaggacgacaacccgggtgcctcgtcagcccccgctcaggccacgttcatcagcccaagcgaagatttttcttcaagcagccaggcagaagtcccgccctctctctctcgttcagggagggacttgtcatgactcatggttacattcaggatacttgagcactttatatactaccgtagcactgtagctattttttatgtgataatcttgtttgataaaaaagtaaacctgttttgcaattgaaaaaaaaaaaaaaaaaaaaaaaaaaaaaaaaaaaaaaagggcggcc

SEQ ID NO: 454 - DNA, 2163 bp, Homo sapiens
gagcatccagcgcaaccgctctgcctgtcgtgtgctgcttcctggagctgagagtatgcagctggcaccacaagggaacatctggggctggccctggccctgaaagtgcccttcttcatcgtggtcagcaagatcgacctatgtgccaagaccacagtggagaggacagtacgccagctggagcgggtcctcaagcagcctggctgccacaaggtccccatgctggtcacctctgaggatgatgccgtcactgctgccagcagtttgctcagtcacccaatgtcacccccatcttcacattgtccagtgtgtctggagagagtctggacctcctcaaagtctttctgaatattctgccgccactcaccaacagcaaagagcaggaggaactcatgcagcagctgacggagttccaggtggatgaaatctacacagtaccagaggtggggactgttgttggaggaacactttccagtgggatttgccgtgagggggaccagctggtggtgggccccacggatgatggctgcttcctggagctgagagtatgcagcatccagcgcaaccgctctgcctgtcgtgtgctgcgagctggtcaggctgctacactggcgcttggggactttgaccgtgcactgcttcgcaagggcatggtgatggtgagcccggagatgaatcctaccatctgctcggtgtttgaggcagagatagtcttactgttccatgccaccamcttccgacgaggattccaggtgacagtacacgtgggcaacgtacgtcagacggcatggtggaaaagatccatgccaaggacaaactgcggacaggcgagaaggcagtggtacgttwycgmttcctgaaacacccagagtacctgaaggtgggcgccaaactgctgttccgggagggtgtcaccaagggcatcggccatgtcactgatgtacaagccattacagcaggagaagcccaggccaacatgggcttctgaacccttcaggcagggacagttctattgctgtccctacaatatataaggtgacttctggccatgctgccctgccattggcggctctgtgtgttaataggctagggagagaggggtgctgtctgccacttgctccctgccaactttctggagaggtgccaaacttggtgtggccaggaaagggcagtcctgagggagaagacaggattcagggcagtgctccgaagctgtgtgctcacctggttggctcatcaaacctggcaaccctgtggcctgtctgccggagctgactggatccactcatcaattcttcgtccccactactaagactgggcatgttttgctggtgtggtctctgcacttcaggaatggtcacaacagggggtagccctcaaaagcactcctttttctatacctcttctcaaggccatgtaagttgcccatctctacctggctgtggacaaaaggttatctgctcttggccatctggtggtggtggcggcccagagtctgaagaaatggcacagggacagtgaatggtagtgttgccaccctgtgctgaggcctgaggcctcttcctcagctttatctccctttccttcactcaagggccatttccccagtccctatctcccccatcccctcccggcttataggccccacaggtgctatttgttgtgctggcccaggcgtggggctaccaagcaaaggcttggcatataccaaaggccagctgcatgcccatcagtctggtctttttcctctgcggtcatgttggctttcatgctggatcaaatgttttactttcccagactggtggcatctgagttccccatcctaccactctcaccccactttcctgccccacctaaaccctcgttttagtaatttgtagtgactgttcccttccctctgttgcagggaaccaggaggaaagggaaagatgttgccatatttcctactctttaggcatggactctcctttccctttgttagtgtcctgggttcccatggactcagggatttgttggctaaggtttctctgtgcatatatatatatatacatatgtatatatatttaaatacacatatatattgtacagaataaaaatgttttattgaaaaaaaaaaaaaaagskcggscgctctagaggatccaagcttacgtacgcgtgcaa

SEQ ID NO: 455 - DNA, 2163 bp, Homo sapiens; identical to SEQ ID NO: 454

SEQ ID NO: 456 - DNA, 1588 bp, Homo sapiens
  SITE (1586): n equals a,t,g, or c
ggaagggccaggggatcccgcggcggcgccacggaggcggaggagcaggcggtggaggcgaggcaggaagaggagcaggacttggatggtgagaaggggccatcatcggaagggcctgaggaggaggacggagaaggcttctccttcaaatacagccccgggaagctgaggggaaaccagtacaagaagatgatgaccaaagaggagctggaggaggagcagagaactgaagaataacgaaktatccttagcgtcctcctaaaggcttttccttttggcatcttaaaagcttgagagataaaacggaaaccccagagaggagtctgggcaggctcccagggtgcatgctgcctccataaatctgctgagctctagaccctcaatcaggacttgtcccttggctagcaggatcctgggaacacctttggccctgccctgtgtagagatgttcatgtctgttcctgtgggtcactttgttaagctgaagagttttaagaggtagagctcagaccctggactgggatttttcttaccactcaaacttgctatccacacaccctgcacaccttagataaaaagaacattttaaaagcagagttcactttcactccagtctcccctcttttgccctcactgaagccaaaccacagaagactttgaggaatgagagacaaatgaggtagagctcacctgtgctcaccagctccgtcagggtggtcagccgacccctttccctgggaaccccacttctctctgtggctggcttggttgtcgggggtgagatgccatattgattacagggcagcaaagaaccagtaccaggaatttacttgaccattccccttatttttcatctagaggaatctcggattcagccctttcattgctaagacaccttttcactgaggttcttaccagctcagccaaatctccactctgctatagcagaagcaataatgtttgctttaaaaagatttcttgacctatgccttttcttagaaagtttgatagattagttagaacttcagatcatcagatcagtctcaaatgggtttcttggaattttatatttgacaatatttatactataccaaactcatttgcagttcttaggtttgttggttaaaacatttttttaaagcagtaagtttatagaaaatgttttcatttaatggaaggctggggaatgtccagcatcaacccctatggcatgcattcccagtggccttctcatctgggcctggaacctttggttcagggcttaggggagaacaggccacatggcaacagccacacagtcattgccttcaacacagagccacgtgtccccaaacagcaatagtcatgcccttgtccaggctgggatctaattgatacaataggtcgttgactccctcctagtagagctatctaggtttgtctggaaagtttccgaccctggcttataggcaccacacctcatgtactcctcatggcttggatctctgtattcagcctttgttcagtccaataaactttgagtagatgatctcaaaaaaaaaaaaaaaaaaaytsggggggggcccgtacccattggcctttagggngc

SEQ ID NO: 457 - DNA, 682 bp, Homo sapiens
  SITE (7): n equals a,t,g, or c
  SITE (12): n equals a,t,g, or c
  SITE (13): n equals a,t,g, or c
  SITE (20): n equals a,t,g, or c
  SITE (32): n equals a,t,g, or c
  SITE (670): n equals a,t,g, or c
acggggnttttnnaacgggnaaatctcccctnactattgggaacaaaagctggagctccaccgcggtggcggccgctctagaactagtggatcccccgggctgcaggaattcggcacgagaacacactcacatgcagtgagttacatgaagcagatttatgactatgctcacaggcatcaagggacaatagaagcctaggattcagtgtgatttgtccccttcatgtcccccagactccagaaaggtgctcaggttaaatggtgtctcatctgtgtatgccgcacttgcactacacctgagggtccctggaagacatctctctctgggttttatattccatggtgatatgacttgctggctaaagcattacagtgtactgtttctggtcgggactggaacagaacttgagctgttttggtcagtcccttcctatcttaagatgttgtgttgtacaattattcttaagaactacaagtgaaaaaaggaggagaactgggtggtccaaggccaccagagcactgtcctgcagatcccaaggagccaatttaaactaagaaaggtattggctgagatagtgaaagaagtctttcctccttctgatcagaggagtaaaaaaaaaaaaaaaaaactcgagggggggcccggwcccaattcgcctataggaggcgnattacaattact

SEQ ID NO: 458 - DNA, 907 bp, Homo sapiens
ggcacgagaaaatatctaccataacactttacattttttcttctgtaattagaaaatatgataattttttttcaccaggcactgtgtagatgcctccaaatgccctcctgttgtccagtgtgctaaatttttttttgctgacaagttttgtttgcaatgttaaaagggttgagaagcatcattctagtcaaatgtactcattttgtatgaagaaaactgaaatctacatagcaggctcagggatttgtccagtgtcctacagttggttggtgtgaggctggatttgaaaattggggatcttggatcttgactcttcagctctcatcacctcacactgaccccctctccccccgaaacatgagggaatattggaggaaggcattgatgataattgaaagacaaaaatacagaacctcagaggaattattaaaagaactgcacatatgtagttcagaaatctttgagaccctactgtatctaatagtgcttagaatcttcttatataataatattattaatattctataatctagaatagattatagtaggattcgttttatgatgacttgggctgtatctttaagaaaacaaaagattatagcaaaaggagtttagggcaaacataaataaaaattgatactaaaatcgtatgtatgctatttccaaaaaagggaggagggaatatatgagacctttcaagttcctctggtactataattacattttctctcatcttgcttttgattggattagaattcacgcaattaaagataatctagggccaggcacctataatcccagcactttgggaagcagaggcaggaagattgcctgagcccaggattttgagaccagtctgggcaacatggcaagaccccgtctctttaagaaaaaaaaaaaaaaaaaa

SEQ ID NO: 459 - DNA, 1508 bp, Homo sapiens
ctccactagattagaaacaagaaagcccaggcctttttctacaactaaaaatactcagatttcattgaatgtttgggtaattgaatttgagtggttttgtttctttgttttattgatgaatttattattgagtaaggacacttcctttttaaaaattacttggtatcctacatagattactatattaaagcattatttggctgttctcaatcagtgttttctttgttcagtgtgccaagatcatactctttagaacattgcattatgaaaatgaagttttgacagtcagttgtggagtttttgttttgtgtgtgtgtgtgtttatttgttttttaccttcccagttcttcagccctcttcccaccaccacaatgaccccatcaagagagacaataaatgtacccataatgtttgtgtaggatcagaatttattccagtattcacagcttttgaagcaagctttaagattgcataaatccttagtaatcatggtttaagagaaacaatcccagctcctataatttttcttcactccaatcagaaaggcaactggccatgaaatctcagctggaatatttaaaaggaaattcagatatggcttgctcgtttgttaacttattaccaaatgtattaaccaaaggaaagaatttaggccaaatctgacagggtcatatgacatatgcagggaaaagccaacaggttcctattaggctactcgaactcatcctactactactactcttttgcggggttaggggtaggttttttaaaatgttcttgtgtccatcagtcacaagaggaggtagttttcactaaagataaaaaattgaggcaacttttggaactatacattacccccttttgatagggtaatggaaattgacagggtgggttattgatggaaatgatgtcataactagtctgaagactatgttatgttaactaagtatgttattacttagtctgtttaaattccccttgatgaatgagggaagattgttaaataccttgtatggtgatagtctgccctttatttttttaagtttaaccagtaaagactataataaaaggtaagatttttaaaaattgctgatagaaaagaatcacaagcaatagaaacggaaacaacagatttttattttgtattttagaacacttggcttgtaatttgcatctaatgtttgcttgcatattgtcataaaattaacagttttaaggtagtacgtttgacatgtgtgtatttttataacagcctattaaaatgatgtggaagattatacttttaaatatgcccactttgtttttttaaactcattgtagtcttagtctttcctccaataaaattgttgtgtctttatatggcaaatgtatagttattataagcattctcacgcatgtgatcccagcactttgggaggccaaggcaggtggatcacgaggtcaggagatcaagaccatcctgactaacatggtgaaaccctgtctctactaaaaaaaaaaaaaaaaaa

SEQ ID NO: 460 - DNA, 1003 bp, Homo sapiens
gctgcaggattcggcccgagtttccatcttatacacaataaatttgaggcatagagaggttaaatttgagcagtgtcactgtaactcacttttaaaaactgtgtgataattaaatggcagtccttagttttaacccagttatggctggctgtaagttccatcccgtcatgaccattatgtttcctcaacttttctattttcctacttcctttgctgtgctctcagtcgctgggagacgaaagtgctgctggttagcacagaagaaactgctgctgctgcggcttctactgttgtctgccatctctgttaccatcgagaccggggctgtgtatgctcgaggtgcagggagctaatgtataaggagttaaatgaactcttgctgctgccaaatatgttgttatcactaactgcaccgctgctgtcattagtgctgctgccaacactgcaagccctgctgctgccagtgccaattctgctgatgccttgggctctccatgtcccagggtgattccatagacaagcagctgcttttagatttcacttgctcattacctgtagatcctttgccttaggactcaagcttaagcccatgaagcctgggatagaagacaattggaggtatgttttatcttctctagcatctgggacaactggccttgaaccaaacatgtgcacctcgtttttcttttcccttcttcctctgagatttcttttcccagaggctcttatttcatgcaatgatccactagccctggaaacaggaacataaacactcgaaccctagaatgaacataatttagtcttaactacattagatattttagtttgaaagaaatcactcacatttcataatcctgaaacatataaatttatacttagttatctgtgcaaaaattgaatcatgataattattaaagaattactatgcaagtgtaaatagctttggtattaaccaagagtggtttcagtgtgcttttgtaaaaaaaaaaaaaaaaaactcgag

SEQ ID NO: 461 - DNA, 678 bp, Homo sapiens
agtccaggggactacattgcatttagctgtcatgtctctccagtttcctggtctgtgatagtttcttagtttttccttctttttcatgaccttgacagtgttgggtagtactatacaggtattctgcagaatgtcgcccaatctgggtttgtctgatgattttctcatgattagatcagggttatggatttttagaaagagtatcacaaagaggaagtgtccttctcataacatcctatcatggggtgtataatagccacatgatgtcatggttgatattaaccttcatcacttggttagtgtttgctaggcttctccactgtgaagttactgtttttccctttggaagtaagtcagtaaatctaactaccctcagatgagagagagcaggaattaacttcctcctccaggggatactaaaatatacataacataaaatttacattttaaccatttttaagtgtacagttcatattgttttataaccatcaccaccacccatctctagaactgtttcattgtctccactgaaaccctgcactcataaaacactaagtgtaaagggaattcttacattaaattgtttggcatagcatctggcaatgcagaaggcacacaataagtgtgaactattcataagtcgttttcagtgagactctgtctaaaacaacaaaaaaa

SEQ ID NO: 462 - DNA, 3281 bp, Homo sapiens
aagcagacttttgtgggctcctctttggggtgaccactgctttcaaagccatctgccaaggctctccagggcaggacctgactggtggggaatgagtgttcagaagccttgggagaggccaaagagccattctagcatgatctgagaaaaccttcctgcagaggccagaaaccttgagcttaggtgcctggggaccagcttcgacattctctccagtttctgattctaatttttgccacgtgtcacaacttttccagtctctgagaaggtcccagcctttctcaaatattctgattttgaaaatatgtatccaaagtgggaggcccctgtgacattttgccaacttaaacgagaaaaagaccccccgcacccggcacactcccccttcctccagccccgcttcagccacatgctccagctgctgcccagtaaagccctgtgcctttttttcccctgaatactgcccaaagcatccccttcccatctgcctctcaggagttggggactttgctaggagattttttaagtgttccttactgggacaacgtggagccacgtttgcaggagctccatttgtatccctgctggtgttgacttctgtgtaggggccagttcatgtccctgactctcacctcccattagataaatgaagcccacccccctttctagagtgatgagagtcaagaagaggggatgtatgaacggccaaattcccatgtgagaggaagatgacctgatccacctagccttttcttctggatctgtcctccctcacccctttcacctgagctgtccacagtaggaaacataaagaaacaatgtcccctacatatccccatgactacataatccatcatcgtaggaaataggaaagcaaatttgattttggttttgtaaaacgtacatgcttcaataattcttttttgtgtcttaaatactcataggggaaaaaaacagctcacccaaggtgttaggtttcacatatatattcatcaactattttagaagatttaattctatcaaatcttgtattacctcagatcattttaaatagcaagccaataacgagctttgaaggctattttaccattcctgttcacaaaaggttctcatggtgcctgacaggttacccttgagggcttgtgtctactttttaaaagtcaatggttttttttcttgtgttctagtttccataataggagagaaaatatagaaatatatgcaaaaattatagttttctttagatcagaaactgatatttttgggtcagccatatgtattttgtttaaaggatttaaaataaagtgccgtcatgtagccctgtggaagggagcacataaccagctgtttggcatgacaggtgacttagtatatttgtaattggttttaaaaccaatacaccatactttctttctgcaaacagccatctttatacttagggaagaaaaattgttgggttctagacttttttaatataaattttgttgatatggaattaggtaagtttaagtgtctatgtgcatatgttttttatataagttttttctattcagtttcactgatccaactggcagtgggtaaatatggcataagttaataacacttttccccaaaatggtgctttggatttgaaaagggtctgatggggagaaggagaacgtatcatcctagcttcctctcttaataaacctagaaaaacgggtagtaaactgtggatagtcaggaaaacacccagcaagggacacagctgtcaggaaatgaatcttccccccaacccccaccatgcagatggatagacagaatctttcctgactagtcattaggatcaggggcctctgttggatttgtgtttcttgaagaatagctggcagagtggtataaaagacacgaatatctcctggtctataaggatactctgatttggggtttgcatttttcatggtttttatttcctgttccccctggagttttccattagtgagtttttgtgcaaggatcttatttgtgatgccttccctcccctagaaagattttgtgcaatatattaaatggggacagaattctaaatggataaaacaatggctggttctagccctgagtgacagtcttaaggctagatccttcccatagtatcatctgtcctctggaatgactctcctgtccctaaaggggttaagagagagatcacctagaaatccctctggacacttgtgggttctttagggtttgagtttcttcttccccttgagcttcagagaggagagttggcatggttaaatctgaatggttacctcactgctgaaaacccagaggggcgtggcacactcgcttgtgtggaaaagcctctaaatgcatcccttcctttctttcctgcttcctttgccttacaattgaagcagcccgtggtaccatcacagtatgcagagacttcctcacctttcatatctagggaccacccccgatgcattggtgagggtgggcacttataaatgcctgctattgttaagccattccagcctcttcctctgaatagaccagacgccctttcacttagttcagtgccagtccttttgccttcccaaccctgctgttaggcctgctgttccctttgctcttgattaggagagatggaaggagatgagctcccataactgaattggcctttggttcatgttttctccccatatgtatatatgccatatgtgaatatgccatatatatgtgccaacaaatctatctacgttgttcttttcaaattagcacgcagataggaattttgagtttcttcttcttttagtaactagtataacaagcactggtatttttgtacaaaaaagaaaaacaaaagattgactattgtggtctgcatgacataaacaaacaaatggtgatatcaaagcaacgtataccccagtccagtgtgtgttgccataatttgcaattcagcttaacagtgcacccaatctatatttgcattttgatattatttaagctctatgtacaaggttttgcatgtatttatatggttcttagggaaaaaaaatgctataaactgcaaatctgaaattcaaatgtgttgttccactgagaccagaagaagaagaggagttttaaaagggataatttgttggagccaataaagctttttgctgatgaacagaaaccaatactgctgtgcactgagaataaaaactcatgcccacttgtaaaaaaaaaaaaaaaaaaaaaaaaaaaaaaaaaaaaaaaaaaaaaaaaaaaaaaaaaaaaaaaaaaaaactcga

SEQ ID NO: 463 - DNA, 870 bp, Homo sapiens
  SITE (836): n equals a,t,g, or c
  SITE (837): n equals a,t,g, or c
ctatgaccatgattacgccaagcttcgaaattaaccctcattaaagggaacaaaagctggagttccaccgcgttggcggcccgctctagaactagtggatcccccgggctgcaggaattcggcagagccaacctcaggagttgaagaggcttatgcggtgggggcaggaggagaactgctttccctcagctgagggaagaggggctattccagagggactgagtcagtagccaaagactcagcttcccctgtccttccccagtcccttcacttcccctaccctctgacctatctctgaaagccaagttatgcgtatgtgtgtgtgcacaagcttgtctttgtgtggtatgtgtgtgtgagtgtgcatgtatgcacacacacaggggttaaccacccctcacctagggctccagactccagttgtccctctcctcctacctgtgtctccttgttttggggtcctgactgaagaaggtgtccagggggcagagtcagggccaagcactggggtgcctcctctcacctggccagactctgacccacctacctcagctggggtgaggggcacccctcaaactcagtcatgtggttccaaactaccccattccccactccagactctgacccagcctcagtcctaactcctggggctgggctgaggggaacaagcatttgctgaaacttgaaaaaacaaagcaaatcaaaaacaggaaaaaattgtacctggtacttttttttagaaaaaaagattaaaaaagaaagaataaattcttgtttggaaacttgaaaaaaaaaaaaaaaaaaaaaaaacycgagggggggccggkacccaattnncccaaargggrgggtttaaaattmasgggcggg

SEQ ID NO: 464 - DNA, 1735 bp, Homo sapiens
cccacgcgtccgccaggccttgagacccagaagggagcgaaggtttttgctgcgccaacgcagtgaccgaaggctccgctcacgcccggcctgatcctgcctgaagatggtgccactggtggctgtggtatcagggccccgtgcccagctctttgcctgcctgctcaggctgggcactcagcaggtcggcccccttcagctgcacaccggggccagccatgcggccaggaaccattatgaggtgctggtgctgggtgggggcagtggcggaatcaccatggctgcccgcatgaagaggaaagtgggtgcagagaatgtggccattgttgagcccagtgagagacatttctaccagccaatctggacactggtgggtgctggtgccaaacaattgtcctcatctggtcgtcccacggcaagtgtgattccatctggtgtagaatggatcaaagctagagtgactgagttgaacccagacaagaactgcattcacacagatgacgacgagaagatctcctaccgatatcttattattgctctcggaatccagctggactatgagaagattaaaggcctacctgaaggtttcgctcatcccaaaatagggtcgaattattcagttaagactgtagagaagacatggaaagctctgcaggacttcaaagagggcaatgccatcttcaccttcccaaatactccagtgaagtgtgctggagcccctcagaagatcatgtacttatcagaagcctacttcaggaagacagggaagcgatccaaggccaatatcattttcaacacttctcttggagccattttcggggttaagaagtatgcagatgccctgcaggagatcatccaggagcggaacctcactgttaactacaagaaaaacctcattgaagtccgagccgataaacaagaggctgtatttgagaacctggacaaaccaggagagacccaagtgatttcatatgaaatgcttcatgtcacacctccaatgagcccaccagatgtcctcaagaccagtcctgtggctgatgctgctggttgggtggatgtggataaagaaactctgcaacacaggaggtacccaaatgtgtttgggattggggactgcaccaaccttcctacgtcaaagaccgctgctgcagtagctgcccagtcaggaatacttgataggacaatttctgtaattatgaagaatcaaacaccaacaaagaagtatgatggctacacatcatgtccactggtgaccggctacaaccgtgtgattcttgctgagtttgactacaaagcagagccgctagaaaccttcccctttgatcaaagcaaagagcgcctttccatgtatctcatgaaagctgacctgatgcctttcctgtattggaatatgatgctaaggggttactggggaggaccagcgtttctgcgcaagttgtttcatctaggtatgagttaaggatggctcagcacttgctcatcttggatggcttctgggccaaaactgcagtcactgaatgaccaagagcagcacgaaggacttggaacctatccttgtaaagagttccttgatgggtaatggtgaccaaatgcctcccttttcagtacctttgaacagcaaccatgtgggctactcatgatgggcttgattctttgggaataataaaatgaaataatacttttattttctgaataaaagtttgtcactgaaaaaaaaaaaaaaaaaaaactcgag

SEQ ID NO: 465 - DNA, 509 bp, Homo sapiens
ggcagagcagacatgcaagtgcatgacctcagcttttttaattcacttgactcttgttttagtacctactgtgaacaagacacaaactctgggctcaaaaatctcatgctctaggtaaggaacacagacatataaagatattatgagactagagcagctttccctgaggaggccagaaaatccttcacaaaacatgaaaaattctgtcttgagggatatatgggaatttgctgggtagagaaagagaggaaatgcattctggtggcatatagtctcaaagcatggaagagtatgctgtttacatactttcgagtttacaaagtgctttcctatatgtcatatgctttaatcattcactagctttgtatgatatcagatcaaaaggagttaagtgattatgcagtcaccggaataataggtatcagactagagtttgaattaatccatttcttccttgatttagtacttatctaaatccaaaaaaaaaaaaaaaaaaaaaaaaaaaaaaa

SEQ ID NO: 466 - DNA, 917 bp, Homo sapiens
gccgtaagatagctaggtcactaatagtctgtggcatggaaaaaaatttgttttgttttaatatggtgctaactaagcatatagagattgactctgtaactttaactccagtaacacactgttatcaccacgcaaattgaccagcctagttagtaacatcatatgcaatatcatacaaactacgtagaaccatgcctggggcactcatctgttagctcttacatgccctttgtgctcaaagagaacaatttgtggttgttgtatgccagtcaattcagtcatcatggagcttagttgtttactgtattgcatgctaagcagtagactctaggaatctaataaatttgattctcacattggtcctgtttgccacaaacattgccatgcctcaagaacctcacaagtttgtttttcttagaacagtgcatatgtagttctcatactctgcaagtgtttgcctcagcataattgtgtttatgtggaattgcactggcattgcaatgtgagaatgacagagttgacaggaccactaacatgtaccctgggaattgtttcccccatccccatagctggctgaagaaactttatttctgagttattatgtagggactgaaaggtttttttttgtttttgtttttgtttttttttacatatatacacagattgttttttacctacaatgagcaaaaataatctggacaaaaaaataatgctctccctgttttttctttcaaatgtatacatatatttgaaatcttaggcatagggaaaaacttttatgtcatcttcagagctacagccatattttttagctagaaccaactcttaaatctctcccgacagaaccttaaggaaggggacaaagtgatctccagtggaaatgtgaaaggcataaaaagaaaaaaaaaaaactcgag

SEQ ID NO: 467 - DNA, 676 bp, Homo sapiens
ggcacgaggcgctcagccccagcctcctcacgtgtacatggctccatggaggttctccagtcggttctgctgctgctgctgttttcgagccttatctcgtctgtgttcctcataagtgtagtcatcagtgggcagctcatggcggcacaagggacaggaatttgtcttgcttagccagggcagaatgcaactggaatgaaaaagatgttgggaagcatctcaatggcagtctcctcctcagattccaaaagatacacggggcacttgagctcagccttgagagcctctgatgactgtcctggagaggttctcaaccacaatcttggcagccggtggaggcaggtggtggtcccaatctactaccaaccccaagtcttcaaagtccatcctattcaaaagtgaccttacgagctccagcaccatgttggttcgagtctcctgcttgagggtccaacggctcacagtcgtgttcatcgatataggacgccatggctgcccagccgtctgacatgtgatattttgatacaggtatacaatgtgtaactatcaaatccgagtaactggggtattgatcaccttgagaatttatcatttctttgtgttaggaacagtccaattccactcttttattttaaaatatgcaataaattattaactgtaaaaaaaaaaaaaaaaa

SEQ ID NO: 468 - DNA, 1232 bp, Homo sapiens
  SITE (1204): n equals a,t,g, or c
  SITE (1229): n equals a,t,g, or c
gtgtgtttaatatgatttagtgacaaccaggaaaacttacttgggattattagcactttcaaacttagggacattattaaattggatggaatgcacttctaaatgtttaaattaaaatttcaaagctctttcgagattcaggttctcaataataatattcaagttttagagtttcactttgtactatttaaatttatggaactagtttccatactgacttgtaaggttttggggtcatatataaggactaaagccaagctaggcaaaacaatgacagcaccgttttttcagtgaagctctcagaatgtccagtacagatgttgcagataattccaagaactccttcagcaggtgttcttcaccattcgtaaacagtattttaagatgttcactttgctcttctttttggttacatacattttaataactggtatgttgaagtagtgtctaaaagtatctagtctttattcacagtacattatattgtgtgatgcactggactaactctkgtttaccattcatgtaacaaaacccagcacattatctgcactataagctcaaagaatgtcacatccgcccagacagctctttgatgagggtgatgggaactgaataaaccatacggactggcagtaacaagggcttttactgttctgttcagtggaaccttcttggtcaaattgtaattagctagcattatatttatatacagggtcttttttctttaccgatgtattttcctactcatagccaaccaataaattcagtatctgtttcaaatattttagaagtgtagtttgtatagctgtagtactgaggtttgaggaaaaataaatgttgatcagcagaccacgtatttaaaattctgaatcttctgggacagggttgtaactcagccttccaaagggaagagtgcagggggacggggccatgatatggggaaatggtgtaaactaatgtatttctttattggctgttattctgtataacactcatatctttgccaaagttcaattttatatttaggcaactgatggtccttttgcatttaggattttcgttgttgttaccttatacctcatgatataaggaatgggctcatgtgtcttccgtcttttggaaggaggttgacatattttaaataaatgcttttaaatacagtagcaaaaaaaaaaaaaaaaaaaactcggggggggccccggtncccaattggccctttagggggcggnttc

SEQ ID NO: 469 - DNA, 862 bp, Homo sapiens
ggcacgagttttatttcagtgtttgctcttcactagtatatataaaagttacttgagaaattgaaaatatttctgtaagcagaaatagtatttttttcaaaaagtgtttcagatgcttcagttattccttgcatcatttattgttcttttacagattttaatcccctttgttcttgttatgtgtgcttttgaagcagttcagttgactactcagttatcgtcaaaaaggtaagatgaattagtttaagaaacatttgatttgcctatttttaggagatgagagtaaactttcgaagacatttcatatgattgctattaagacactgtaacatagattgtttattacaaaaatgagaaaattttcacccgtttagtcagtgttgcttgtcattagaggaaattagttgattagggcctctagcagacaaacttgctttctcagcaataaaatgttattagagtattattcaagctagtgaagaacctccctagaaaacagtaaaacataaatgttaaattattgtagttaattacttgttataactgtgcctacaaaaagcaaaagatactctaacttttattttggtttatttcttaaatatgttatataaatatgttaacattatttcattttccatgacttaaaattaacttttctacatgtcaaaaatatactcagtttctctgtcatgatttctgtacatttgacaaatggagtaggaagtattctttctgagttttgaggaatttctggagcagtccgtcttaagcaatcaagactgtggaagaaaagctgtcaactcaactatttgctttttttaaccaataaaattgcctcatcagcaaaaaaaaaaaaaaaaaa

SEQ ID NO: 470 - DNA, 1388 bp, Homo sapiens
  SITE (1376): n equals a,t,g, or c
  SITE (1377): n equals a,t,g, or c
  SITE (1379): n equals a,t,g, or c
  SITE (1381): n equals a,t,g, or c
ggcgggagctggggaacaggcatggacgtttccgggcaagagaccgactggcggacaccgccttccggcagaagctggtcagtcaaatcgaggatgccatgaggaaagctggtgtggcacaagtaaatccagcaaggatatggagagccatgttttcctgaaggccaagacccgggacgaatacctttctctcgtggccaggctcattatccattttcgagacattcataacaagaaatctcaagcttccgtcagtgatcctatgaatgcactccagagcctgactggcggacctgctgcgggagccgctggaattggcatgcctcctcggggcccgggacagtctctgggcgggatgggtagccttggtgccatgggacagccaatgtctctctcagggcagccgcctcctgggacctcggggatggcccctcacagcatggctgtcgtgtctacggcaactccacagacccagctgcagctccagcaggtggcgctgcagcagcagcagcaacagcagcagttccagcagcagcagcaggcggcgctacagcagcagcagcagcagcagcaacagcagcagttccaggctcagcagagtgccatgcagcagcagttccaagcagtagtgcagcagcagcagcagctccagcagcagcagcagcagcagcagcatctaattaaattgcatcatcaaaatcagcaacagatacagcagcagcaacagcagctgcagcgaatagcacagctgcagctycaacaacagcaacagcagcagcagcagcagcagcagcagcagcagcaggctttgcaggcccagccaccaattcagcagccaccgatgcagcagccacagcctccgccctcccaggctctgccccagcagctgcagcagatgcatcacacacagcaccaccagccgccaccacagccccagcagcctccagttgctcagaaccaaccatcacaactcccgccacagtcgcagacccagcctttggtgtcacaggcgcaagctctccctggacaaatgttgtatacccaaccaccaatttagatcatctttagcggtgaatgagtggattaattttactacaactactgatggtggtggtggaatttcagttgcttttttttgcgaggttaataggtctaaaattttacttttgtttgatgactagtggtttgaatttttcgctgcctgttatattgcttgtatactttgcctgtttgtgtcactgtccttttggattggagtcatactgtttttttttgtttattttaacttatctgtataaaacattgtattcaaaactagttattgktggtcagatttaatacaaatgtttttcctaaaaaaaaaaaaaaaaaaaaannananactcgag

SEQ ID NO: 471 - DNA, 692 bp, Homo sapiens
  SITE (13): n equals a,t,g, or c
  SITE (681): n equals a,t,g, or c
  SITE (692): n equals a,t,g, or c
gctcgtgccggtnctggggtatgtctttattggcagcatgagaacagactaatacaactgcctagaatagtcactgataaacagtaaactgactcaatgaaagtcagccattattagtacaattataaacctgtggcagaatgacttataaatttatactaattttaaaaattaagtaatactagaaaaattagcaaataatagtctgattaagaactgacattcctcgcctcttttcctttctctgccatcatggtgtgtgcttgactttgcttcttgccatgtcttctcacaagactttcaggattaagtgattgctggccaagaaacaaaagcaaaattgtcccattccccagtggattcagatgaaaactggtaataaaatcaggattttattaataaaataaaaccaaaaggagacaatggagaagaaccaagctgggtctataaggaattgcacatgagatggcacacatatttatgctgtctgaaggtcacaatcatgttaccatatcaggctgaaaatgtcaccactatccggagagtttgacatgttttgttgggaatatattttgtctctctgcatctgttatgaacgcattggttggctgggktcagtaataaatatgtgaggcctttcattaaaaaaaaaaaaaaaaaactcgagggggggggcccggnacccaattcgn

SEQ ID NO: 472 - DNA, 2629 bp, Homo sapiens
  SITE (2591): n equals a,t,g, or c
tgctaccccactaaagggaacaaaagctggagctccaccgcggtggcggccgctctagaactagtggatcccccgggctgcaggaattcggcacgarccccaactcacttggaatgtttttatatgtaatcatttcccttgaagcttatactttataagggaagaaagaattcaggtgatatgggaaaactgcttggcagaccttcatcttctgcctcaactgtaaaccacatgtaaatgcttaatggagactgttttcattcttgtgatatttaacattcagaaaattacttcagctttggaaatactcaggctgtttttattctgcaggtaagtgttttgacttaagtactaatattccagaaatttttgaaagcagtaaccttaatttcctatgtatttcattccacttttgcatataggtcaaatagcaatgtgtatgcacattctctttagttaaggcaccaattgttttggttggttttcctaagacatactttaaaaagatgttctataaatttcctarttaaattatggggattttggagtatgtacatgataaattataatacgtatatggttgaagttattttattttttactaatgaattattttaatattccttattgaataaatgctgtaacttgtttgctatggaacttattcttaaagttctagttaaaaataatttttccacatgcatgaaaatatgtattaatcagaggtggcttaattacattgaaattgcttttttgttgttgtttttttactgaaataactcatgtttgtgtagaagaatgcctgtttactcagagtttatattttccttcagttatattttaaatcaaaaggtctgggtaatgtatacttttgattaatatatactttttttaaaaaacaaaaaacaatgtaatggttaatagtagaaatgtgccacacttttcaagttttatataacatatgaaattcagttaaaagaatgtgtgtttcataatgacttttaactggtaaaaatattacttgcacgaagtacttgatgtatggttatcctgaaatttcggagtatttggtgtgttctttgtctaaaaatagtctgttttgtcagtccttcagaatattatttattctgaagattgtccctcttgcacttggcagtttattttcggggatacattgttgggggagaggggtttctgccactctttccagattgagtctgtgctgtttaaggaggactaccatcctgcaactctttttctaattggggcacagaggatgtcgctaaagaaaagttgaagagccctttcagcactttctcatctgtggagaagatggaatcttaaaatacatttggagttttatctgttttacaagtccattgatggcctaagttcctcctgttttctgctgtttgatctctaaggaactcctgttgctaaatatgaagagtatggaacattcatatagtctctgtgaagcatggggggagggaagacatttctttttcttataggctttatgctcaaatgtcatagtctcctttcaaagaattgtgttgcattttaaatgcacccagcttaagtagaagacattgaaggatgcattaattttcaggaactattttgaattatgaaaagattcccaattgaaaaaattattcaacaagtaaaagctaagaaatttcattgaaatcataaggcagtttaagcataaattgataaaaatagctgtgtactactaattaatagaaaatcattcaaccaagagaagagtcaagtgaatatcgtttgtttatttgctagtgagtttctttgtaacgttgattttattaaatgataatatttggttagtatgtcctatgttaataaaaatgaacaaaattaattttgctatgttcaggtgtcttgataaaataacaatgctccagtgttgttgcttacatttagcactaaattttaacacagggtcagtgagtccaggttttaacttcttcatgcctggatgggataaaatgtaattcattgttaaattaattcatatttgtatttattaatcactgtgacaacattaaccatttgttcttaccaggaagtggtcagattatcatctgagttacagttagactggctaagtttggtattagatcaaggggaatgtccagtaaacagagaggtaagcatgatggaaataatgaagtggggtacacaggaaaaacctgactagtgaggaggagcagctgagagatagggtcagtgaatgcggttcagcctgctacctctcctgtcttcatagaaccattgccttagaattattgtatgacacgttttttgttggttaagctgtaaggttttgttctttgtgaacatgggtattttgaggggagggtggagggagtagggaagtggtccttttacaagaattttgatgcataagtgtctattgtagggtttggatgatctagtaaagtgttttagaacccctttttatcccatgcaccattcagtaaacataaaaatcacaattctgctaatgtcatttggaacttcaaaataaatatcttgtctaaaaacaaaaaaaaaaaaaaaaaccncggggggggccccggwccccatttggccctatgggggg

SEQ ID NO: 473 - DNA, 2017 bp, Homo sapiens
  SITE (2015): n equals a,t,g, or c
  SITE (2017): n equals a,t,g, or c
aggtggttcatgtatccagtttatccagtacagttatttgtcaagcttagctttgatttcaaaggacacgcttaccttgtctggcataagaattaatgctcatgtctgcagtggttgggtaggtcctgcttaggagaattaaaaaattcctctttccgtttggttgaatgttgcagtcaggaaccccaactcacttggaatgtttttatatgtaatcatttcccttgaagcttatactttataagggaagaaagaattcaggtgatatgggaaaactgcttggcagaccttcatcttctgcctcaactgtaaaccacatgtaaatgcttaatggagactgttttcattcttgtgatatttaacattcagaaaattacttcagctttggaaatactcaggctgtttttattctgcaggtaagtgttttgacttaagtactaatattccagaaatttttgaaagcagtaaccttaatttcctatgtatttcattccacttttgcatataggtcaaatagcaatgtgtatgcacattctctttagttaaggcaccaattgttttggttggttttcctaagacatactttaaaaagatgttctataaatttcctagttaaattatggggattttggagtatgtacatgataaattataatacgtatatggttgaagttattttattttttactaatgaattattttaatattccttattgaataaatgctgtaacttgtttgctatggaacttattcttaaagttctagttaaaaataatttttccacatgcatgaaaatatgtattaatcagaggtggcttaattacattgaaattgcttttttgttgttgtttttttactgaaataactcatgtttgtgtagaagaatgcctgtttactcagagtttatattttccttcagttatattttaaatcaaaaggtctgggtaatgtatacttttgattaatatatactttttttaaaaaacaaaaaacaatgtaatggttaatagtagaaatgtgccacacttttcaagttttatataacatatgaaattcagttaaaagaatgtgtgtttcataatgacttttaactggtaaaaatattacttgcacgaagtacttgatgtatggttatcctgaaatttcggagtatttggtgtgttctttgtctaaaaatagtctgttttgtcagtccttcagaatattatttattctgaagattgtccctcttgcacttggcagtttattttcggggatacattgttgggggagaggggtttctgccactctttccagattgagtctgtgctgtttaaggaggactaccatcctgcaactctttttctaattggggcacagaggatgtcgctaaagaaaagttgaagagccctttcagcactttctcatctgtggagaagatggaatcttaaaatacatttggagttttatctgttttacaagtccattgatggcctaagttcctcctgttttctgctgtttgatctctaaggaactcctgttgctaaatatgaagagtatggaacattcatatagtctctgtgaagcatggggggagggaagacatttctttttcttataggctttatgctcaaatgtcatagtctcctttcaaagaattgtgttgcattttaaatgcacccagcttaagtagaagacattgaaggatgcattaattttcaggaactattttgaattatgaaaagattcccaattgaaaaaattattcaacaagtaaaagctaagaaatttcattgaaatcataaggcagtttaagcataaattgataaaaatagctgtgtactactaattaatagaaaatcattcaaccaagagaagagtcaagtgaatatcgtttgtttatttgctagtgagtttctttgtaacgttgattttattaaatgataatatttggttagtatgtcctatgttaataaaaatgaacaaaattaaaaaaaaaaaaaaaaactcgagggggggcccggaaaccaaagccncn

SEQ ID NO: 474 - DNA, 1414 bp, Homo sapiens
  SITE (1411): n equals a,t,g, or c
  SITE (1413): n equals a,t,g, or c
  SITE (1414): n equals a,t,g, or c
ttctgtctcaaaaaaaaaaaaaaaaaggtgtgcccaggcccctagccattgccatgtgcccagccagagagccaaattagagggctggcttccctatcacacagaataaatgctagtgctagccaatgatccctttgcttttaatgtatagaaaatactgttgttccttttgtcatttccagtgacatctgttttctaagcagctcttttctagggaggaaaccaaaggggctaggttaagaccctaatagaaatgttttttctaatctctggtgagtctggaagtgtcacattcacagtccacccttgggagtggcttggtggagctggggacaaggttttgtttactacatagtgcacatgataaatggccttaaactgtgattctttctggtaggataagttataataaactgaccctaaagaatgcaatggcttttaaactgcagttactgtgttcttaatgaagcaatacccaaagctctgttcttttggagcacttgaggggagcttgaatgaaaggtgcagataagagcagtaccttgatcttatgctttctgagtgtcctgccttgttgccatctgcatggatgagtgaatgcttctatgcacgaggagactcaagccaactcagagtctgctttttccaacgctcttcccaggtttcttttgcaaagcttggtcatttggcccaggtcttcctggaaagtggagtacatgtcactgactagggtggcgtggtgtctttacccttaacattaagtcttgttacctcagtgatgtgaagccaatggttggaattataaaaagcatccttgctggttcttcacaggacactggaacccaccctgtcaattcagctagcatgtccacacagtcttgatgatccctctctgtaacaggcagctaacattaagagaagggggaaagagaagaagagagcaatagcttatgggagagctgagatcttacttcgttgacccatatttttcccctgaccaagttacctgtaaactggaatttgcaaggggatgctgtgatgataacccctttctattgctgtaatgttcatataacctgggaaactgagagaaggggatgtgtaaataaaagcttaaacattttagtaatgtgttaaaatgtcactctctcttaccctgtttcccttttttgccagatgatgatttttttatttttattttgtactttactggatgactgtgaagcgatgagtattgggttggggtaggtgtgttgattttgagagtgcatgttaagaactgaaggggaactacttgagatgacttaagaagcatcccatgcaaatatcttgttttgccctaataaaatattcagaaagataaaaaaaaaaaaaaaaaaaaaaactcgagggggggcccggtamccaaacngnn

SEQ ID NO: 475 - DNA, 1412 bp, Homo sapiens
ttctgtctcaaaaaaaaaaaaaaaaaggtgtgcccaggcccctagccattgccatgtgcccagccagagagccaaattagagggctggcttccctatcacacagaataaatgctagtgctagccaatgatccctttgcttttaatgtatagaaaatactgttgttccttttgtcatttccagtgacatctgttttctaagcagctcttttctagggaggaaaccaaaggggctaggttaagaccctaatagaaatgttttttctaatctctggtgagtctggaagtgtcacattcacagtccacccttgggagtggcttggtggagctggggacaaggttttgtttactacatagtgcacatgataaatggccttaaactgtgattctttctggtaggataagttataataaactgaccctaaagaatgcaatggcttttaaactgcagttactgtgttcttaatgaagcaatacccaaagctctgttcttttggagcacttgaggggagcttgaatgaaaggtgcagataagagcagtaccttgatcttatgctttctgagtgtcctgccttgttgccatctgcatggatgagtgaatgcttctatgcacgaggagactcaagccaactcagagtctgctttttccaacgctcttcccaggtttcttttgcaaagcttggtcatttggcccaggtcttcctggaaagtggagtacatgtcactgactagggtggcgtggtgtctttacccttaacattaagtcttgttacctcagtgatgtgaagccaatggttggaattataaaaagcatccttgctggttcttcacaggacactggaacccaccctgtcaattcagctagcatgtccacacagtcttgatgatccctctctgtaacaggcagctaacattaagagaagggggaaagagaagaagagagcaatagcttatgggagagctgagatcttacttcgttgacccatatttttcccctgaccaagttacctgtaaactggaatttgcaaggggatgctgtgatgataacccctttctattgctgtaatgttcatataacctgggaaactgagagaaggggatgtgtaaataaaagcttaaacattttagtaatgtgttaaaatgtcactctctcttaccctgtttcccttttttgccagatgatgatttttttatttttattttgtactttactggatgactgtgaagcgatgagtattgggttggggtaggtgtgttgattttgagagtgcatgttaagaactgaaggggaactacttgagatgacttaagaagcatcccatgcaaatatcttgttttgccctaataaaatattcagaaagataaaaaaaaaaaaaaaaaaaaaaactcgagggggggcccggtamccaatkcg

SEQ ID NO: 476 - DNA, 884 bp, Homo sapiens
  SITE (77): n equals a,t,g, or c
  SITE (771): n equals a,t,g, or c
  SITE (796): n equals a,t,g, or c
aggggtttataggcacgagaccctgcacccaacctagagttgccttttttaagcaaagcagtttctagttaatgtancatcttggactttggggcgtcattcttaagcttgttgtgcccggtaaccatggtcctcttgctctgattaacccttccttcaatgggcttcttcacccagacaccaaggtatgagatggccctgccaagtgtcggcctctcctgttaaacaaaaacattctaaagccattgttcttgcttcatggacaagaggcagccagagagagtgccagggtgccctggtctgagctggcatccccatgtcttctgtgtccgagggcagcatggtttctcgtgcagtgctcagacacagcctgccctagtcctaccagctcacagcagcacctgctctccttggcagctatggccatgacaaccccagagaagcagcttcagggaccgagtcagattctgttttgtctacatgcctctgccgggtgccggtattgaggcacccagggagctgttactggcgtggaaataggtgatgctgctacctctgctgctgcactcacagccacacttgatacacgatgacaccttgcttgtttggaaacatctaaacatctagtagatgacttgcaggctgttggctaccagtttcctgtctgaggtgtatatgttaacttcgtgatcagtttgtatgtttgggactcttgtcctatgtaaagttaaggtgggccgggtgcagtggctcacgcctgtaatcctaacnctgggaggccgaggcgggtggatcncctgatggtgaaacctcatctctacttgaaaatacaaaaattagctgagtggtgaaaaaaaaaaaaaaaaaaaaaaaactcgaggggg

SEQ ID NO: 477 - DNA, 875 bp, Homo sapiens
ggaarggttgtaggacttaatcacgtttcagcttggctgtcgggctgtgagtcacggttgcactgcgattatgtaagcacgcaggaataggtggcatgacatatatgctgccagcagccacgggcctcgcccttccgagtcaccactactttttaagccttttttkgratacaagtttcttkgggttcatctttgraatgraaatgraagcatgattgcagaataggcagamcaggaattatccatcaatcagagagamcccagacctttaagagaagctggaattagaatatggaattcctgagccttgagctggcatagccgagccctggtttatgctcttcctgcctccctccttttttccctcctgcctgtgtgctccacttcctctcctgagactcccccaaggtagcatcactcccaccaggagccttaggcaggaaaagtaaggcccagagaagggactgtccctggggacgtgcactgagtgtgtgtgagggtgcggggcaggaataggagtgccaggagtctacctctggagcaatgcctcccacagtatttctgtaggggaaaggatagaaactcacttcttgggttcctccaatcaccatgcacatgtcagtccttcagctatcaatgcaaaggaaacccagaactgagatttgagctttctcaccatctccatggtcagatatctccactgccaaagggttcattccgcctctgggtttatctctttcttcatgcttcttcctggcagtgtcctgttgaagcttaccttcccatctgtgtttgcatccactccctaaaaactacaagacaaaaaaaaaaaaaaaaaactcgagggggggcccggtacccaattcgggctatag

SEQ ID NO: 478 - DNA, 753 bp, Homo sapiens
  SITE (706): n equals a,t,g, or c
  SITE (741): n equals a,t,g, or c
  SITE (746): n equals a,t,g, or c
gaattcggcacgagctcgtgccgaattcggcagacgataccaggtgctgcagaagggattccatgaggtgcgcaaaggccctacttccgctttcaccttggagacggcgactctctgcgtactgattggaacatccgcgaaatgatacgcctctctgcaatgctattggtcgaaatgcatgtcaatctcccagcgtctttatccgtgttccttgactctgggcaacttaaaagccctaatacttttactttcgccacacaaagaggttcttcttagtggagggagagcagatgtagggcatcctaccgagaatttccggaaccacgtgcgagatgatgccagtcatgaacgtctccgcgcttcctttcgctttggaaatatccttaagtagaaaagaaattttctgagctttgcctaaaactagaatctgtgttgaggtttttcaaaattaagtaacgccagagacatactgtgacgtgaggaaacgctcttaaatgaaattttaagatctatttgagaaacatgtactaaaaatgtactgacctcctattaatgccaggcgctatgctgaattctgggccttcacattgtccttccattattagaactgaagcccagattatttgaaacaaaaaataaacttcaataatttattaaaaaaaaaaaaaaaaaamctcgagggggggcccggtacccaattcgcccnaaagggaggcggattaaaattccctgggccggcgntttanaaaggcg

SEQ ID NO: 479 - DNA, 690 bp, Homo sapiens
  SITE (352): n equals a,t,g, or c
  SITE (407): n equals a,t,g, or c
  SITE (439): n equals a,t,g, or c
ggataattctacttcttcccttccagtctggagggctttatttctttttcttgcctaattgtgctggctacaacttccaatacaaaatgagtctctcttttttttctttgtcggtctagctaaaggtttgccaattttcttgatctgtttaaagagccagtttgactttcattgatggtctttatttttctgttgtctattttatttgtctcagcyctggtctttattacttcctttcttctgttagcattggatttagcttgctcttctcttttcaggtttcttgtggtataaaatcagatggttgacttgagctcatttttcttatgtggatgttcacagctatgaattntcctctgagtgctgcttttcctgcatccctgagctgtctcgtgggtttttttgtntcatttatctccacatagtcatttctgctttnccttgtgatttcttctctggcccattggttgttttaaaatatgctgtttaattctcacagatctctagatagtacagggaaaaaaccaccctgtctaaaattgtgctgcaacttttagtgtccaagctgaatgaagggagtccccacttgatcaatgcagtgtggttttgggtggcttgtctctgtcaaggagatcttcattacaatgatgaaaaacaaaaaaaaaaaaaaaaaaaaaaaaaaaactcgag

SEQ ID NO: 480 - DNA, 1512 bp, Homo sapiens
aaaaaatgcaaagaatttgtaggtatgattagtgcattataggtgttttcaaatttctcctatgataaattaaaaatgtaatgttgggcattaatttcctaaacccaatgctcagcaattttctcaaattgtttacagtttttccaagagacttcagaaccattccctggagtgaattatttccaatggtgaagagtaatggatggatggcatgagattctcaaaaaaatcttgctcctatttcagaagtgtcactccagccccttgaaggtccaggaaacctggctgagtagtgtggtctatggaggtgcatgggcttcagaatcaggccaacgttgatcctgagtcccagccagctgcttagtagctgtgggatagttacacaagacacatctacaagaaaagtcatgataaaattgattgcaaaaacagcaatttgaaaaawttcttattgtattcatgtccttggaaatggcttttatagtcgttcctatcaagagacagattctgtttcccaaaccttgaacttctcttgacttatctgcactggcacagggtgccagtttggggcccaggtttaaaggtcctaaatgcttctgttatctttttcagaattcttccatctctatgacaacaagcccattttagctttctggagaatagcatctgagaaaagccaaagtgcctcagtttacagacagctcactcacagaagcagagccacctaattcaccagcatctaaccactcacacctgaaggagccaaactgagcccagaagaatggcccggctgagcccagcctaaatttctaaccagctcaatcctgagctagtatgtttcgggattgttatgcagttataagttagtaatatatacacccattaaagacaggatctcaggacagattgatcacaaataacctgcaaatgcttgccaccctgtaagtattgattttcttttttcctttatttaaagttagatttgttgtaagatgrtattgasttayacagaagtkaggcaggagaatarggtytggagrcagggaacttaakgccaattcgtgctgacttcctacaagaaaaaacaccaaggtctgggagcagggaacctaaagccagttaacgtgaacttcctacatctaaaccaaaaggaaagacctcatctacacccgagtagcaaaggatcgaaggcgactgtcgctacaaccctcccccttgtaccagttctctgatagaaaaggacagtgccttggagtggccgtgggccaagcacaggccatgccttcatctgcatagggtaccaattcgcctcaacctttgattagccaaggaccaaatccttcattcagataaggggtagctgataggaacctcaaaaggagtacttaaaacccagaaaacattgtaaccgggtccttgggcggcttgctggggctcacacccaccctgtagagtgctttctcactttaataaaatcttgcttttgctaaaaaaaaaaaaaaaaaaactcga

SEQ ID NO: 481 - DNA, 2120 bp, Homo sapiens
tgtcccagaaaagacaattgtacagcaaaggaatggacttttcctgaagctaaatggaacaccacagccagagttttcagtcacatccgtcttggcatgggccatgttcttattatagtccagtgttttatttcttcaatggctaatatctataatgaaaagatactgaaggaagggaaccagctcactgaaggcatcttcatacagaacagcaaactctatttctttggcattctgtttaatgggctgactctgggccttcagaggagtaaccgtgatcagattaagaactgtggatttttttatggccacagtgcattttcagtagcccttatttttgtaactgcattccagggcctttcagtggctttcattctgaagttcctggataacatgttccatgtcttgatggcccaggttaccactgtcattatcacaacagtgtctgtcctggtctttgacttcaggccctccctggaatttttcttggaagccccatcagtccttctctctatatttatttataatgccagcaagcctcaagttccggaatacgcacctaggcaagaaaggatccgagatctaagtggcaatctttgggagcgttccagtggggatggagaagaactagaaagacttaccaaacccaagagtgatgagtcagatgaagatactttctaactggtacccacatagtttgcagctctcttgaaccttattttcacattttcagtgtttgtaatatttatcttttcactttgataaaccagaaatgtttctaaatcctaatattctttgcatatatctagctactccctaaatggttccatccaaggcttagagtacccaaaggctaagaaattctaaagaactgatacaggagtaacaatatgaagaattcattaatatctcagtacttgataaatcagaaagttatatgtgcagattattttccttggccttcaagcttccaaaaaacttgtaataatcatgttagctatagcttgtatatacacatagagatcaatttgccaaatattcacaatcatgtagttctagtttacatgccaaagtcttccctttttaacattataaaagctaggttgtctcttgaattttgaggccctagagatagtcattttgcaagtaaagagcaacgggaccctttctaaaaacgttggttgaaggacctaaatacctggccataccatagatttgggatgatgtagtctgtgctaaatattttgctgaagaagcagtttctcagacacaacatctcagaattttaatttttagaaattcatgggaaattggatttttgtaataatcttttgatgttttaaacattggttccctagtcaccatagttaccacttgtattttaagtcatttaaacaagccacggtggggcttttttctcctcagtttgaggagaaaaatcttgatgtcattactcctgaattattacattttggagaataagagggcattttattttattagttactaattcaagctgtgactattgtatatctttccaagagttgaaatgctggcttcagaatcataccagattgtcagtgaagctgatgcctaggaacttttaaagggatcctttcaaaaggatcacttagcaaacacatgttgacttttaactgatgtatgaatattaatactctaaaaatagaaagaccagtaatatataagtcactttacagtgctacttcacacttaaaagtgcatggtatttttcatggtattttgcatgcagccagttaactctcgtagatagagaagtcaggtgatagatgatattaaaaattagcaaacaaaagtgacttgctcagggtcatgcagctgggtgatgatagaagagtgggctttaactggcaggcctgtatgtttacagactaccatactgtaaatatgagctttatggtgtcattctcagaaacttatacatttctgctctcctttctcctaagtttcatgcagatgaatataaggtaatatactattatataattcatttgtgatatccacaataatatgactggcaagaattggtggaaatttgtaattaaaataattattaaacctaaaaaaaaaaaaaaaaaaaa

SEQ ID NO: 482 - DNA, 846 bp, Homo sapiens
  SITE (775): n equals a,t,g, or c
  SITE (807): n equals a,t,g, or c
  SITE (821): n equals a,t,g, or c
  SITE (835): n equals a,t,g, or c
aattcggcagagacttggtttcagggaaggggaaagaggtcaccaagggcagagtccaggccggagccaggggccccactgttgggatgctggctgcagtggggcgccccaagcccaggtcccctctgtcttctctttcgactttgcagctgtacttgttttgctcctctacccgcagagctgacatggacccaaatcctcgggccgccctggagcgccagcagctccgccttcgggagcggcaaaaattcttcgaggacattttacagccagagacagagtttgtctttcctctgtcccatctgcatctcgagtcgcagagaccccccataggtagtatctcatccatggaagtgaatgtggacacactggagcaagtagaacttattgaccttggggacccggatgcagcagatgtgttcttgccttgcgaagatcctccaccaaccccccagtcgtctggggtggacaaccatttggaggagctgagcctgccggtgcctacatcagacaggaccacatctaggacctcctcctcctcctcctccgactcctccaccaacctgcatagcccaaatccaagtgatgatggagcagatacgcccttggcacagtcggatgaagaggaggaaaggggtgatggaggggcagagcctggagcctgcagctagcagtgggcccctgctacagactgaccacgctggctattctccacatgagaccacaggsccagccagagctgtcgggagaagaccagactctttacttgcagtangcaccakaagtgggaaggatggtgggatgggnacctttctaagaantaacccttttctgntttactggtaa

SEQ ID NO: 483 - DNA, 652 bp, Homo sapiens
  SITE (1): n equals a,t,g, or c
naggtaccgyccggaattcccgggtcgacccacgcrtccggtcccgaggagggcgcgcccyctgccacctcggccgagaggactaatgggggtgcggagccgcgcctgggcttttctgacattcacttcaactctcgcaacacgttccaggtgagccgcggtcagagcgcccgcgatcacctgcccccggcggggccgccggtgcccttgcccgccgcggagcagggtcctgcgggggcttcggcccgggctcgacggagtggcggcttcgcggacttcttcaccagaaacctttttccaaaaaggacaaaggaactcaaatcagttgtccatagtgctcctggttggaaattatttggtaaagtccctcctagagagaatcttcagaaaacatccaaaatcattcagcaggaatatgaagcacgaacggggaggacctgtaaaccaccacctcagtcttcaagacgcaagaattttgaatttgagccgctttctaccactgccttgattcttgaggatcgaccatcaaatcttcctgccaaatctgtggaagaagctttacgtcaccgacaagaatacgatgagatggtggctgaggctaaaaaacgagaaattaaggaagcacataaaaaaaaaaaaaaagggcggccgc

SEQ ID NO: 484 - DNA, 2909 bp, Homo sapiens
aattcggcacaggggcagtctggcatgatctttttggaggtaagttgtgcctcactgaaaactaatccccagcccatctttgcctgctttctagccctgtctatcctgaagcgggctcgccgggagcgcccaggccgtgtagcctttgatgggatcaccgtcttctacttcccccgctgccagggcttcaccagtgtgcccagccgtggtggctgtactctgggtatggcccttcgccacagtgcttgccgtcgcttctctttggctgagtttgcgcagkagcaagcccgtgcacggcacgagaagctccgccagcgcttgaaagaggagaagttggagatgctgcagtggaagctttcggcagctggggtaccccaggcagaggcagggctgccacctgtggtggatgccattkatgacgcctctgtggaggargacttggcagtcgctgtggcargtggccggttggaagaagtgagcttcctacagccctacccagcccggcgmcgtcgagctctgctgarggcttcaggtgtgcgaaggatcgatcgggaggagawgcgggagctgcargcactgcgccaatcccgggaggattgtggctgtcactgcgataggatctgcgaccctgagacctgcagctgcakcctggcaggcatcaagtgccagatggaccacacagcattcccctgtggctgctgcagggagggctgtgagaaccccatgggccgtgtggaatttaatcaggcaagagttcagacccatttmatccacacactcacccgcctgcagttggaacaggaggctgagagctttagggagctggaggcccctgcccagggcagcccacccagccctggtgaggaggccctggtccctactttcccactggccaagccccccatgaacaatgagctgggagacaacagctgcagcagcgacatgactgattcttcyacagcatcttcatcagcatcgggcactagtgaggctcctgactgccccacccacccaggcctgcctggccctggcttccagcctggcgttgatgatgacagcctggcacgcatcttgagtttcagtgactctgacttcggtggggaggaggaggaagaggaggaagggagcgtggggaacctggacaacctcagctgcttccatccagctgacatctttggtactagtgaccctggtggcctggccagctggacccacagctattctggctgtagcttcacatcaggcrtcctggatgagaatgccaacctggatgccagctgcttcctaaatggtggccttgaagggtcaagggaaggcagccttcctggcacctcagtgccacccagcatggacgctggccggagtagctcagtggatctcagcttgtcttcttgtgactcctttgagttactccaggctctgccagattatagtctggggcctcactacacatcacagaaggtgtctgacagcctggacaacatcgaggcacctcacttccccctgcctggcctgtctccacctggggatgccagcagttgcttcctggagtccctcatgggcttctccgagccagccgccgaagccctagatccctttattgacagccagtttgaggacactgtcccagcatctctaatggagcctgtgccggtgtgaggaccaggatgtcttttcccagccccaagagacctgttgctgctttcttgtaattatggggctccccagagtctgcgtaacagtctcccactggctggctcacccacaggtgccatgtgcacactcctggttttcaaacaattctctggatttatttatttgttttaacttttctgtgctgaagagaggactagggggagggggcttcccctttcagctgcccggccccccacacccacagcttgctcttctatctccacaacgtgagcctggaagaggagaaaatgtggctcctctggagcttggcagaccacttttcggtctttgcgtgatgttccttagcccaaagacggtgagacagggctgaaatcaggtggcttctgccaccctgagccctagacccatgggtggctaaatccactggactgtgaagactataatttatttccataatttatttggagattgaggaggctttggttgcacttctttggctggtgggtaatgccaggggtggggtgggcacaggccctcaagagccccttttgccttgtagtcctacaccttgccctgcctgggctttggtgcagactaggtgtggatttgagctctgtgatctatgtctgctgcctggctcctagatggctctgcgggcaggtgctggccaaggacatcatctaggcagggggagagcctgggctgaacagctgtgaccaaaactcccttctgccccaccctgccccctccacttcctgccctctgttccatcttcccccttcccaaaggccacagcctttattccaggcccagggatgtaggagggggaaggaggaaacaggaagcccagagagggcaaagggcctacctcggggcgcgaaccatgccccagactattatctcagggctttctgggcactgcacttcagcgtggcccacctgcccatgccctgaggccagttggcgaggggtggctcctgagggtttttataccctttgtttgctaatgtttaattttgcatcataatttctacattgtccctgagtgtcagaactataatttattccatttctctctgtgtctgtgccaagaaacgcaggctctgggcctgccccttgcccaggaggccttgccagcctgtgtgcttgtgggaacaccttgtacctgagcttacaggtaccaataaagaggctttatttttaaaaaaaaaaaaaaaaamaamaaaaaaaaaaaaaaaaaaaagggcggccgc

SEQ ID NO: 485 - DNA, 2918 bp, Homo sapiens
  SITE (2910): n equals a,t,g, or c
aattcggcacaggggcagtctggcatgatctttttggaggtaagttgtgcctcactgaaaactaatccccagcccatctttgcctgctttctagccctgtctatcctgaagcgggctcgccgggagcgcccaggccgtgtagcctttgatgggatcaccgtcttctacttcccccgctgccagggcttcaccagtgtgcccagccgtggtggctgtactctgggtatggcccttcgccacagtgcttgccgtcgcttctctttggctgagtttgcgcagkagcaagcccgtgcacggcacgagaagctccgccagcgcttgaaagaggagaagttggagatgctgcagtggaagctttcggcagctggggtaccccaggcagaggcagggctgccacctgtggtggatgccattkatgacgcctctgtggaggargacttggcagtcgctgtggcargtggccggttggaagaagtgagcttcctacagccctacccagcccggcgmcgtcgagctctgctgarggcttcaggtgtgcgaaggatcgatcgggaggagawgcgggagctgcargcactgcgccaatcccgggaggattgtggctgtcactgcgataggatctgcgaccctgagacctgcagctgcakcctggcaggcatcaagtgccagatggaccacacagcattcccctgtggctgctgcagggagggctgtgagaaccccatgggccgtgtggaatttaatcaggcaagagttcagacccatttmatccacacactcacccgcctgcagttggaacaggaggctgagagctttagggagctggaggcccctgcccagggcagcccacccagccctggtgaggaggccctggtccctactttcccactggccaagccccccatgaacaatgagctgggagacaacagctgcagcagcgacatgactgattcttcyacagcatcttcatcagcatcgggcactagtgaggctcctgactgccccacccacccaggcctgcctggccctggcttccagcctggcgttgatgatgacagcctggcacgcatcttgagtttcagtgactctgacttcggtggggaggaggaggaagaggaggaagggagcgtggggaacctggacaacctcagctgcttccatccagctgacatctttggtactagtgaccctggtggcctggccagctggacccacagctattctggctgtagcttcacatcaggcrtcctggatgagaatgccaacctggatgccagctgcttcctaaatggtggccttgaagggtcaagggaaggcagccttcctggcacctcagtgccacccagcatggacgctggccggagtagctcagtggatctcagcttgtcttcttgtgactcctttgagttactccaggctctgccagattatagtctggggcctcactacacatcacagaaggtgtctgacagcctggacaacatcgaggcacctcacttccccctgcctggcctgtctccacctggggatgccagcagttgcttcctggagtccctcatgggcttctccgagccagccgccgaagccctagatccctttattgacagccagtttgaggacactgtcccagcatctctaatggagcctgtgccggtgtgaggaccaggatgtcttttcccagccccaagagacctgttgctgctttcttgtaattatggggctccccagagtctgcgtaacagtctcccactggctggctcacccacaggtgccatgtgcacactcctggttttcaaacaattctctggatttatttatttgttttaacttttctgtgctgaagagaggactagggggagggggcttcccctttcagctgcccggccccccacacccacagcttgctcttctatctccacaacgtgagcctggaagaggagaaaatgtggctcctctggagcttggcagaccacttttcggtctttgcgtgatgttccttagcccaaagacggtgagacagggctgaaatcaggtggcttctgccaccctgagccctagacccatgggtggctaaatccactggactgtgaagactataatttatttccataatttatttggagattgaggaggctttggttgcacttctttggctggtgggtaatgccaggggtggggtgggcacaggccctcaagagccccttttgccttgtagtcctacaccttgccctgcctgggctttggtgcagactaggtgtggatttgagctctgtgatctatgtctgctgcctggctcctagatggctctgcgggcaggtgctggccaaggacatcatctaggcagggggagagcctgggctgaacagctgtgaccaaaactcccttctgccccaccctgccccctccacttcctgccctctgttccatcttcccccttcccaaaggccacagcctttattccaggcccagggatgtaggagggggaaggaggaaacaggaagcccagagagggcaaagggcctacctcggggcgcgaaccatgccccagactattatctcagggctttctgggcactgcacttcagcgtggcccacctgcccatgccctgaggccagttggcgaggggtggctcctgagggtttttataccctttgtttgctaatgtttaattttgcatcataatttctacattgtccctgagtgtcagaactataatttattccatttctctctgtgtctgtgccaagaaacgcaggctctgggcctgccccttgcccaggaggccttgccagcctgtgtgcttgtgggaacaccttgtacctgagcttacaggtaccaataaagaggctttatttttaaaaaaaaaaaaaaaaacttcgggggggggggcccggtaacccaatttgggncctttaag

SEQ ID NO: 486 - DNA, 2918 bp, Homo sapiens
  SITE (2910): n equals a,t,g, or c
aattcggcacaggggcagtctggcatgatctttttggaggtaagttgtgcctcactgaaaactaatccccagcccatctttgcctgctttctagccctgtctatcctgaagcgggctcgccgggagcgcccaggccgtgtagcctttgatgggatcaccgtcttctacttcccccgctgccagggcttcaccagtgtgcccagccgtggtggctgtactctgggtatggcccttcgccacagtgcttgccgtcgcttctctttggctgagtttgcgcaggagcaagcccgtgcacggcacgagaagctccgccagcgcttgaaagaggagaagttggagatgctgcagtggaagctttcggcagctggggtaccccaggcagaggcagggctgccacctgtggtggatgccattkatgacgcctctgtggaggargacttggcagtcgctgtggcargtggccggttggaagaagtgagcttcctacagccctacccagcccggcgmcgtcgagctctgctgarggcttcaggtgtgcgaaggatcgatcgggaggagawgcgggagctgcargcactgcgccaatcccgggaggattgtggctgtcactgcgataggatctgcgaccctgagacctgcagctgcakcctggcaggcatcaagtgccagatggaccacacagcattcccctgtggctgctgcagggagggctgtgagaaccccatgggccgtgtggaatttaatcaggcaagagttcagacccatttmatccacacactcacccgcctgcagttggaacaggaggctgagagctttagggagctggaggcccctgcccagggcagcccacccagccctggtgaggaggccctggtccctactttcccactggccaagccccccatgaacaatgagctgggagacaacagctgcagcagcgacatgactgattcttcyacagcatcttcatcagcatcgggcactagtgaggctcctgactgccccacccacccaggcctgcctggccctggcttccagcctggcgttgatgatgacagcctggcacgcatcttgagtttcagtgactctgacttcggtggggaggaggaggaagaggaggaagggagcgtggggaacctggacaacctcagctgcttccatccagctgacatctttggtactagtgaccctggtggcctggccagctggacccacagctattctggctgtagcttcacatcaggcrtcctggatgagaatgccaacctggatgccagctgcttcctaaatggtggccttgaagggtcaagggaaggcagccttcctggcacctcagtgccacccagcatggacgctggccggagtagctcagtggatctcagcttgtcttcttgtgactcctttgagttactccaggctctgccagattatagtctggggcctcactacacatcacagaaggtgtctgacagcctggacaacatcgaggcacctcacttccccctgcctggcctgtctccacctggggatgccagcagttgcttcctggagtccctcatgggcttctccgagccagccgccgaagccctagatccctttattgacagccagtttgaggacactgtcccagcatctctaatggagcctgtgccggtgtgaggaccaggatgtcttttcccagccccaagagacctgttgctgctttcttgtaattatggggctccccagagtctgcgtaacagtctcccactggctggctcacccacaggtgccatgtgcacactcctggttttcaaacaattctctggatttatttatttgttttaacttttctgtgctgaagagaggactagggggagggggcttcccctttcagctgcccggccccccacacccacagcttgctcttctatctccacaacgtgagcctggaagaggagaaaatgtggctcctctggagcttggcagaccacttttcggtctttgcgtgatgttccttagcccaaagacggtgagacagggctgaaatcaggtggcttctgccaccctgagccctagacccatgggtggctaaatccactggactgtgaagactataatttatttccataatttatttggagattgaggaggctttggttgcacttctttggctggtgggtaatgccaggggtggggtgggcacaggccctcaagagccccttttgccttgtagtcctacaccttgccctgcctgggctttggtgcagactaggtgtggatttgagctctgtgatctatgtctgctgcctggctcctagatggctctgcgggcaggtgctggccaaggacatcatctaggcagggggagagcctgggctgaacagctgtgaccaaaactcccttctgccccaccctgccccctccacttcctgccctctgttccatcttcccccttcccaaaggccacagcctttattccaggcccagggatgtaggagggggaaggaggaaacaggaagcccagagagggcaaagggcctacctcggggcgcgaaccatgccccagactattatctcagggctttctgggcactgcacttcagcgtggcccacctgcccatgccctgaggccagttggcgaggggtggctcctgagggtttttataccctttgtttgctaatgtttaattttgcatcataatttctacattgtccctgagtgtcagaactataatttattccatttctctctgtgtctgtgccaagaaacgcaggctctgggcctgccccttgcccaggaggccttgccagcctgtgtgcttgtgggaacaccttgtacctgagcttacaggtaccaataaagaggctttatttttaaaaaaaaaaaaaaaaacttcgggggggggggcccggtaacccaatttgggncctttaag

SEQ ID NO: 487 - DNA, 1891 bp, Homo sapiens
ccacgcgtccggtcctgggagactctgagcatcccctttgtgaggaaggtggtgtgctacgtgaacatgaacctcatggatgcctccgtgcctcccctggcccttgggctgctggagagtgtgaccttgagcagcccagccctgggccagctggtcaagagcgaggtgcccctggataggctgctggtgcacctacaggtgatgaaccagcagctgcaaaccaaggccatggccctgctgacagccttgctgcagggggccagccctgtggaacgcaagcacatgcttgactatctttggcagaggaaccttcgccagttcatctataagaacatcatccacagtgcagcaccaatgggcgacgagatggctcatcacctgtacgtactgcaggctctcatgctggggctgctggagccgcgcatgcggacgcccctggacccctacagccaggagcagcgggagcagctgcaggtcctacgccaggctgccttcgaggtggagggggagtcctcgggtgccgggctaagtgctgaccgtcgccgttccctctgtgcccgagagttccgcaaactgggcttttctaacagcaacccagcacaggacctggagcgcgtgccccccggtctgctggccctggacaacatgttgtacttctccagaaacgcgcccagcgcgtacagccggtttgtgttggagaacagcagccgcgaggacaagcacgagtgcccctttgcccggggcagcatccagctgacggtgctgctgtgtgagctgctccgtgttggggagccctgctctgagacagcccaggacttctcacccatgttcttcggccaagaccagagcttccacgagctcttctgtgtgggcatccagctgttgaataagacctggaaggagatgcgggctacacaggaggacttcgacaaggtcatgcaggtggtgcgggagcagctggcccgcactctggccctgaagcccacttccctggagctcttccgaaccaaggtgaatgcgctcacttatggggaggtgctgcggctgcggcagactgaacggctgcaccaggagggcacactggctccccctatactggagctgcgggagaagctgaagccagagctcatgggcctgatccgccagcagcgcttgctccgcctctgtgaggggacgctcttccgcaagatcagcagccggcggcgccaggataagctgtggttctgctgcctgtcccccaaccacaagctgctgcagtacggagacatggaggagggcgccagcccgcctaccctggagagtctgcccgagcaactccctgtggccgacatgagggcactcctgacaggcaaggactgcccccatgtccgggagaagggctccgggaagcagaacaaggacctctatgagttggccttctcaatcagctatgaccgtggggaggaggaagcgtacctcaacttcattgccccctccaagcgggagttctacctgtggacagatgggctcagtgccttgctgggcagtcccatgggcagcgagcagacacggctggacctggagcagctgctgaccatggagaccaagctgcgtctgctggagctggagaacgtgcccatccccgagcggccaccccctgtgcccccaccccccaccaacttcaacttctgctatgactgcagcatcgctgaaccttgacagtgtggctggccatgggccacagctgcggcactgcagcagccatgaagggcagtgggtagaggagtgcaggcaccctgaccagcagagattgctgcagaaataaagtctgcttggctcttgggaaaaaaaaaaaaaaaaaaaaaaaaaaaaaaaaaaaaaaaaaaaaaaaaaaaaaaaaaaaaaaaaaaaa

SEQ ID NO: 488 - DNA, 1487 bp, Homo sapiens
  SITE (432): n equals a,t,g, or c
  SITE (1024): n equals a,t,g, or c
gaattcccagtcgctacttcctaaaatcaattttgaagtttaatcgatatcatttgaggtccctgcggcttttaatttgttattcatagcagccaattctttctcctgctgcttcttgagatacctttgcgccgtagcagtcacaatttgaatgaagaagttaatgagcattaatagtactacagtgttccaaactgaagctaatgagagatcccactttttcacctgataagaatgaaggttttacgaaaaatcattgacaaaaataaggtattgtaaaaatgaacctcacaaggttgcctcgtcaaatgaagatacctttatattggaggtcacatgagatggggttgtcatatacttgtcttttatggcatgcaatttggcaacaaggttggggaggatagatcaaaacccaggtatgaagctgagaanccaaatcaactcattctctatccagttaagtagttgattattgcagactgatatgatgaaaattgtctgcaaaagataattaatataatcaagaaaacttccttaatcttacagatcaaggtttaatttgccaagactccaactcctatagcttcataatgatgtttttgtgatcagagaaattaattgcatttatattgcgtttagaaggattaaacaaacttttgaaatgtagtaaaaaggttaaaaaaaagcaaagcactcaatatacccagcaaaataaatcaagaaataactccaaacgacatcagtagtccaaatcgtgtggaaaaagaccttcacaaacctgtatgtgagttttaataattgcttttccaaccatcgtagccagaaaaaacttccagaaaggaattccaaattgtccacacataatgccagcaaggtcgaatagaggatttggcacctacaaaagttattcgagttaatccacaaaatacttgccgataaactgttagacacacatattagtgaaccagggctctataaattattccatgtgtcgatatatagacgcgagaatatattttcttgnatcactctgccaaattgacacattgacaggtattttatgaagcagcattgktagataacaggtgtgtgtgagaaaaaatcaaatttagtgcaaaaaagaagaatcaaactaaccgaagcaagcaccaacacagtaaagaagttcaaatactgtgcatgtgaaaggaaccagcgcttaaattgattcagacgggtagctatccacccatcatcttctgaagaagaagcgctcaattcttccactgtatctagttttccacctgataagcttgctgcatgaaattattaattatgtgtttaattacctttggcaacttaaaaaacagaattaaaaaactttgaccaaattcaagattgatagtcttagcatgtatggtttatgacctttcaaagattatacaaaccgcgaatcgtagaaaacctatatcagatcaactacaagttacaaaagcaagcagctcgag

SEQ ID NO: 489 - DNA, 262 bp, Homo sapiens
cggcacgagaaaagatcaagtccaagccattaaatgtaacatctaacagtctccatgacctggcctctttaatttgtaaccttccaccctttactttgaacttttctgccaagagcactgagcttcctttatgtttttgcccatagttgggagccccctatctggaatatgctcttacccctttgctggtctagctcctactctatttttattttctgggcaacagagcgagactcttgtctcgaaaaaaaaaaaaaaaaaa

SEQ ID NO: 490 - DNA, 773 bp, Homo sapiens
  SITE (38): n equals a,t,g, or c
  SITE (769): n equals a,t,g, or c
accaaaatcaaggggattttccaaaatgtcgtaacaantccgccccattgacgcaaatgggcggtaggcgtgtacggtgggaggtctatataagcagagctggtttagtgaaccgtcagatccgctagccgcaattactgtgagttagctcactcattaggcaccccaggctttacactttatacttccggctcgtatattgtgtggaattgtgagcggataacaatttcacacaggaaacagctatgaccttgattacgccaagctcgaaattaaccctcactaaagggaacaaaagctggagtcgcgcgcctgcaggtcgacactagtggatccaaagaattcggcacgagcgttaccggatctgcgtggggctggtggtggttggtgtcctgctcatcatcctgattgtgctgctggtcgtctttctccctcagagcagtgacagcagtagtgccccacggacccaggatgcaggcattgcctcagggcctgggaactgacccagctggtcctgaaggagaagccaaatggctgcactggccgattctggtctccagaggaccttggtgtttgctctcccttgacccaccccagtgagtgccaaagggcagccccaacatgtgcacccctgcatttcctgtcatgccacagactggcccttgagggcagcctgctgtactggccatgctggccagccccacctggagctcagtaaaaactgctgtttgattaaaaaaaaaaaaaaaaaactggagggggggcccgnaacc

SEQ ID NO: 491 - DNA, 218 bp, Homo sapiens
ggcacgaggatagaggtattttctgtggccctgggagctgtctgtctttcccctacccccaaggatgccaggaagacgtccaccattagccatgtggcaacctttacttctatgcctcacaagtgcctttcagagagccccaattctgctttcccacaaaataaacctaatgccatcaggcaaaaaaaaaaaaaaaaaaaaaaaaaaaaaaaaaaaaa

SEQ ID NO: 492 - DNA, 488 bp, Homo sapiens
ggcacgagcaggtctaatcatgcctctccctgcctaaaaccttcccctggctcctattctggaagagtgtcgtagggcagcatgtaaaacgccacacatgccccgcccagcctgccttttaatcttcatctctggccacactcttctagcactgcctgtctgcccagctcccgcccatgcccccccgccccgcgcagcttctgtcctgtaaccatcttccccacaatatgccatcattccccctgttaatagctctgcccttgcccactgtcctatcctggaatgactttccctcatccttctttcttctaatgacctcctattcatccctcaaaacccagtgcaaaggatcccatgatctcctgcctccaggcaaaatgactcaccttcctcctcaggccaccccagctcccactattggcgatcccatcatcctttgctaacacaccacctcctggatcacctgggcaacaaaagcggaaatccgt

SEQ ID NO: 493 - DNA, 1269 bp, Homo sapiens
gaggattctttaacaaaatagggacaatgacaaggttactggtagcccttttattctcctcatttttaaagctgagagaggtggaatccattagtaagataaaaaacaaaatgtcaaaaagacaagacttaagaacaggttgggcatgctccaacatgacagcatgcacactttggggaaaaatttattggtctagccaggtgtgagcctccattccttaatgtgccagctggactccccttaccaaatcttggccccaagagtttgtttccagtcagtgggctttgctatactgacagacatgttccatacaggagcttctgatgggcaaacagtgggtgatacagtcacactcactaccttctacctcctgtcttctctcaatgccagtgacctaccaccatgctgcccagaaccttcccatcaggcaaataaaaacctgcatatttgtcacacactttgggtctatatagaccattaacaaagtgatgaaaacatctggtgctaaatgacagcatgatgtggcatctcttgcctggcccagccaaggatcagagagtgaacaggacttggtaaatagcttctctcatctttctctctctgccctaagcaagtaaaactaaaaaccacaacaataaataaactcataacaccctcagtttcttcctcttttttttttttaccatctgatagatgtcaggacagatgttgtccacaacacacttgccaacaaccatttcagtgcttcctgacatatgtttaagaaagatggctgctgtataacggattttacttaaatgccgataagcaaccttccataacattgttcagcgaagataaaagataatgccacttctgtccattctggtgcccatgtcaacatgatcactaattcaaatttttagggatcaaaaaagtcaacaccaagcttatataaatagcttttaccatctggttgctcaccttgactgtaggaagcagagtcctatcaattcttttctactaggaaaaaggtgtctcatcatagagaggaaggggaggaataataaaagaaaaacaatttgtaatagcatgctatcccttttttcctgttgacaggaaatcaagttctcagcttgttaattaagttaaaaatacagaagtttcctggttattctctcatcagtttcagagtgttcatgactttgaagtaggtctcaccggtgagtgcttaaacattgaactaatgagattttactgttttgaacagctggtcaagtttggaggccc

SEQ ID NO: 494 - DNA, 858 bp, Homo sapiens
  SITE (848): n equals a,t,g, or c
  SITE (849): n equals a,t,g, or c
gggacaatttactttgttttgctaagtttacatgtccaatcggtgacagggccagaaagagaatctaggcctgcttcccagcaacagtgtagatgtgaaggtaaggtgaaccacctgtgtcccttgaattgcatgcttatccattgtctataaggcagctttatctggcagtgaaattatgtgtcatttctggtgggtggctgggcctgccatagcaaattaccacaaacagaaatgtattctcttatataattctggaggcaaagtctgaaatcaaagcatcagcagggccatgctctctctgaaggctttagagaagtatccttccttgcttcttcctagtttctggtggttgccagcaatccttggcattcctggacttgcagatgcatcactgcaatctctgccttagtatccacatgaaatttttcctgtgtgtctgtctgtgtccagattgtctycttttwatgggggccattcattggattagggycttccctaatgcagtatggcctcaccttaatgtgattacatctacaaaaatactgtttcaggccgggcctggtggctgaagcctgtaatccmagcgctttgggaggctgagacgggcggatcacgagatcaagagatcgagaccatcctggtcaacatggtgaaaccccgtctctagtaaacatacaaaaatcagctgggcgtggtggcacatgcctgtagtctcagctacttgggaggctgaggcatgagaatcgcttgaacccgggggcagaggttgcagtgagccgagatcgcaccattgctctctagcctggcgacagagcaagactgcgtctcaaaaaaaaaaaaaaaannaaaaactcg

SEQ ID NO: 495 - DNA, 1107 bp, Homo sapiens
gcacggagtcacccacatacaaagcagcttgggacagcacctcggctgccccaccagagaactctctcaggattaccatgacccaagagcgccaagccctggcatggctcttctctacacttaaggcagaacggccttgaataaggtctctctcagcctcggtttacccacgaagacacctaagccccaggcttgctgagcagatgacgcgatggaaagcatgtgaacctgaaggagccgcgccgtaccggcttctcggaggccctggcctgtgctgcctctcagtcctggaggtcgcccgcccactcctacctccatggggttgacggtgatggtcagggcagagtcgtcccagtccatctcgttctccttcccggtgtcctgatcccgcatggtccgccgatgtgcggcccggatccgaaatacccccaggataatcatgaacaccaggaagctgacgcacaccacgatcacaactgtcgcagtgctggggacgactgtggragaatgagggggcgggatgcgaggtcactcggcccagaaggccactgtgcccttgacctcctcggctgtgcctggtcaaaacgggctggacagcacgcttcagctgaacccacaggccaggaggaaataccaggaaaagctcgccatgggcctccaacctggctcggccacgtcctgctccatagctgcgggtgacatcatctgccctcttcgagggctttagtttccttgtgtgtgatggggaataattgggacagggaaagaccggcggtcatgctgagcaggaggctgtgcccacggtggggtgggggcagggcggacggcatggagcatctccgcttggtctccctccccatgtcctacctgcgaacgggtgggggttggccaggttgtggcctgacaggtcaacaaaggagcggtgttccgggtgcacgaactgtggctgggcagccatgtggttggcgtgttccatggggttggccgtgtggattacattcacctatagcagagaaagagaggatcgctggagacaggcatcctgagcctgtccaagaggtgacagtggagtcccgctgctggcatgaccagtgccactcagagtgg

SEQ ID NO: 496 - DNA, 1114 bp, Homo sapiens
  SITE (850): n equals a,t,g, or c
  SITE (866): n equals a,t,g, or c
  SITE (1076): n equals a,t,g, or c
gcggacgcgtgggcggacgcgtgggcggacgcgtggctaaacatcatcctgatttgatcttttgccgcaagcaggctggtgttgccatcggaagactgtgtgaaaaatgtgatggcaagtgtgtgatttgtgactcctatgtgcgtccctgcactctggtgcgcatatgtgatgagtgtaactatggatcttaccaggggcgctgtgtgatctgtggaggacctggggtctctgatgcctattattgtaaggagtgcaccatccaggagaaggacagagatggctgcccaaagattgtcaatctggggagctctaagacagacctcttctatgaacgcaaaaaatacggcttcaagaagaggtgattggtgggtggccccttcctccccccaacatcagtctgctgcagctgccagaaaacatgcctactactaccagcagaaagggagcagagcccagagcatcaccaggagtgcctgctagtgtactggcagcttgccaccccctcctctcccttcacccagacacgtggtagggatggaaaaggattcttcacagagcactctggcacaccatatcggagaaaacttgatagattagttaatggtttttcttgaattcgagaagcatagatctgttctccatattggtatgttctccctcaaccaagatcttctaaaaagaaataatattttagtcttctgcttgaggaactgactgtgaagcgacgcccagtgaaaaacatgttcttgcagcagctctggtggcagctgtccttgaggaacctttggtgtgtggtgggaagctatcagaacaagaaatgtaggcatttcccgtttttttggggggngrgggtgggggggcangctctgccctcttgaaaggcatttacttgtttaacacttgtccagctacagtggggtacagtagctggctattcacaggcatcatcatagcccactagtctcatattattttccttttgagaaattggaaactctttctgttgctattatattaataaagttggtgtttattttctggtaaaaaaaaaaaaaaaaaaaaaaaactcgggngtacttctagaagcggccgagggcccatcggttttcca

SEQ ID NO: 497 - DNA, 371 bp, Homo sapiens
attcggcacgagtgaaaatggaaaagcaaaaaaaagttaatctgtattgtgttgaagtacagtttctgcctccttccaaaccaggttcaaatgcgtttcccccctgtttgttaatgtcctgctcatcccacagcttggggtcatcttagaccttttactctccctttctcccaactcctgtcaggtgtagcccccatcccctcctagttgtattgcttggttgtctccatggcatgctttcttgcagtggtgatgtgggtcttcctgcctgtggggtcttgcccactctagttcatgtagtttaagctgcaagaaaaagatcttcctaagtgacagtctgagcctgtcacttaaaaaaaaaaaaaaaaaaa

SEQ ID NO: 498 - DNA, 360 bp, Homo sapiens
  SITE (24): n equals a,t,g, or c
  SITE (25): n equals a,t,g, or c
  SITE (29): n equals a,t,g, or c
gacagtcgacatggtgggtccaannattnggcagagtgccatyccagcaattgggcactgggatcatttgcaaggtcttcagggaagtttgcctttgcacagtttaggaaagattctgttaattaggtgaatggtataattgatacgacaagaggattgtttaacttaagggaagcaatttattatgcatgcatgagaagcttctaggtatttactgaccaattgcatgcccattacatatcctttttgtattttagagataataatcatcttatattgtttacctcctagcccagtttttggcacacttgaaagtactacaaattgtctttatgaaaaaaaaaaaaaaaaaaactcgag

SEQ ID NO: 499 - DNA, 505 bp, Homo sapiens
cggcacgagctgacacatgggacaaatgtgtcggagctggccactctctacagggagaaacgcagctcggtttctccccagcttccagaacacccggcagcgcctgctctgccatcttcattacctcaacctccagaaactggggtgcccagggcccaaacccaacgtgtctttcctctcattgatcgcattcagtctcatggctttaaacacaatatcacaccaaatttacctcccgcctgggcctctgccctgtccttgggcctcctgcattttactgcccacctgcacctatgtttggacataaaagaaactcccagcgccacctgtaatgcggcactccgtagatcctccaagtcggctctgtctactgcaactctgcccatctcagctgagggcagtgccactgtccagtggtcaaaagccctggagtgcccctgactcctgtctttctctcacaccctgtgtctgactcactggcaaattatattggctctacctcgag

SEQ ID NO: 500 - DNA, 499 bp, Homo sapiens
  SITE (15): n equals a,t,g, or c
  SITE (19): n equals a,t,g, or c
  SITE (22): n equals a,t,g, or c
  SITE (488): n equals a,t,g, or c
  SITE (498): n equals a,t,g, or c
aaaaaaaaaaaattngtgncantaactaaaccacctctctctgttctcttctggggggtggggtgggtgtgtgtgtgggggtgggtagggatggggaacccaagccccagtaggagttggggctgagatcaggaggaggggaaggatatgagttttccatccatctccctggagaaggccatgacgggctctccaagccctggggagatctggcgagggactagccaagtcagggtgacctcttgacctgactagtttttctaacccacatgaacaccagggtgcctctctcttcctctagcccagggtagggggacctgagtgagagagagagtgagacagacagcaagattgagacacgcgggcccccactggtctctgagtgggaaaggcaagtgcgagagataaaggcctccaaaaaaaaaaawaaaaacttsgrgrgtayttctaagagcgggccgcgagcccatcgattttccacccgggtngggttaccana

SEQ ID NO: 501 - DNA, 1545 bp, Homo sapiens
  SITE (556): n equals a,t,g, or c
  SITE (593): n equals a,t,g, or c
ggcacgagctaactccagcacctacatggtatgcctagtttatggcaggtgttcaataattaaaatgattatcttgaatacaataaaagtcctaatcctttttgtttttgtttttatgatgtgtgataatattcttggtattactcaaaaagagttgtacttttttaaaaaattcactttttaagttagtataaagaatattcagtccagtttagaaatgaacagtagaaaagtaagaaagagctagcacttgtggaatggggtcactctgttctggggtgccccagagaatcccatggaatgcctttcccaacctccttaatggaggtagcttctgttataaccccattttacaataagaaaactaagcaacagaagttgaacagtgtatccaaggtcagaatgaataattgagccagtatttgaatccaaactgtctggccccagagctagtgttccatatatcttttatttttctgtaactttacgcttggagaatagttgtaagaatagtaacgtgatgtctcatatgttctttcctccatttcactatatntatattttggctcacttgctttatcactctatgggtnttttgttgttgttgttgttgttagttttttccttgaaccatgtgaaaacaagttacagacatggtgctgcttataaacatttcagtgtgtgtataagaccaaagatatcatcttatgtgatcagagtataattatcaaaatcaggaaatctaatactgaagaaatgctcttatccgcagtctaaattatttcataccagtaatgttccgtatcgctgttgcttcctgatctttcccttccccagcctccagtccagaattcatcctgcatcacacagtgcatccagttgtcaggcccatcttggcgagacggggtctccctctgtcgccaggctggagttcagaagttctgcttctgtggtccaggctctacctcctggctccagcggtcctcccaactcaacctcctcaataactggccccacgggtacgtgactccacacctggctaatttttgaatttttttgtagagacagggtcttgctatgttacacaggctggcaggcccatcttcttaactgagagaccagtttatgctttcctctagggccatcatatacaaagtccagaaatttagtgtgtgtaaaggtagcttttaagtcaagcaataagatgaaattgtcagtaaatgttactgggatcggccgggcgcggtggcttatgcctgtaatcacaacactttgggaggccagtgtgcgcagatcacctgaggtcaggaatttgagaccagcctagccaacatggtgaaaccctgactctactaaaaaaaaaaaaatacaaaaattagctgggcttggtagcaggcgcctgtaatcccagctacgcgggaggctgaagcaggagaatcgcttgaacccggaggcagaggttgcagtgagccaagatcgtgccattgcactccagcttgggggagaagagcgagactttgtctcaaaaaaaaaaaaaaaaaaaaa

SEQ ID NO: 502 - DNA, 552 bp, Homo sapiens
ggcacgagatattacatggagtccggacccaggaagaagctgtttgaataccagcaggctcagctggaggctgagatcgaaaacctctcatggaaagtggagcgtgcagacagctatgacagaggggacttggagaaccagatgcatatagcggagcagcggaggagaaccctgctgaaagatttccatgacacctaagttgggatgtggatgtgccggggtgaggaagatgtggctgcaaggtctcccggctgccatactgcatgctgcaggctctgcctttcatgaccccaggcaacagccagggccccactcctgagagacactggcaacacctcttagttgatttctgttttcttctcttttcactttttgtttctaccagggtagaggccatgttgaactggcctcttttcaggacttttatttccccctggatggttgttgggagggagggaaagtgttttctgaatggctattaatagtattagatcattacaacttatgtaactttcaaaggttgtacaattatacaaaaaaaaaaaaaaaaaa

SEQ ID NO: 503 - DNA, 600 bp, Homo sapiens
  SITE (588): n equals a,t,g, or c
  SITE (599): n equals a,t,g, or c
ttaaatagagaatatagcccaaaccttaatgtgctggaagataattacttagaatatccgacagctttgcaggaggcctgtattactttaaaaggtataaatgataggttgtgtaataccctacattcttatcttgaactatattatcgggggctctttctgttttaccttaatgtgcccaggggactcctgcttagcttaataggacacccaaaaggaggaaatgcagagttaatggtttaacaaattctaaactttattagcaatttgcatttaggagaagggcagatggtgtgtggtcgaaagctcatgggactgtgaattggtagactttttttaaaatccagcttttgcccctaacttttggtctcggagacctctgtyctttaataactagaactgtaggccgggcgtggcggctcatgcctgtraatcccagcactttggtagggtgaggcgggcggatcacaaggtcaggagttcgagaccagcctggcccagcatagtggaaccctgtctctagtaaaattacaaaawttagccaggcatggtgacgtgcgcctgtagtctcagctacttgttaagggntgggggcaggng

SEQ ID NO: 504 - DNA, 522 bp, Homo sapiens
ggcacagtggagatcccaggccagagtaaggtacctgaactcttcctcgcgcctccctgcacatgtgctcccccgcctctgtagaactgatgatggtcatcgtgtgtgtcattgtgcaaaaagcattgtccgtgccatcccctctccaagggacacttcttacccctatccttcaaggccttctgcaaatgccattctctccaggaaagcctttccgcattctcagttggatttgatcttctcttcgaactcccaggcccttttgttccctttgaggacagattgcattctgctttttaatctagctgtgttttatccccctcagtggatggaaggtgtcttcagggccagaactgtgggttcctcttccttctcatcagtagcatcgccatagctcctgatttctgaacacccactaaacaccaggcactgggctaggtactttgtcacaaaatttcactgaaacctcccttacagcaactcccaagaggtgggtggtgccgtaaaaaaaaaaaaaaaaaa

SEQ ID NO: 505 - DNA, 573 bp, Homo sapiens
catcctgggggctgtgtgtcatgctcacctgacccaggtgtgtgtcccggtgtgaaatcgaggaggggactggaagcccttccctgccttgaaacatgaaagctgattttctgagcagcagatacggtcagtggcaaagctgcatctgaagggcggcctgggaaagggccctgtgctggccccgggtccgccccacagatccacacagcaccacctccagaagggctgggcccggggtcctgcaggcggcaccttttggtagagtttgtttccctggaaaatggggaaaatgtttcaagccaggtgaggggggaagttaacactgaaatatgtattgtttttaaaaatcaaatgcacacgcatggaagctgcttgtccatgcactggttttgtcactggcgtcctggaatccgaccgtgttggggtgcaggcgctgtcagactccggctgatcctggctcgagcacacacatctaagggccaggctggttccgcatggtgatctccgtcttgtatgtctgaatgttggcctaaaataaagattactgttgtaaaataaaaaaaaaaaaaaaaa

SEQ ID NO: 506 - DNA, 597 bp, Homo sapiens
  SITE (7): n equals a,t,g, or c
  SITE (15): n equals a,t,g, or c
  SITE (39): n equals a,t,g, or c
tggcccnttgctggntgaggggcacaccattgccagggntcagccttcgcacccaggccaggcagaagctgtgctctgaagctaggacagctggctgagaagtgggttcaggcgaagggtgaagccatgtgtagcagttcctgccagtgcagatctggagaggagctggcccggaaggcgtggttgtgaaagcgcccttcttatgttaggaggccttggcaaaattggatttcttcaaaaatacatgtaaaggtctgttgttgaattgtactctgcccctggaagcagatacagatggctgcctgctgctcggctttgcttttgcttttcccaccgtgttttcatctttgttcacttgaggctttccccagctggtgtgtgcaggacagttcatggtaatgttgccctctgaggccccgtacaccagaagggaggccctggaaaattttgtgcttccaacgtggccttcaattcttgcttttttgcccctcrgaagcatggggcttttgagcacacttaaaaaaaaaaaaaaaaacggcacgagagtacttctagagcggccgcgggcccatcgattttccacccgggtggggtacc

SEQ ID NO: 507 - DNA, 594 bp, Homo sapiens
  SITE (7): n equals a,t,g, or c
  SITE (15): n equals a,t,g, or c
tggcccnttgctggntgaggggcacaccattgccagggtcagcctcgcacccaggccaggcagaagctgtgctctgaagctaggacagctggctgagaagtgggttcaggcgaagggtgaagccatgtgtagcagttcctgccagtgcagatctggagaggagctggcccggaaggcgtggttgtgaaagcgcccttcttatgttaggaggccttggcaaaattggatttcttcaaaaatacatgtaaaggtctgttgttgaattgtactctgcccctggaagcagatacagatggctgcctgctgctcggctttgcttttgcttttcccaccgtgttttcatctttgttcacttgaggctttccccagctggtgtgtgcaggacagttcatggtaatgttgccctctgaggccccgtacaccagaagggaggccctggaaaattttgtgcttccaacgtggccttcaattcttgcttttttgcccctcrgaagcatggggcttttgagcacacttaaaaaaaaaaaaaaaaacggcacgaggtacttytagagcggccgcgggcccatcgattttccacccgggtggggtacc

SEQ ID NO: 508 - DNA, 1333 bp, Homo sapiens
gcttttttccaaagaaaaaccactgtggtcatttttatttttttaattaccgaagaaaatttctgcatacccaaccatgaacaaagaaacacaaagttatggtgagatggaatgccagccattcacttaagtcgttcttaggtcctcaggtgtttaagatccttgtcctggcaaaatggcaaatgactacatatcatggatctctgggatcaccccacagtattttgaatggtgactgtggtatccaagaatgccaagggtgttaattaaacatctgatctgttgctacactctgtccacctcttgttatacgagatgactctgaggcctcccattttactataaaactgtttattatcagcttccttgcaccccaagttccaagttctgcctgccatactggatggcctcccggcacccacactcatgggcttccctcccaggacatgccccaccccagtgggcgtgtcacgtgccaggtgtccacacctcccagtgcatcttgtttcctcaatactagacccagttggctagaaggactgtcattaccaatagcacatttagcactgaaggtactgactcatggaaattgtttcaaatacctctgcttgctctccagggaaacagatcaagagaaaatctttgaggtatgtttggatcatcaaaccatctcatatgagccatgctaaggtctaactaatccagcaagattataattgaccacatgatagccatcaaattaggcttgagttcaagcgtatgatccagtggtacttctatgtgctctacagttcattggactccctgtgtaatcactgtgtagagtacctcaaacccattttatagaagctggagtggcacgtgtttattgttttaggtgattacagatttttataatcttttaggatgtatttttgacttattcagttctgagtccttggtcaggagtacgtggtcccgttttactagttttcctatggtaaaatgcaatgtacctatttttttcattccatgaatattttaatgtttaaacaatccactctacactaagcacataatgagcgttcagcctctgacttggcactgaggttatgggcatgtgtggcacaggatagtggggagggcttgagcatgaaacttcgtgaaataagtgtgatctttgggcaaggcaggtggctcacacctgtaatcccagcactttgggaggccaaagccgtcacttgagaccaggaatttgagaccagcctggccaacatggtgaaatctgtctctactaaaaatacaaaagttagctgggtgtggtggcgcacatctgtaatcccagctactcgag

SEQ ID NO: 509 - DNA, 391 bp, Homo sapiens
ggcacgagttagaggctttttttgctaaagctgagcttacatgccgtaaaactcagttccaaagtatacagttcagtggttttttaatagcgatagggttcataaaccagtgtttctcagccagaggtgattttgccccccaaggggtattatgcattgtcaggagaccagaaagggttgtcacaactcgggggtgccactagcatctagtgggtggaggccaagggtgctgcccaaatcctgcagcgtacgagatggctccatgacacagaatgacctggctgcggtgttgctgaggtggaggcgtcctggtctaggctggtgctccaggctgcttacagcctgctgcctcccaacccttcccgcaagctgaaaaaaaaaaaaaaaaaaa

SEQ ID NO: 510 - DNA, 182 bp, Homo sapiens
ggcacgaggtaagtctaactattctgactgtatttattagctttacttttgttgatgacaaatccaatctcagattgatatgtgtgctttttaggtataatcatttgcatactgaacatcaaatgtattcaggtattagccatctctttgaagattgtaaagagaaaaaaaaaaaaaaaaaa

SEQ ID NO: 511 - DNA, 587 bp, Homo sapiens
ggcacgaggtggcacgaggaagcagtggaataatcctccatggcacaagggagcggtggaataatcctctgtggcacgcgggggggggtgtggaataatcctccgtggcacgagggggtggtggaataatcctccgtggcacggggggtggaataatcctccgtggcatgagggggcggtggaataatcctccgtggcacgagggggcagtggtataatcctctgtggcacgaggggtcggcggtataatcctccgtggcacgaggatggtcaccgcattcgtcactcttagctgcagtgcgtgtgacagtcgccagggctgctgtttgaggaatgggagttgcctgcgtctgctctgccccaggtggtttgtagggtggtttttactccttgccaaagcccacacagccccgcaaggcaaacagtgttcaactcttttcatggctgaaaaactgggacatcagagaggttaagacactggccagggccacctggcagggaagcttccgggccttgcctgcaccaggactgtccgatggggacgtcatctgcctcccagacggtatcttaaaaaaaaaaaaaaaaaa

SEQ ID NO: 512 - DNA, 1630 bp, Homo sapiens
actagtggatccaaagaattcggcacgagtggggaggcctcaggaaacttataatttgtgcctgcttccccttcaccttctgtcatgattgtaagtttctaaagcctccccagcccttccttacagccaatagaactgtaagtaagtcaaacttcctttctttcagtctcagatagttcttcatagcaatgcaagaacagactaatacagtatcttcataagtgaagcatgtttcttgtaggcaacagattattcggtcttgtttcttttcatccattcagtcactgtgtgtcttttgactgaatacttgagtccatttaaatccaacggaatttgagaagtggttgcctactgggaatgtggattgactgtaatgggactgatataaggtgatgtaaaaattatcccttttgataatgattttggctacaaagggctgtatatttagttagacttatcaactaatgaaaatcaaatttatgattttactatttgcaagtattgcctagatcaaaaaattaaataaattatgcaattttgtttgactccttgaggttctatataaagcatttttttcttgctaatattcctgttgggtcaaataatttttaaagttactttttatcaacctagaagtaaatagtctcataaatatttatttcattattattgcttttattatttgtaaaatgtcaataatgaatgtgatagtttacaaataaagtttacacatctaagactttacaattcaaatataagagatactgacactaagaaatgccatgttgctaatgtgagcaaacataagattagtatacatctgttttattgcttctgtgtcttttgtatttctccctatatttttttgtattatatttggaaaagacattacaggaactcctatttaaagagctttataaaaaagttcacagatgacttaagatatcacatgctcctgaaacctgggggctttcttcgtgggtagctattcaaagtctatttcagtacataaatgaaatatggattcaagttgaggaagtctttgtattaaatacactaaaagatagataggaaatgcattgtaacatttggtcttgtatttcttcagaaagtctatgtgtgtttatctgtatatttatctacgttttaatgtatacatgtatatatatttagatatatgtgtgtctcacacacatatacatatacttatatacagtctgacactgtattcatgggttccacatctgtagattcaaccaactttgtattgaaaatatttggaaaaagggcagagcaagatggtggaatagaagcatacattgtttctctcccctactggaacaccaaatcttaattatctgcacacagaaaagcaccatcacaagaaccaaaaatcaggtaaacaatcacagtacctatttttaactgcatttctctgaatgaggaattgaggagagcaggagagacagtctggatggtgatgccacccctcccccatccccccgcagtgacacggagagacaatctgggcattttggggagggagggtgcagtgactgaaggactttatattgaactcagtcctgccctgtcacagctgaaaataaagccatactgatctcggctgtca

SEQ ID NO: 513 - DNA, 2139 bp, Homo sapiens
ctcgagttttttttttttttttttttttttttttttttttttttggttcaggagtatatgtgcaggtttgttatataggtagactcgtgtcatgggggtttgttgtacagattatttcatcacccaggtactaagcctagtacccaatacttattttttctgctccactcccttttcccatcctccaccctcaagtagtcctcagtcagacctgaattctgattccagcttggccacgcttagccacaggcaagcccctgaacctctctgtgctttagtttctttgcttataaacacctaagccatgcggctgttgtgaggactatttgagttgtacttatctcgcccagcacagagcatgtcctcaacagacagtagcttcggggctggaaaacatgtctaacgtgtaaaggcaattcagcagtcttgttcatgcatttttgtatgcaagtttctaatctgtgttacctctgtgggcatatacatcatggggatttgtagcttcattttataagaagctaatattggtcatgcttacctactattcttgggtgtttgccagagstgctttggagtatatttgaaatggccatctcytgcagtattttccatgcctacagattctgagttttcaccttgtccttccgtttgctgtcagagcattattttagcttctaactttgcagtttctaatcatatctacgtttttccaccacaaggaaagaatgttgagaatgagagtgaaggacagagataacaagtaaggctatacctgcttagctgctggatttccttccctcttattttgatgtggcactgtttgatttccctgtttgcaaattgcgtcttgcttcccattttgccaaattttgatcattttcttctttcagaaaggaaaaaaaaaacacaaacaaccaaattttattttccatatagtttaattgaattgatggctgctgtcacaaaataaaataaaaacctcacaaacaagaaggctgcaaatcctaggattaggctacttctgaagttttaaaaattcttcaaggcatttatttgcaaattctacccatttgcatattttataagcataatacaaaaatgtattatttatcaggtggtctaggcatgcttgtggaaaatgaatggttgcaaattcaaccttcattttaaaatcctcattgtaaatccatccctctaacttgcaggaaaactgggtttttcaaccctagttttttctgatctacttaaaatactctagactccacactgtgagcaacttttattgagtatgtgtctgtaatttgaagagaatggctgccaatacataaaatcacaaaatacagaataatttacaatgtcaaaatcacctgatctcattggctccattttatctggtcatcccactgacatccatgccaaagatattcttgcaagktttcgggcagaagtatgatctcacacttaggcaatttcagttgtcaatgacgcaatacttgggagtttcatgccttgatatcttgtctaacctttatgtacagtcaagagaagaaatctgatttgagctgttgctggttcctgttgagtttagactccatgggccagaaaatacmatacccccagatctgagacaattgatgagtgaataatcattacagtagaaaacaaaattaaatgagcatgccattctttggctttttgccattaaatgagcatgccattgtttggcttgtattttatgattcagtatccattttaaatatccatttttaagtatccattttaagtgagactttttaagtgaaatattttaaagtatccatattaagtaagtatgataactatattttaatatgattgctctctttggtgaaatgtaactaataggcagaaaatgctgcaagtggaggaggatttgctaaagcatctattaaggcttctttttgtaaggtagttttcttcaggcacccagaagacacttttgtccctgtagagccacatgatgttttctggactataggaagcaagacactggtacaatgacaaagtgctggtcctctctcctggctcccttccgcttgcctgtcatatcacatatctgaccactgatttgtatcctgtggacacagcctgtactatggc

SEQ ID NO: 514 - DNA, 819 bp, Homo sapiens
ggcacgagaaagtatgctagtagtcattgtgttcttcactatcacacactcagagtaaaaaaatacgtttcacttaatcctaaatgaagaagtaaaaattactagttttctaagtctttattccttaaggacacatcttaattgcttgtgtgacaaaatgggaggtatgcctaaagcacttctgcatactgaagtatggtggtcgtcccaaaatgaaaacatttgtgtgtgcttttgacttgtgagcttgtttctgtttctggacctaccctgggcaggtttccacagttgagaatcttagcgtattgctgttacctcaaatttccacacactaccagtttgtcttttgaaatgttatttttataagatgtcaaccctggtatggttcacttttgttatatgttggcacctctgtgggttacggaaagctttgccctccaaagcaaccagttggtttttaggaaagggaaatattgatctttgtggataagtagagtcttgttaaaagctattaaaaggctctctttggaaaaaaatcagaaaaatcaaaagaactgtgaaaaggatgataataatggaaaagaggcctttgtagccttgtgaatgtaatacgtatagtcaccacagatttttcagggaggccagtcacggtggttcaagcgtgtaatcccggcactttgggaggctgaggcgggaggattgatagaaccaaggagtttgagaccagcctgggcaacatagtgagaccccatctctagcaaaaaaaatgtttttcagggaatgctgaaatgtctccttctcaaaaaaaaaaaaaaaaaa

SEQ ID NO: 515 - DNA, 174 bp, Homo sapiens
attcggcacgagaaactcttgacaagaacagcaagacctctgtgaaaatatgaaaatgacttttatgtatggcagattaacattttttctctccttaccaactctttacttatgctatttttatttaccaaataaaattccatgaaataattctgcaaaaaaaaaaaaaaaaaa

SEQ ID NO: 516 - DNA, 622 bp, Homo sapiens
cacgagatctaggagccttgttgaactgagtaattaagggcaattaaacttttctgcttgctctctgcaaaatatgctaatgatctggtctgctggaaggtggacatatgcagtgctgtttcactgctgtcagacgctgctgccctggaagktccccctggagaaggtgtggcatcaccaggatggtcaggtgggcagtgggttgagcgtgcagcctcgtacccagcctcctgtgtcctggctggctgttccaggacttgcaccttttcagcagttatctagacctggccgcagtggcctgagttgcagtgattcgtattcactcattctttgatgttctagatccaccattcattcgttgcgttatttttctgggatgatgaagctaccagggttttgtgcgtgttgtttcagcatatgacacgtggcaccagctgtacactgcccttctggttagtgttgttcttggtcaagggctccaggctgtcttccatgctatcttcatgagtgggtggcagcacgtgcccaacgctgcccactgggagaagcattgatactgtggccactcactgcagagagggttttttttggcamagcaaaaaaaaaaaaaaaaaaactcgag

SEQ ID NO: 517 - DNA, 1993 bp, Homo sapiens
  SITE (365): n equals a,t,g, or c
ctgcaggtcgacactagtggatccaaagaattcggcacagcgttgaccgcgcgggccgaggcatagagcgtgtcgatcgtgaagctcgatttgccactgccgctgaccccggtgatgcaggtgaaggtgccgagcggcaggctggccgtcacgcccttcagattgttggcggtggcgttgtggacggtcagtttcttgccattgcccttgcgccgggtggtcggcaccgcgacctcccgcctgcccgacagataatcggcggtgatgctgttggggttggcgagtacttcctcgaacgtgccctgcgcgacgatcgcgccgccatggacgccggcacccggacccatgtcgatgacataatcggncggtgcggatcgcatcctcgtcgtgctcgaccaccagcacggtgttgccgaggtcgcgcaggcggcgcacgttttcagcagcatgtcattgtcgcgctggtkcaagccgatgctgggctcgtcragcacgtagagcacgcccgrcarcccgctgccgatctggctggccaggcggatgcgctgcgattccccgcccgacagcgtgycgctggtgcgatcgaggttgagataatcgagcccgacattgttgaggaagccgaggcgttcgaggatttccttgaggatgcgctcggcaatggcgcgttgctggtcggtgagatcggcggggaccgattcgaaccaggcgagcgcatcgaccaccgacaggcgcgtgacgctggaaatgtcgcgcatgccgatcttgaccgcgagcgcctcgggcttgaggcgcgcgccgccgcacacttcgcacgcggcgctgctttgatatttgctcagttcctcgcgcatccacgcgctttcggtcgagagcatgcggcggttgaggttgccgatcacgccctcgaacggcttcttcacgtcatacgacttcttgccgtcgatgaaggtcaagcgtcaccggcttgccgccggtgccgtgcaggatgatgaagtttcacctcgcccggcagatcctcccacggcgtatccaggctgaagccgaattcgcgcgccaggctgccgagcacttgcatgtaataggggcttggggggttggacttcgcccagggcacgaccgcgcccttcttgatgctgarcgcgtggttggggacgacgaggtcctcgtcgaacagcagcttttcgcccaggccgtcgcacgccgggcacgcgccttgcggggcgttgaaggagaagaggcgcggttcgatctcggcgatggtgaagcccgagacggggcaggcgaatttctcgctgaacacgatgcggttggcggggatgccggtgttcttcatgccgcctttagccctctccccttcagggragagggttgggagaggggyagtatcggaggacagcgcttgcgactgcccctctccccgaccctctcccccaagggggagcgggagagccagcgcggccaccgtcgtgtccaccaaatccacataagccagcccctcggccagcttcagcgccgcctcgaagcwmtccgccaggcgcgtcgccatgtcggggccgacgaccaagcggtcgaccaccacttcgatgtcgtgcttcagtttcttgtcgagcgcgggggcctcgtcgatctcgtaaatctcgccatcgatgcgcacgcgcgtaaagcccgctttctgccattcgagcagttccttgcgatactcgcccttgcgcccgcgcacgaccggcgcgagcagatacagccgcgtgccctcgggcagcgccatcacgcggtcgaccatctggctgacggtctgcgccgcaatcggcaggccggtggcgggcgaataggggatgccgacgcgcgcccagagcaagcgcatgtaatcgtaaatctcggtgacggtcgccacggtcgagcgcgggttgcggctggtggtcttctgctcgatgctgatcgccggggacaggccctcgatatggtcgacatcgggcttttgcatcagctcgag

SEQ ID NO: 518 - DNA, 1094 bp, Homo sapiens
ggcacagcaaaaacaaaaataagttagaaaaaaaaccagaagaaacttgtccttagcgttcctaagacttaggagagctaagccggggagggcaggagtagatggacaagaccataccaaggtcagctgttcccctcgccgagaaggcagcagctgaactttccgcttacgctgcccagagctgccaggtgtagactgagaattcgagttttgtttcttccttggggttgtatctgcagctaaagaaagaaatcaagactcgtttgcttccttccctcttccagaaatggatggttgtgtctacccacttcgcatttcacactgagttttcaatgatggtatctctgaaaagattcaatcttctatggtttggttgcttggatggtgtttgtaagattaaggcgcgcacacaaaccgcttactgtgcagtaattactgggatcacccacaggtgactcaaactgagcttacctctatccaatcgttagcccccatctgtagcctttctccctcatcagactataaacttctgaaggagaggaaatctctctctttgtatctaacatgccttagacatagcaatgctcaagaccttttttcaataggtattaatctctacatcctccacaaatacctccaccacmaacagcagcccctcatcctggctcagcaacctacccttttctccctgggactccttgtctgctgccaatggagttgaagaactggaatgatgacacagctcttcttctctgttgggaaaaaaggaacaatttagtctagaaagacttcttggctgaagtattaaataatttctcacaccctcctaactaccaagtggccaacatctaaaacaaccatcatttaagatctcagtatgccaggataaaaaaagtcaacaggaaattccaacagaatgaagggaggctgttcacagaggccatgaagacagtttttgtcttaaaacaagcacaaacaataatcttcaaaccttacttacaacctaccaagtccctgggagttctagacacagatgtgatccctgagggagtggcattccagccaactgcaagcacctaggggatcagctcgag

SEQ ID NO: 519 - DNA, 2439 bp, Homo sapiens
  SITE (429): n equals a,t,g, or c
  SITE (448): n equals a,t,g, or c
gccagaactcacgttgaaatgtgattcccaatgttggcggtggggcctggtgggaggtattgaatcacgggagcagatccctcatgaatggtttaacgccatccctttggtggggagtaagttctcgctcagttagttcacatgaaatctggttgtttaaaagagtctgggaccccccctttctcttgctcttgctcctgctctccccatgatgtgacatgcctgctctccctttgcgttctgccatgaatggaagctttctgaggccctcaccagaagtcgagcagatgttggcattatgcttcctgtacagcctgcagaacggtgtagccagttaaaccccctttctttataaattacccagcctcaagtattcctttatagcaatgcagggatggcctaatatagtaccttagtaccttgttctcnagatagcaatgagaaagcnttgaggttgtggttaagagcacaaactctgaacaagacaactgaagttttgatcccagctctgccacttwctagttgtatgaccttggacaaggtacttggcctctctgttcttcagtttcttcgtctgtgcaatgaggataacaatagtacctacttcacagggttgatgtgacctctaggctgtggacatctgatgtgttacatcaagtagaatccactctcactattcttgttgttccaggtcactgccatccctgccacccctgccaccccatgcacctgagaagtacctactccagtgttcagagaggcctcccagctggcagaagaagtgtgaactaggatcccagtactctgccctccagttctcatcttggtcattttctatcaagctgctgccctgatatgcgaggtcactgtcacttctgcagggctctctactatgctgatggccccctaacttccaggactcatggctccatcaggtggttttaaatcttgggatctgtcctctgaactccccagccccctatcctgcacatcacacaagtggtcagtgtccgtgcagccctatcattggcccctgcacccagaaacctgggcagctggagtccagttcagagtctctctttggccaccaagtctgcccaaccccatccaaacccaagaggaatcttagcgccctctctgtagatgaaaaagtagaagtttcttccctagtggaagaccatggaggggatgggtccttctttgcagaaaccaagctttctgcctacattgtcttgccctccggcccttcttccgcccccacccctcagccctcatccctgcagagtcgtaaaacacaggagtctttacttgactttgactcaagtactcagaggtcatcccaagggcctggggttcaggacctgcttatctatgcacagtcattttctacctcttttctccacttattcaacaaacaaactaccattctcattcagacctcccagcatttacccatgccatttcctccaccaggaaggtccttcctcctcttccctggcaaatcttacacatcagccaacactcagttacaatgtaattgtgataattagatgktccttggggctcccaccattggtcacagactgacgcartgagtggtgcctatagctggcttctcagttgtattgggaaggcagcatggatgggggttggagatgagatatgacttatctccagtgtctgacccagcatctggctcatagcagttctcagttatatgagtggatggatggatggatggatggatggatggattaatacaggtggataaaatggttacatggctaggaggtgartaggcaggtgcttggtggatgtatgggaagatgagtagatgacagaggagaacatcagtagacaatggctaggggcatgtgcgaaggttggatgacttttttcactgatctccctatcctgtctgtttccagtgtccactcttctgacccttctgacagacacatcttctctggcccggacacacagacctgcctttgttttatgaacacatacctatactgcagctctggagcagagagagctgaactaattgggtgagaggtggatggatggacccgtccaataaggagggactgaagaaccagagtcctggagttcctggaagagccaccgtcctccaatggggacataagctggggaagggagtctctctccccttggctgtcttttgcccttatgtgttggagttcctggaggtcccacacactctgctgcactgccttaaattctatcctttgcaatgaggccttgccttttccaggaagccccagctgaaagcagagttcttacttctgggagtcactgatgccttcatatgattagcttgtaagcctgctgaaagaatcatggaaaggtctctggttgtcaagagaaaggatagctttaagaacacacgaccaccaaatggtggggtccctcgag

SEQ ID NO: 520 - DNA, 859 bp, Homo sapiens
  SITE (64): n equals a,t,g, or c
  SITE (86): n equals a,t,g, or c
  SITE (88): n equals a,t,g, or c
  SITE (91): n equals a,t,g, or c
  SITE (104): n equals a,t,g, or c
  SITE (108): n equals a,t,g, or c
  SITE (122): n equals a,t,g, or c
gcaattactgtaagttagctcactcattaggccaccccaggcttttccactttatacttccggnttggtatattgtgtgaaattgnancgnatacaatttcacncagnaaccagctatgacnttgattacgccaagctcgaaattaaccctcactaaagggaccaaaagctgaagctcgcgcgcctgcaggtcgacactagtggatccaaagaattcggcacgagtaagagtgttactgagattttcagtgatttgggaaaacttgatggatttaaagcagacatggtgaatatgggatccgcgtggccttttttatatggatatttttcactgaaaatggttttaatgtttattcatatttattcatgatacttggggttccattggaatcggtgcaggggcataaaccttatgttaagtggatggggaaatcggtgtctttggcattgtggcacgacccatgagggttcctgtcaagtttcaatgtgagactggcctcctcttgaggtgcgacgggaacttcgggattcctttccagacaaagcagaggaatcgaccctcatctcgagatgaggaggggcaaaggggctcagattgaggtgtgccaggaaaatcggtgttccgcttgagtggggatgggtatgtcggggaacttcttgagtttcataaagggtgttgagtaccgttccgagtttcaagagggaatgtgggacttctcttgagatgctgcagtgggaaagggcctcatcttgcgtttaggggagaatcccttggttttcctcgagagtacttctagagcggccgcgggcccatcgattttccacccgggtggggtaccaggtaaaggtactttaccag

SEQ ID NO: 521 - DNA, 2295 bp, Homo sapiens
  SITE (646): n equals a,t,g, or c
ggcacgagcccctgcctggaagagtgactgctcttctgcatgctagggtgggagaccttgtggaagtcagtttatctttagagtttcagtttccttatctgtagaagggggtaagaatgcccccagggttgacccttcaggttcatgggatgataagaaaggaaaatggtggatgagaaaggtttctgaggctctgctgtgctcctggccctcttgcttgcttctgccctacctaaggcacagacaagttctctgtgtaggaaaaggattcttgttttccacatgtggcatcttccagagtatcctggaatgtctacatgcccgattagaatccagcattagaatgaagtcagactctcagcctcttctttgggaaacccctgcccatctggtcattggtgctgtgcaacaggaaagactcggggtgctggttgcattgctgcagcaggagagactcggggttctggttgcattgctgcagcaggagagactcagggttcttgttgcattgctgcagtaggagagacttggggttctcgttgcattgctgcagcaggagagactcggggttctcgttgcattgctgcagcaggagagactcagggtactgcttgcattgctgcatctctcaaaagctttgttttgntgttggttagatttggcactgtgtagtcatggccatgtggcttcaggttctcacaggacacagggacatgtgactgatgaggtttcaagagaggaggatcggatgagtgggggattgcagcttccctcctcccgacacctgggaccctccactcacagagagaatgagcttctccagcgtttggaggagagaggagaagatgggctcccctgcaagtccatagaagcctccgtggctttctggattaatgcagccacacactcactccttgcacagcctctgcccagtgtccagttttacatatgctttggaaataagaacaactgtcaataacaccatgacctaaagaaagaaacaagtaagcgctgaaaagcactggggaaagccccctggggctcaaaggagtggaagcccgtgccttatcctctgagccccagctatgacagtgacctcctgtaatgcacaaaaagccctggacttccttctcaggcctgggtctaaccgtaggacttagaaactagtgatcagagggttcacaggcaggcagaggtggaatcctacccacccagggggcatcccctgctcggtcctgcagagactcagctcccagcctgcggcatggcagggaggaaaggcagtgggtggaggtaagtttcacagaagaggcacagagatggcagaagggcctcttagctagagtaggagtaagcaagagggccaggggcgcaccaggaactgtgttcttccgttcagctctcattcccaaaggagcagaaaactctgcagcttagacagaagtctgacctcccaaaagggagcagagcccagccctgaggagccgcctccagctggcgggaagcctgtcgggcatcctgtgaagatgaaggcctgctgcacatcgcccggacctttcaggccatcccggagtgggcagggcttcccacacctgcaggaaccagagcgagactggagacgagctccccgccatgccccatggctcattctagaccaggattgattgacctctgccggtttaaaagggcattttttttttaagcctcaaagtcaaaactcaagtatgagcccgtaaaaaagtaataataataataagcactatctatggaaagcaatcctgtcctaaagattttagggcagaggtagctctgaaaatagatctctgcagtaaacagacaatacttttatagaaagtgtctgcttgttggtgtcacagagatggactgcatggccgtgacccaggagccaggaacccaaggtgaggcaggacctggaacgaaggcagacatccaagggttttctgaatgaaatagaagatggatacggagacaccaaagatgtaaaagtagagtttagttgtgtattgggagctgcaaataacataaatataactgcagaaaatcaaaacagtgataaggagactaatcttaaaaccaagagataattcacagaaaaaaaaaaaaaaaaagcaaggaaatggaacaaaacagataaagagaagttggtagatctggaggacagaggatgaatatctaactgaagagtcgtggatgctcctgagggggaacctcaatggctccagcagaaggaagaatcacattagagtgaaaaccatagtgttggaaagaaagtta

SEQ ID NO: 522 - DNA, 1055 bp, Homo sapiens
ggggtgaggagggtggagaagaattttattgagcggtgaacagctttcaggagcggaggaggtagtggttccccacccctgaagtctggtggtttctctcccagtgtggctggktgggggcttttatgggctcagaacaggggcatgcatgctgaatggtttgtgggcatgcaaagaaaggctaaagcaaaggcaccactcaaagatgggcatggcagtgtagaaaatcaattcggaaagggtaggtagatgtaaaataggtgaagagtggggatcaatcagaggaaagcctaccaaatgggaagatgggttctcagtccggtccatggatttgacctgtagtgtggctttcaggctttgagttgtctttggcttagaggtggggtttcactggagacccgcccctgtgaggcatttgtctgcctcctgccgctatcagtgtgggcgaagtttctctagaaaccacagggataatgcagtgtccacagctggtaatcaggttaccaccatgaggcctacgacagggagaaggaagggggaggagttgcccaaacctggagaaggaaaggacttactttcaattgagagtccaagactgtccacagacactctcagggtgggagctgggagaatgaatgccctgacctgaccctcccttcgtctgaccttctgcaggcctccccattgattaatagcactgggagccagagagtgagggagcctgttgatgtggttcttacagagccaaaaagtcagagcaggctgggcacagtggctcatgcctgtaatcccagcactttgagaggccaaggtgacttgaggttaggagtttgagactagcctggccaacatgatgaaaccccgtctctactaagaaatacaaaaattagccaggtgtggtaatcccagctgcttgggaggctgaggcaggggaatcatttgaacccgggcggtggaggttgcagtgagccaggattgcaccactgcactcctgcctgtgcgaagagtgtgactctgtctcaaaaaaaaaaaaaaaaaaaaaaaaaaaactcgag

SEQ ID NO: 523 - DNA, 1179 bp, Homo sapiens
aagctagaccacacgcgcctgcaggtcgacactagtggatccaaagaattcggcacgagcagagatcgggcttggtgttttggggggtcctgggtaggtgtgggaggcctcgtttcgggggccacggggctcctgtggcgtgaractccatcacagtracctcctgtgcccaatagctccgtaagggcagggtttgtggaaggaaggagtgagtgaccgggaatggggtcttgggctccagggacagccatggcgagggctcttctgtgtgggtgcaggtccggaagctggggctgtggttggtgggggagcctgggtggggctgcttcccctgcagaagggctcttccgggctcttggcgcggtttcacgaggcagtcccctctgtgtctctcgtgccccctaggcctggatcgggttctcaggaagcctcggggaagtgagggtcttagcgccttggtttggggctgggcactttgcgagctggtgtcatggaggccaaactgggggcctccgggccagktggtggcttcaggcttgctgttggracaggagsccaggctaggcagtgacgcctcactgagctccatgggtggcacgctgagctctgggtgggagaggcctctcccactgacctctctgtgactggcttctctgctggtctgagtgggaagggccctcagagaccctggaggcctttcctgccctggaggagtcaggcccagagagggtgaagaattgcccgagtcacacagctggtgacagggagagctgggactgtaccttacatcacctgacattcagcccagggctctattccctgcactgtggcaratggggaaactgaggcaggtgggccactcctctgcattccatgggagaggcaggaaattcgacaggagccctttgccgggttggcacttggagctgttttcctgcttgcttttccccagggcaaggtgcttcccagctgaaaactgcctagggagggtgctgttgagaccgtgagcacctgagagccctggtctttcactcaggcctctcctctcacctccacctgggaggctaagctcagggtaggtgtcctggcccacaggcaggtgcatgggctggtcccgccagcacctgcaaccttcttgtgcgcagctaaaaaaaaaaaaaaaaaaaaaaaaaactcgag

SEQ ID NO: 524 - DNA, 883 bp, Homo sapiens
ggcacagatacacacacacacacatatatatatacacacacatatatatatattccatggcccactctccccaacatacaaacgtatgcctccaagtcccttggggtggtgttgcgggtccatatggtggctgtacagacagtgggttgcagcacagctgaagaactgacctggcatcttttcagcaagcagtgaacacacgagtccccctactccagggatgggcagttgcatggcagtcatgctcaggtgccctgatctacttagtggcctatgtgaatagttacaggacctgctcactgttacaggatgataagccttgaagtttggcacacttagcaaggactgacaggaacactcagcacccatggcagactacctttcctaacagagacatagagattctgcgaggtctaactcacatatacttgtattccaaggatacaagtggaggacagaaatgaggcagaagtgataagttgaagagcacggccaagaattttccaaaacaggtaaaaatcatcaaaccacagttaaacaagaagacttttggaggctggtgcagtggctcacacctgtaatcccagcactttgggaggctgaggagggcggaacacgaggtcaggagatcgagaccataccggctaacatggtgaaaccccgtctctactaaaaatacaaaaaaattagccgggcttggtggcgggcgcctgtagtcccagctactcgggaggctgaggcagaagaatggtgtgaaccaatgggagaagaatgggagaaccaatgacgggaagaatgggaggcggagcttgcagtgagccgaaatcgcgccactgcactcgagagtacttctagagcgcgcgggcccatcgattttccaccc

SEQ ID NO: 525 - DNA, 383 bp, Homo sapiens
ggcacgagtggctgggagtcactgatgctgcctctgccttctgatgctggactggccttgcttctacaagtatgcttctcccacagctgtggctgcaggaacttaatttatagggaggagcctgtggcagctgctgccccagccacagctgcactgactgtgctcaccacacatctggggcagccttccctggcaggggccctcgtggcttctcattttccattcccttcactgtggctaaggggtggggtgaggggatggagagggagggctgcctaccatggtctggggcttgaggaagatgagtttgttgatttaaataaagaatttgtcattttaaaaaaaaaaaaaaaaaaaaaaaaaaaaaaaaaaaaaaaaaaaaa

SEQ ID NO: 526 - DNA, 657 bp, Homo sapiens
ggcacgagcagctgcaagtctggcatgggaagtctacagaagatgaaccaaatagccacaaagtctctgagctaattttgaaaggtggggatttgggagtaagtggggactgggagagctggtcagggtgaggaatggctgccagggggctttgaatgcacttgtttgaagtttgtatctgtaccagcagctgtggaatctgcatgccatgaaccagttggcaggtatagacaatgaacctggcattatgaatagcaaggttgggagcaggtggggaaattgggatttgagaggccagcaagcaggagtttgcaatgttctgaagggttttggtgattagaaaagaacaggtcagctgggtgcagtggcgcatgcctataatccctgcactctggagggccaaggaggcaggttgcttgagtccaggagctcgagaccagcctgggcaacatggcgaaacctccatctctactaaaaatacattaaaatatatatattcaggagtggtggtgcacacctgtagccccagctactcaggaggctgaggtgaggatcatctgagcccagggagttgagactgcagtgagctttgatggccccactgcattccagcctgggcaacaagagtgagaccctgtctcaaaaaaaaaaaaaaaa

SEQ ID NO: 527 - DNA, 1901 bp, Homo sapiens
tgttcggacgcgcaatagatctcggtgcggttgcacgtggagatgatcgcggcctcgacctggggatggcggccggtgccgaaagaactgcgcaggctctgcagcgtgggggcgatctggtcgagcgcgaacgcaaaacgaccgcgcagatcgagcggcgcggtcgtgtggttcaagccaagagcccagacagacatgcccgtgattataaaatcagcaaccgcaccgggcttgcgcagggacaaatggctttccctatgacagccataagccccgccgcatgacctcccgcacgcatgcggccccccatggacctgctcgaccttctcgatcacctgctcaatttcgttgcacccgccgccttcatggcgctggtgctggtgttcgcgggccgcttcctgggcggcaggcgtgccggcgtgccgcgctggtgggcgcaactggcgctcgtgtttgcggccggtgtcgctgtgctggtggccggcctggcggtgttcggccacgacgggatgatggcgacctacgccgcgctcgtggtggtctgcggcaccgtgcaatggctggcaatgcgcggctggcgccgctgaaagccgctcaagccgggtccagccggcggatcatgtagaccgaccggccggggtaggtggcgagccgggcctgttgctcggcaccctcgggttgcgttgccgcatagccctggcgctcccagaaaccgaccgaagactgcaccgacaccagcgtcgaaagccgccatccggccagcgccgcatgcgcccaggcatggcgcaccagccgtgggccgaggcccagccctgcagagtcggggtgcactgccaggtcatgcaggtacagcgaatcggcctgcggggccacttcgaactcgccgtgcagcggcgtcagcttgccgaccaccgacggatagcccgccagataggcccgcacgccgccgccatgctcggcgacccagcccgtatggggcgcggccgcgagccggcgggcgatcagctcgccgtcttccacgaagcccgcgccgtagcaggcgagctggatcgccagcacggcgtcgaggtcggcggcgcgcatgtcgcgcacgaagggggcgttcgacacgatcaggccagcagcagcttgtcgtcgtccagcttctcgccgcgggtctgctcgaacatgcgcagcaggtcgggcacgtcgagcccggcgcgctgggggccggccacgtcgaggatcacctggccctcgtgcagcattaccgtgcgcgaaccgtagtccagcgcctggcgcatgctgtgcgtcaccatcatcgcggtcagctggccggcctcgacgatcttggccgtcagctccagcacgaaggcggcggtcttggggtcgagcgcggcggtgtgctcgtcgagcagcaggatgcgcgagggcttgagcgaggccatcagcaggctcaccgcctgccgctggccgcccgacagcaggccgatgcggtcggccagccggttctccagccccagcttcaggatcgacagcttctcgcggaacagctcgcgcaggttgcggttcagcgcgaagccgaaggcccgccgctcgccgcgcttccatgccagcgccatgttttcctcgatggtcagcgcctcgcaggtgccggccatcgggtcctggaacacgcgggccaccatgcccgagcgctgccaggcgttcatgcgggtcacgtccttgccgtcgatctcgatgctgcccttgtcgacgatcaggtcgccgctcaccgcattgagaaaggtcgacttgcccgcgccgttcgagccgatcacggtgacgaactggccggtgggaatctccaggctgagcccgcgcagcacgcggttctcgatcggcgtgcccgggttgaaggtcatctcgagagtacttctaga

SEQ ID NO: 528 - DNA, 375 bp, Homo sapiens
attcggcacgagttaagtagtaccatgtggctgtggaagtttaacttgtcactaatccaccaaactctgagaagacagcatattttccgtcattcccaaaagactatcacaggcaacattgaggaatgctttgttaaactccagggatatattccacatcacacttcccccgtccaccagattagcaactgtccaaggacaaaacaaaacacacactaaaaaggaaatggggttagtccgatatgtctccatctccttatgctggttcttttgtctgcagaagccacggtttctttttctttttgaaaaaaaaaaaaaaaaaaaacycgggggtctttywgrggggccsggggcccacggtttttcccacccggg

SEQ ID NO: 529 - DNA, 375 bp, Homo sapiens; identical to SEQ ID NO: 528

SEQ ID NO: 530 - DNA, 303 bp, Homo sapiens
ggcacgagattggatggcctagcatatgatctatatggagttaaggaaccaaatgggtgattctaagatacaaagaatgaaagataaattaattatgtttttaatcttctatcagtgtaatacattgccttaattgtaaagcagcagaatgaatcaatgtaggtgcattcaatttttcttttggaaatggaaattacattttatcattgtcatcctaagagtaatacaagattttgagaaaagttttggtaaaaacagaaaaatgttagaaaaaatttaaaaagtaaaaaaaaaaaaaaaaaa

SEQ ID NO: 531 - DNA, 810 bp, Homo sapiens
ggcacgaggtctcttgctggcctggaccatacatcatcatttctcatgtagatttttgcagcagcctcttaactggtctcctatcactcctacttaaagccctctggtaacttcttagcagagtaaaatccagagtccttagagtgttctctaagaccgcacttgatctggtctctgtccacctaacctctgacctcatctttcatcacttgccccttcttcactcattcccttccagcatcagtcctcacttcctgaaacatgtcatgtactctttgctttgggtcttatgttctgtagtgctcttcccgcagatcactgtggtggaaatgccttcccagaccaccctatatagactagcaagtcctgaccttggattccctctctccatccctcttaccctgcttcatttttcttcttagttctccccactgccccccgccgccccaaggcagggtctgagtctgtcatccagcctgcagtgcagcagtgcaatcacggctcactgcagactcaacctcccaggctcaagtgatccttccacctcagcctccagagtagtagctgagactacaggcacacgtcaccacgcctggccaacatggtgaaacccagtctctaccaaaaatacaaaaagtagctgggcgtcatcgtgcacacctgtaatcccagctacttgggaagctgaggcacaagaatcgcttgaacctgggaggcagaggttgcagtgagccgagatcatgccactgctctccagcctgggcaacagagcaagactccatcacaaaaaaaaaaaaaaaaaaactcgag

SEQ ID NO: 532 - DNA, 1256 bp, Homo sapiens
  SITE (1238): n equals a,t,g, or c
gaattcggcacgagccagggcayactttcccaggctctctttccagaatttgtctgcactggcaaagtctttctcacctaaatcaaagcaagagaatagcaggccttggctttggggatgagatgtgagggacaataggaaactgtgatacctgaggccaaagcctgcctgagcctctgtacctgtgtcatgaaatccctgctccctgggtttggatattgtcagtcttcaccagcctctttcctttatccctttctctccttcccatctctcccacgcagcagctaagaatataaaccatgggggattaaaaatagcaaggctggagagtgttatttctgaagcatttagcaaaagcctccccttctgtgtgcccacagtttagtaaaatccccaagggcaaaggaggagtgtatgttttctctctctctctttctctctttctttcttgttggatacagcctgggcaaaggagtgagacctgtctcttaaagaaagagagscgggcacagtggctcatgcctgtggtcccagcactttgggaggctgaggcgggcggatcacctgaggtcgggagttcgagaccaacctggctagcatggtgaggccccatctctactaaaagtgyagagattagctgsgcgtgatggcatgtgcctgtggtcccggctgcttgggargctgaggcaggaraatctcttgaacccgggargtggargttgcggtgagccgggatcgcgccactgcactccagcttaggcaatagagcaagactctatcmcaaaaaaaaaaaagagagagagagagataaagaggtatattgggmcaattagtcatctttcctacattttctctttttttcagagcccagaatccttgcatacattttctcattctaaaatcctacctatttagtttgtagaaatgatttatgtagtaatcatagactgctaaaagctagaactccggcctccttttacagacagttactaaggcttagaaacatccttcagcttttcagaggttgcaacatacaactggtctttttccccagcccagttctctttcactgatagggccgttcatcttttcctattccttaaaccccctttcaagtgttaagatttaacctcttgttctagtattctagtatttgaagaacaaatttatttcctgttacacacttcatatacatttaaaaaaaaaaaaaaaaaactcgagagtacttctagagcggncgcgggcccatcgatttt

SEQ ID NO: 533 - DNA, 657 bp, Homo sapiens
  SITE (9): n equals a,t,g, or c
  SITE (19): n equals a,t,g, or c
  SITE (22): n equals a,t,g, or c
  SITE (98): n equals a,t,g, or c
  SITE (143): n equals a,t,g, or c
  SITE (176): n equals a,t,g, or c
catcaatgngcgtggatancgntttgactcacggggatttccaagtctccaccccattgacgtcaatgggagtttgttttggcaccaaaatcaacggnactttccaaaatgtcgtaacaactccgccccattgacgcaaatgngcggtaggcgtgtacggtgggaggtctatatangcagagctggtttagtgaaccgtcagatccgctagccgcaattactgtgagttagctcactcattaggcaccccaggctttacactttatacttccggctcgtatattgtgtggaattgtgagcggataacaatttcacacaggaaacagctatgaccttgattacgccaagctcgaaattaaccctcactaaagggaacaaaagctggagctcgcgcgcctgcaggtcgacactagtggatccaaagaattcggcacgagaaataacttgaagtaacttttaagtgtgtgaaaagaatatttttttccaccctgtccatttaagcatctgtgacaggcagtattaagtgatgggtgtctttacgtacacatgcctgttgctcacagtactggggaagagttgcaaaatagtcacccattctgcagtgatttctctcttcttatttgtgaaagactcaaaaaaaaaaaaaaaaaactcgag

SEQ ID NO: 534 - DNA, 626 bp, Homo sapiens
gctcccttaccccccagaaaccctaatgttagtgttcggccacctcttcttccttctgaatctggagcctagcaggcctgcagttttagtcctgctcacagttttgtgtctctattccattgagattgttgtaacttatttaagcatgactatttcttctcagtttctcttttttatattttattttcatttgtatgtttttgaagggagagggaagatcaaagtgtgtgcccactatacaatcttggttttcccaaaatccgtcccatgatgttataaacatatgaactaggagatgaaactcaaggttttctttctaacctaggaagaagttcagtctctctctataaatagagaagggctgttgaataatttgtcacctgacttctcttttgactttgtaagaccagatagtctatagacagaaacagattcattaaaccagggccattcaggtttatttagtaaaatatttgtgttatgtttaaaagctttggccgggtacggtggctcatgcctgtaatcctagcactttgggaggccgaggcgggcggatcacgaggtcaggagattgagactatcctggctaacatggtgaaacctagtcactactaaaaaaaaaaaaa

SEQ ID NO: 535 - DNA, 342 bp, Homo sapiens
actagtggatccaaagaattcggcacgagttaagtagtaccatgtggctgtggaagtttaacttgtcactaatccaccaaactctgagaagacagcatattttccgtcattcccaaaagactatcacaggcaacattgaggaatgctttgttaaactccagggatatattccacatcacacttcccccgtccaccagattagcaactgtccaaggacaaaacaaaacacacactaaaaaggaaatggggttagtccgatatgtctccatctccttatgctggttcttttgtctgcagaagccacggtttctttttctttttgaaaaaaaaaaaaaaaaaaaa

SEQ ID NO: 536 - DNA, 808 bp, Homo sapiens
tcgacccacgcgtccgcccacgcgtccgaccatttcttctccaaggaacataaatagaagatgtgcagaccggcaggggctagtggcagggggctggctgtgcattggttttgatgcctctcagctttggcagccccaaggctggggcccaaaaaaaaacgagggctgatgaggtgacctggagtgagggcggtgcttcgccacccctcaggaaccatacttcagcggctctgcctctgcacattgctcaccaacacacagggtagaaaaccactagctcttcctggagagaacagaacatgcagcctccaccacgtccccagaaacagccgcagacttgagctcactacatcaagaacaccacaccgcgctccaaggaacagctacaagcacagagacagaggcatacagagacaaagagagaaagagacgcaacatggcagcagacactgctttttttattaaacattaaaaaaaaggtcaaaatccaagcaaacttgaacccgagaatgtacacagaagtaggaaacacagagaacagagctgtcccagccagccagcgagcgatgctcttttcggagaacgtttcatagacggaagtagattccatgggcctccaagacaataggatcctctctccattcctcgccatatgggttttgttttttaagtcatttggtttggggagggccttgttttttttctgttttgatatttttattttttctgcagtcaccggctgccaacataatctgcaccaactggagatcagaaaccaaaaaaaaaaaaaaaaaattttaaccacaac

SEQ ID NO: 537 - DNA, 1300 bp, Homo sapiens
ttggaatgcaaagagaaagaagccagatgggaaggctgggtagggagctacgcacagcctatttgctcttcatccttagactttcttacacgtccgcaggcctgtcacttcgggggaccatcagctctgtctcccagccccagtgacctgctgtctggcaattaggaggtgtactttccaagaattctggatttccctgagtctatagcttcagtcctcctttacctgctgatacagtttatatgtttgtcccctccaaatctcatgttgaaatgtgatccctgatgttggaggcggggcctgatgggaggtgtttgggtcacgggggcagatgcctccctcccacggtaatgagtgagttctcgctctattagttcacataagagctggttgtttaagggaaactgacacctcctcttttatctctcttgctccctctcctgtcatgtgacatgcctgttcccccccttccccttctgccatgagtggtagaaggttcctgaggcctcaccagaagcaagtgctggtgccatgcttttttttttgaagtagggtctcactcactctatcacccaggctggagtgcaatgggcaccatctcagcctcctgggttcaagtaattctcctgcctaagcctcctgagtagctgggattacaagtgcctgccaccacgccaggctaatttttgtattttgagtagtgatagggcttcaccatgttggccaggctggtcttgagctcctgacctcaagtgatccacttgcctcagcctctcaaagtgctgggattacaggcgtgagccagtgcacccagccctggcaccatgcttcttatactctttgctgaaccatgagctaaataaaccttttttctgcctaaattacccagcctcaggtatgacttgacagccacgccaagcagactaacacacctgctcacagtttttgccagctctgctcctatctgggcatgattctggagctgaacacagccaggagctccaggtccacctgcattagcctccctcaaagcacaaacatctgtgaaagcagaggctcgagagtacttctagagcggccgcgggcccatcgattttccacccgggtggggtaccaggtaagtgtacccaattcgccctatagtgagtcgtattacaattcactggccgtcgttttacaacgtcgtgactgggaaaaccctggcgttacccaacttaatcgccttgcagcacatccccctttcgccagctggcgtaatagcgaagaggcccgcaccgatcgccttccaacagttgcgcag

SEQ ID NO: 538 - DNA, 2092 bp, Homo sapiens
ggcacgagtctacacaaggcagaagaggcacgggttttcctgggagcgaatatcaagtgcctgagagcaactacaggactaactgtgtttgggttgggtgtagtataaataataataatggctaatatttcctgagcatctactaaatgcaaggaattgtgcttggtgtgtcatgtggattctctcttgcatcttcatgataaatgttattgtcgctgttttaccgatgagggttggattagaggggttaaacaacttgtcttaggctccacagctgggaacaagtggggctgggaagctgacttcgtgctcttcaccaccacaaaggatgtgtgtgcatcctggggcatgcctgcctcatgtgggggtgtcctgggctgaatttcctgggcacttctcagtggaactctctagcctcctggttcggaatgtcaactatgagatcccctcactgaagaagcagattgccaagtgccagcagctgcagcaagaatacagccgcaaggaggaggagtgccaggcaggggctgccgagatgcgggagcagttctaccactcctgcaagcagtatggcatcacgggcgaaaatgtccgaggagaactgctggccctggtgaaggacctgccgagtcagctggctgagattggggcagcggctcagcagtccctgggggaagccattgacgtgtaccaggcgtctgtggggtttgtgtgtgagaggtagagaggcctcagcttctcctggtgggggtgctttgcctgtgttccccagctcatgacccttctccagttgtcttgttcccatataacatttgaactctttacacacctgaacctgtgggggccttgcccatttgaccatgtggcccaggccaaagcccagtgttggccttacgcatggtcggcaggagagtcagttgtgtgctctgttgaagccccacagagcaggtgttgccaatgctgcggttcgtgcagaagcggggaaactcaacggtgtacgagtggaggacagggacagagccctctgtggtggaacgaccccacctcgaggagcttcctgagcaggtggcagaagatgcgattgactggggcgactttggggtagaggcagtgtctgaggggactgactctggcatctctgccgaggctgctggaatcgactggggcatcttcccggaatcagattcaaaggatcctggaggtgatgggatagactggggagacgatgctgttgctttgcagatcacagtgctggaagcaggaacccaggctccagaaggtgttgccaggggcccagatgccctgacactgcttgaatacactgagacccggaatcagttccttgatgagctcatggagcttgagatcttcttagcccagagagcagtggagttgagtgaggaggcagatgtcctgtctgtgagccagttccagctggctccagccatcctgcagggccagaccaaagagaagatggttaccatggtgtcagtgctggaggatctgattggcaagcttaccagtcttcagctgcaacacctgtttatgatcctggcctcaccaaggtatgtggaccgagtgactgaattcctccagcaaaagctgaagcagtcccagctgctggctttgaagaaagagctgatggtgcagaagcagcaggaggcacttgaggagcaggcggctctggagcctaagctggacctgctactggagaagaccaaggagctgcagaagctgattgaagctgacatctccaagaggtacagcgggcgccctgtgaacctgatgggaacctctctgtgacaccctccgtgttcttgcctgcccatcttctccgcttttgggatgaagatgatagccagggctgttgttttggggcccttcaaggcaaaagaccaggctgactggaagatggaaagccacaggaaggaagcggcacctgatggtgatcttggcactctccatgttctctacaagaagctgtggtgattggccctgtggtctaccaggcgaaaaccacagattctccttctagttagtatagcggacttaataaaagaggaaaaaactcttgaaaaaaaaaaaaaaaaaa

SEQ ID NO: 539 - DNA, 643 bp, Homo sapiens
ccacgcgtccgcccacgcgtccggcaattctggttccggggctctgcctccatatgcccctaaactctcttcctcagctggccttccactgggaacttccacttcagttcttagtggtattagtttgtatgaccctagggatcacggttcatcatccacatcagagctagcaacagcttcttcaggagaaaactcaaagaaccagaaaaaaagtggtggcttaaaaagtagtgacaaaactgaaccttctcctggagaagccatccttccacaaaaacccagtccaaacgtgggagtcactcttgaggggccagctgacccacaggcggacgttcccaggagttctgttctgtgctaaaatggggttgtggttaagtgaacgagaactctgcctacctaagaagttcattgtgttctaagtggaaggagagttactgaagggaatgtgaatttttaccgtttgtacttaagatacatttgttgtctaaaatggctctggataacatttttgggttaaaaaatgtaatttaaagccaccatagaaagtattttctgatttactgtccaaatgaattttgttgttaattgagaagtcaataaaatggattaaactgacaaaaaaaaaaaaaaaaaaaaaaaaaaa

SEQ ID NO: 540 - DNA, 1896 bp, Homo sapiens
tcgacccacgcgtccggccagagactgcaaattcacagcggctggtggggaagaagtagcccttgaccatggysaagggctacttcttccccaccagcgccagagactgcaaattcacaggcaatttcttttacaactacatgatgggcatcgagtttaaccctcggatcgggaagtggtttgacttcaagctgttcttcaatgggcgccccgggatcgtcgcctggaccctcatcaacctgtccttcgcagcgaagsagcgggagctccacagccatgtgaccaatgccatggtcctggtcaacgtcctgcaggccatctacgtgattgacttcttctggaacgaaacctggtacctgaagaccattgacatctgccatgaccacttcgggtggtacctgggctggggcgactgtgtctggctgccttatctttacacgctgcagggtctgtacttggtgtaccaccccgtgcagctgtccaccccgcacgccgtgggcgtcctgctgctgggcctggtgggctactacatcttccgggtggccaaccaccagaaggacctgttccgccgcacggatgggcgctgcctcatctggggcaggaagcccaaggtcatcgagtgctcctacacatccgccgacgggcagaggcaccacagcaagctgctggtgtcgggcttctggggcgtggcccgccacttcaactacgtcggcgacctgatgggcagcctggcctactgcctggcctgtggcggtggccacctgctgccctacttctacatcatctacatggccatcctgctgacccaccgctgcctccgggacgagcaccgctgcgccagcaagtacggccgggactgggagcgctacaccgccgcagtgccttaccgcctgctgcctggaatcttctaagggcacgccctagggagaagccctgtggggctgtcaagagcgtgttctgccaggtccatgggggctggcatcccagctccaactcgaggagcctcagtttcctcatctgtaaactggagagagcccagcacttggcaggtgtccagtacctaatcacgctctgttccttgcttttgccttcaagggaattccgagtgtccagcactgccgtattgccagcacagacggattttctctaatcagtgtccctggggcaggaggatgacccagtcacctttactagtcctttggagacaatttacctgtattaggagcccaggccacgctacactctgcccacactggtgagcaggaggtcttcccacgccctgtcattaggctgcatttactcttgctaaataaaagtgggagtggggcgtgcgcgttatccatgtattgcctttcagctctagatccccctcccctgcctgctctgcagtcgtgggtggggcccgtgcgccgtttctccttggtagcgtgcacggtgttgaactgggacactggggagaaaggggctttcatgtcgtttccttcctgctcctgctgcacagctgccaggagtgctctgcctggagtctgcagacctcagagaggtcccagcactggctgtggcctttcaggtgtaggcaggtgggctctgcttcccgattccctgtgagcgcccaccctctcgaaagaattttctgcttgccctgtgactgtgcagactctggctcgagcaacccggggaacttcaccctcaggggcctcccacaccttctccagcgaggaggtctcagtcccagcctcgggagggcacctccttttctgtgctttcttccctgaggcattcttcctcatccctagggtgttgtgtagaactctttttaaactctatgctccgagtagagttcatctttatattaaacttcccctgttcaaataaaaaaaaaaaaaaagggcggcc

SEQ ID NO: 541 - DNA, 3362 bp, Homo sapiens
  SITE (1488): n equals a,t,g, or c
cccacgcgtccgatttttaattgggataaaatacacaacatttacaattttaaccatttttaggtgtacttcagtagtggtaagtctattcacaatgttgtgcagttggtttttccttccacttttcttaaccattctcaatatcgcaactacatccactttgtgcaaacatcaggtttgtgcaccttatacgtagggaagggccattgcctccctcactgttatccaagaacacctttgaggattcatctgcactatgatttctgtgggaaaatacatttaaagtgccagtcttcattactctcagaacacggcctgtttgggaagtaagcactggcttgcatttttttgtccccttggcagtaatctggcgagcggctgggtccttccatggacccctttggaaacctttgtattaatcttctggctgtctcctttaagaaactacaagattaacctttttgcagccctttctgttctgggattcttgaatctggcagcaggtaacgacaggtcccatcagaaacaggtcaagatcttgacttcctgccctccctgggagcagggcccacgagcaccacttaacacctttttcccctgacccagcctcattccagccttctgcaagtcctgctttcctctccaggacctttgttcctgctttgcttcctatatttcagccttttaccttctgacccttggccctagctgcagcatgtgttttgtgacggagtgtagggactggattgtgcagagaccctctttgcatctgtctgggccctcgggcctattacaggagggacccctcacccttcctgcctgcaacaagggtcctccaaatggaaggctggctttttagcccctaagggctaagcgttgctctctttaaagcccaagaaagtttttaaggggcaagagatccctaatatgcatgaatgactctcacaagacaggcaggaagtctccaagagacttcctttacccctagggaaatgccatctgatctttgagataaggggctgggagcagtttgatttcatctccagagaaggaagccctcagttaaggggtcatcttgctcttttccccactccagggcctctctgccttatctctgtgccacctgtgacccaggccttatacatgattgagaggattacccaaacagacctaattgacttattggaaatccaatcctttgattttttaattccattcttctgttgctgctttattatggaagacaaaggagactcccctatactgcctagtgaaacaatacactctgcagccccgactgtgtacgactgtgaggcctcctgtgtcagcagatgtgcatgtactctctgtactgatcccctggaaaggtggcctgtttgaaagcagtcctgcccaggcctgcagtaatgaagattaagcctcagagtactacaggttacccattttgttttgtttagcccctttcatcaaatgcttataaaattctangaacttacctagggtttattgttgataacctcaaacatatgtgaatcatccactccaaactagggcaagttttcttctcaggccctccaagggagttcggtgacatccggcacattgtggggatgaataggctgaaatgccaggtacacagttagtggaaagactccaaaccaagcaaaggttgaacgtcaggtaactggagtagggggtgtattagttagctagggccgctgtaacaaagtaccccaaacggggtggcttaaacaacagatatttattatctcacttttctgggggctagaagtccaaggtcaacgtgtgccaaagttggttccttctgagagagctgtgaggtaggatctgttccatgactctcttatcgtttctggtggtttgctggcaagctttggcattccttgccttggaggtctctgccttcatcttcacctgcattctttcccctgtgtatgtctggaagtccagagtatactttttataaagacaccagtcatattggatgtttaaaatgacctcatcctaactaattacatctgcaaggaccgtctttccaaataagatcacatcctgagggtactagggtttaggacttcaacttatgaattttgggggagagatagtcaacccataatgggcataagagaccgggagtggtatatgaaatatagtttgaattccacctcaagaccttgagcttatgacttctgtctagctctgtgtatcattcatacttcccactaatttttaacaaaatgactgggagagggagaaagtgaaacccggtggactgaggcttgagtgagcattacctcctgggcctgttgatttgcgtctccctggtgaccttcttctctgaccagcatccgtgggcttagggaaagcacagtggtggaaatgtgatcctggtgtgtgagatgcaaacttgatcttagcctttgctctccctggaaacttatcggtcaaaattttcactaaaggcagttttttgtctgtttgtttaggtttactggttatttattatttatagcatggttaaattgggtcaaatttttatgaattgtaagtagagaaacttttctaataagaggaaaggataagaaatcagacctttttgtaaagaaaattaccccacttaaagtcctggtttattttaggccgtttggcagtgagaagaagggattatttgtgtctgacagaggtctacaaggaaaaaggtttgggatcagaaaacacttccaaccagaatgacggttccctgccagtccttggtctttcttcctcccttccttctgtgcccacatggactaattatgtctggctttccctccctcttccttgtatatttcccttccatatcaagaccttcagaatgagggcaatgtggataatttcccagttttccagctgggcagcttcaccaagaacaaacccagacatcaaggccagaccaaaaaaatcttcttgttttagacagaagactcctacatctgggggatttaatgcacccactgtccgctcagtgcatttcctgtgtccggagcttctctgcctgccggctctggtctcgtaagtttccatgccctgctgccaacttataataacagaggcggcaggcagcaggctgagaatgtcatagcctactccatacatgggcactgctttgcagactgaaacaaagcttgcagggtctcattgcaggcctctcagccttgacagtggttgtgcccagaccaccaggagcctggaattaaataccctcggatccagttctctactgttaatgttatcagcttcatcaagtacttcctctttgagtgatatctgtggagaaataaataaatcaagctccctagttc

SEQ ID NO: 542 - DNA, 842 bp, Homo sapiens
ggggagggactgtctgggttcaggggcatggcctggagggctggtgggcagcactgtcaggctcaggtttccctgctgttggctttctgttttggtttattaagacttgtgtattttctttctttgcttcctgtcaccccaggggctcctgagtataggcttttcagtccctgggcagtgtccttgagttgttttttgacactcttacctgggcttctctgtgtgcatttgcgtctggcctggagtaagcaggtccgacccctccttctttacagcttagtgttattctggcatttggttaagctggcttaatctgtttaatgttatcagtacattttaaataggggcattgaaatttactcccaccaccagggcttttttgggggatgcctgggcctttaaaacactagccaaactctaattaattctcaaatcactgccaggagttcttgctcctggctgcaggcccaggccccaaggtctccttcttggggtcacaaacagcagtaaggaagaggaatatatagcaactcagggcctgggaattgtggggcaatccgttcttagggactggatacttctggctggctgagtatagtactagctgcctccccaccaggttccgagtagtgtctgagactctgctctgcagggcctagggtagcgctgggagtgtagaagtggcctgcccttaactgttttcactaaacagctttttctaaggggagagcaagggggagagatctagattgggtgagggggacggggatgtcagggaggcaagtgtgttgtgttactgtgtcaataaactgatttaaagttgaaaaaaaaaaaaaaaaaaa

SEQ ID NO: 543 - DNA, 419 bp, Homo sapiens
  SITE (419): n equals a,t,g, or c
ccacgcgtccggaaagatatctcactggttggtggcccgagagaggcctcttatgcttctaagatccaatggatctgtcccacctcttggccctctggtgccatcctgggcttcactgctgctggacatgctgttcttccccttcacagactacttcctttcagtcaccttttcagtttcttctccatcccccacccatggcctccaactctgcagccctctgctctcctctctctgtcttgtctccagagttccatcttctcacccgacctggaccattactcccattcccacaggcactgcagctttttttcagaactgaaagtttaaattccccctttatccttctccttcttcacctacaaaaaaaaaaaaaaaaaaaaaaaaaaaaaaaaaaaaaaaaaaaaaaaaaaaaaaan

SEQ ID NO: 544 - DNA, 1262 bp, Homo sapiens
acgcgtccgcccacgcgtccgggtccaagcacttacaagttttttgtagttgttaccgctcttttgggttggtttgttaatttatacaaagagattaccaccaccaccccctccttcagacggcggagttatattctgggttttgtaaaactttatgtatctgagcatttccatttttttttttgggttttgtattatttcttgtaaatgcattgtgaaaaattttattttcggcgttgcaatgcggggaggagaagtcagattatgtacatagttttctaaaaagcctttcttctaaaaacgaaaaaagaccccccacccaaaatgtttcgagtcaacaaatttaagagacagagcccattttctccataaatttgtaacatgctatttttatgtgcatgttttatgagttcaaaatgcaatgaggaaatctgacaggggaaattatctgtatgaactaaaagtaagggaaccccggggaatgggaggacaggatttttcaaggaacctttttcaatgaaagagaaggaagttaaaacctataggttattttgtagagctgagtgttaatacgggccgagaaataaaagtatcttctgctccggctgtttcactgcggacggctggggctgctgcgcgttaccttgctgcaagcggggcgccttccacctggctgggggtctgcgccacagtttggtccagaggagggaggaggaagggaagaccccattggtgggaccctggaccaggccatggatgaaggacaaagaccagggcaggtcacgggtttcccaattccccagcaattaagatttcgagcagaatttatctaaatgtgtttcaaggaaacacaatcgctgaaccaaaacgtactgcagccgagccccctccgtccatcttctgcccctccccctggcttctttctcttgggaaaacgggcaaaataattgtgctggattctcacacacacagaaatatcgaccatcaccctcccccgcgtgaactgggatgcaagttgctaaccgatgtgaacgcaaaatgccttgttcattattcctgacgagatcttgaggttgtttgatgctttaaattttttaattatattattttctaggtgtttattggtacattgcagttttttttttgaaatttaaaaatttctgtaaaactttgtcttcaagtaatctgacagcattaaatattgcatttaaaaattaaaaaaaaaaaaaaaaaaaaaaaaaaaaaaaaaaaaaaaaaaaaaa

SEQ ID NO: 545 - DNA, 1624 bp, Homo sapiens
cccacgcgtccggccccagattccgaggggcctgccagggactctctcctcctgctccttggaaaggaagaccccgaaagacccccaagccaccggctcagacctgcttctgggctgccatgggacttgcggccaccgccccccggctgtcctccacgctgccgggcagataagggcagctgctgcccttggggcacctgctcactcccgcagcccagccactcctccagggccagcccttccctgactgagtgaccacctctgctgccccgaggccatgtaggccgtgcttaggcctctgtggacacactgctggggacggcgcctgagctctcagggggacgaggaacaccaccatgccccggggcttcacctggctgcgctatcttgggatcttccttggcgtggccttggggaatgagccttcggagaatgtggcccttgacgcagaatgaggagtgcactgtcacgggttttctgcgggacaagctgcagtacaggagccgacttcagtacatgaaacactacttccccatcaactacaagatcagtgtgccttacgagggggtgttcagaatcgccaacgtcaccaggctgcagagggcccaggtgagcgagcgggagctgcggtatctgtgggtcttggtgagcctcagtgccactgagtcggtgcaggacgtgctgctcgagggccacccatcctggaagtacctgcaggaggtggagacgctgctgctgaatgtccagcagggcctcacggatgtggaggtcagccccaaggtggaatccgtgttgtccctcttgaatgccccagggccaaacctgaagctggtgcggcccaaagccctgctggacaactgcttccgggtcatggagctgctgtactgctcctgctgtaaacaaagctccgtcctaaactggcaggactgtgaggtgccaagtcctcagtcttgcagcccagagccctcattgcagtatgcggcacccagctgtaccctccgccccgtggtcccccagctccccgctcactccacgggctcggtgaggccggtcagggcacagggcgagggcctcttgccctgagcaccctggatggtgactgcggataggggcagccagaccagctcccacaggagttcaactgggtctgagacttcaaggggtggtggtgggagccccccttgggagaggacccctgggaagggtgtttttcctttgagggggattctgtgccacagcagggctcagcttcctgccttccatagctgtcatggcctcacctggagcggaggggacctggggacctgaaggtggatggggacacagctcctggcttctcctggtgctgccctcactgtccccccgcctaaagggggtactgagcctcctgtggcccgcagcagtgagggcacagctgtgggttgcaggggagacagccagcacggcgtggccattctatgaccccccagcctggcagactggggagctgggggcagagggcggtgccaagtgccacatcttgccatagtggatgctcttccagtttcttttttctattaaacaccccacttcctttggaaaaaaaaaaaaaaaaaaaaaaagggcggccgctctagaggatccc

SEQ ID NO: 546 - DNA, 224 bp, Homo sapiens
ccacgcgtccggaaacaagtttcaccaaacaatacttagccttattttgtatatgcagtgcattataatattttctattttgttctgtctctttttttgttcatgcttgacacaaaacattaaattggttttgcaacctacaatttgaaataaaaatcacagatgtatttattccaaaatagaaaaaaaaaaaaaaaaaaaaaaaaaaaaaaaaaaaaaaaaaa

SEQ ID NO: 547 - DNA, 1567 bp, Homo sapiens
ccacgcgtccgctttggagaacagctcacaccccagagggaagtggcttggacaaagggggctgctcagcagacttcgatctcctctgggggatgtggataccgctcaggcccgcacccctccattggtcctggagactgatatgggaggcggtatgtgccttggctccggagggcacctggagcacccctcacctggagaaccctcatccagagcactcctttcctggagcacccctcacctgaagcaccctcagttggagcatcctctcacctagagaaccctcacctggagcaccctgttacccggggcaccctcacctggaaaaccctcatctggagcaccttctcacctggagaaccctcacctggagcaccctgttacctggagcaccctgttacccggagcaccctcatctggagcaccccctcacctggagcaccctcagctggagcacccctcaccggagagccctctcctgcagaacccctaccaggagcatacttcaccggggaccaccccttgccttgatgcctcagcactgaggagtctcccatctaggtggctggggaagggcactctggagccatggggatgaaggaccagaggctgctgggtacatcttgccctgagactttggaggactgcaaggggacccacattcacttcagctctgcacctgtggtgatatccccacactggagagcaaagtgattgctccgggggccagatggccacgccaccatccccccacacactgcccctgccccctgcctggagcacagcccgagagcacccaggatcatccatgtgaagcagcaggctgtgggtatgtttggccgtcccgacccctccacagccagaatgggcacccataggcatgagaacctcacagccattaggggtgccctgagtgccatgggcggtgggatttctctgatgccccccagctcttgctccctgcctggctcgccccctatcaaggctaaggatgactcagggcccagccatcaccatagcaacacgcgtcgcctagcaatggcggtctcccggcaacggttgtctcctaagcaatgggaatattttcctgggccctggctgggcccggcagttatttttagctccacagcaaatcagtcggcagctgcattttcggctccttgaagagaggcaaggtgtgggggggtgggtctctcggcaaagggaggaaagcatccccaagataggaatcttgctgccgtgggcccggaggtgcaggcctgtgggtgggcgaggccggatcctgcctgtgcaggggggcaggtggccggtggaggggagccaggggttgtgcaggctgcctggatgagtcggcagctaggactatgtccttgatgggcccccaagcaccctgagcctcataggtcggctgggtagaggggacgcaggccagtgctcacagctgcactatcagagcatctttctgggtggcccagggtctggcaggctcttggcacccagtgcccctcagctgtgggagccatcttcactgtcccagaccccagctccacccagggagggggcagca

SEQ ID NO: 548 - DNA, 1681 bp, Homo sapiens
ccacgcgtccggacagcagaaccagcggcggcggctaagcagagactgtagtagcggcgacagcgacgacggcagcgatggctggggcggggccagccccgggactcccgggtgcaggaggacccgtggtcccgggtcctggcgctggcatcccgggcaaaagcggcgaggaacgcttgaaggaaatggaggcggagatggccctgtttgagcaggaagttctgggggctccagtacctggaatcccaactgctgtgcctgcggtgcccactgtccccacggtccccacagtagaagcgatgcaggtcccagcggctcctgtgatccgcccaattatcgcgaccaacacataccagcaggtccagcagactctggaggcccgagcagctgctgcagccacagtagttcctcccatggtgggtggccctccttttgtaggccctgttggctttggccctggtgatcggagtcacctggacagcccagaggctcgagagccatgttcctgcggcgggcagctgtggccccccagagggcccctatcctgcgtccagccttcgtcccccacgtgctacagagagcagcagccggcccccgccctatggccctacggccccctcaccaggccctcgtgggcccccctctgcctgggccccctggaccacccatgatgctgccaccaatggctcgggctccagggcccccgctgggctccatggctgcactgaggccccctctggaagagccagcagcaccccgagagctgggcctaggcctggggttgggcctgaaagagaaggaagaggcagtggtggcggcggcggctgggctggaggaggctagcgcggctgtggccgtgggggcaggaggtgccccagctggccctgcagtcattgggcccagcctgccgctggccctggccatgccattgcccgagcctgagcccctgcccctcccgttggaggtcgtccgcggcctcctgcccccgctgcgcattcctgaactcctgtccctgcgtcctcggccccggcccctcggccagagccacccccaggcctcatggctcttgaggtcccagagcccctgggtgaagacaagaagaaggggaagccagagaaattgaaacggtgcattcgcacagcggcagggagcagctgggaggaccccagcctgctggagtgggatgcagatgacttccggatcttctgtggggatctgggcaatgaggtgaacgatgacatcttggcacgcgccttcagccgcttcccatccttccttaaggccaaggtgatccgtgacaagcgcacaggcaagaccaagggctacggcttcgtcagcttcaaggaccccagcgactacgtgcgcgccatgcgtgagatgaatgggaagtatgtgggctcgcgccccatcaagcttcgcaagagcatgtggaaggaccggaatctggacgtggtccgcaagaagcagaaggaaaagaagaagctgggcctgagatagggtctgtggccaggcacccgctcccacctggccgggcgctggctcctccctcagttctctttggaaaacccccagctgtccacccatcccctgccccaaaaccagtttcaataaatttacgttcatttccaaaaaaaaaaaaaaaaaaaaaaaaaaaaaaaaaaaaaaaaaaaaaaaaaaaagg

SEQ ID NO: 549 - DNA, 697 bp, Homo sapiens
gtaccaaccagtgaagtacaccagcctgctggcagacaaagtgggctgtaatgtgctggacaccgtggatatggtggactgtcttcggcaaaagagtgccaaggagctggtagagcaggacatccagccagcccgctaccacgtggcctttggccctgtgattgatggtgatgtcattcctgatgaccctgagatcctcatggagcagggcgagttcctcaactatgacatcatgctaggtgtcaaccagggcgagggtctcaagtttgtggaaggggtggtggaccctgaggatggtgtctctggcactgactttgactattccgtctccaattttgtggacaatctgtatggctatcctgagggtaaggacaccctgcgagagaccatcaagttcatgtatacagactgggcagaccgtgacaaccctgagacccgccgtaaaacactggtggcactcttcactgaccaccagtgggtggagccctcagtggtgacagccgatctgcatgcccgctacggctcgcctacctacttctacgccttctatcatcactgccagagcctcatgaagcctgcttggtcagatgcagctcatggggatgaagtaccctatgtttttggggttcctatggtaggccccactgaccttttcccctgcaacttctccaagaatgatgttatgctcaaaaaaaaa

SEQ ID NO: 550 - DNA, 733 bp, Homo sapiens
gtcgacccacgcgtccgtaaaatatgcttcctggtttagtggcatcaaataaatgttgatatcttacatttttgttgttagtactaaatatttgtaactttcatgtgagcttttccttaaaccataaattattttagaaatctgccttttaatttctaaaggtatttttattttttcagttaaaaaactactattgtttgtaatgttattgcaattacagaacctggtttatgtgatataattttttttgaactgcattgagaattgctttcacaaaagactgtatgttgtatttattgggatgtatatcaagctattgattgtattgcttgaatcatttgcactcttatcatgcttaatggaacagtttctgatggagatgtgttgaaaaaaaccactatgattgtgtatttgtcaatttgtactttacattctggtaatttttggcgtatgtatttcaagggtattttgttaggtgaagcaaatttatgatttctacatcttattagttatgttttctttttattattagctccctttttatctttattagtattgttggccttaattctatttgactaaattaatactattaaattggccttattttcaaatttttatgcccagtttttgaataaaaagcctagatattctataaaaaaaaaaaaaaaaaaaaaaaaaaaaaaaaaaaaaaaaaaaaaaaaaaaaaaaaaaaaaaaaaaaaaaaaaaaaa

SEQ ID NO: 551 - DNA, 680 bp, Homo sapiens
ccacgcgtccgaattaaatggctgttttaacagtaggctcttagcattataccacatagtcatttttcatgttcttgtttaacaggcactgaggttctggtttaaattaaatagctgcaaatgagacaatttataacccattaggttgggtggaaaattgtttctcaaaagcaaataagtaataaatctggtatctgcctataactcacagttgataagaaagtggccatttctcactagcattatatatgatttgggctctgggtaatttggaagtgttaggtttgtgtctttgtagcagtatttttattagaaaagaatctattggccttttacagggtattaatccctttgtcacctaccattgatgccttaagttttctgagtctcaattaaaaatcttccttttcttgatgcatgacaagtgtaatcagtacttgctcatttatttgtctgtatttagtttatgctgtactatttaattatccttccagcgtttttttttctccttacaaatatgatactctttagtgttaagctaaggcattgattcatgtatctgtccttataatgaattaataaactattttccagaaaaaaaaaaaaaaaaaaaaaaaaaaaaaaaaaaaaaaaaaaaaaaaaaaaaaaaaaaaaaaaaaaaaaaaaaaaaaaaaaaaaaa

SEQ ID NO: 552 - DNA, 1661 bp, Homo sapiens
ccacgcgtccgtccaactttcatgtgctggtaaaccttttccacaatccctgtttacaacacaatataattataattcctcttaattgatatagatgaaaatagaattaacatgtgacttaaactgtttgctatttttatggaacatgaaagcacataaaagttctggttataatgggctactaggaattttactctatttgatatatttcttgctttttgatattttccaacaatttgttcttggcccttcttgggaagcatcagtcattctcaaactccagatatgtatttctaacttgaaaggttagcctggatgaatcccatcagcacctgctgactgtgtctttctgccattgattgaagacccactgggtctcttccaatgcaacactgataaaaataaaacctgatttccccatcagttaattgtgccgctattgacgcacgtgcctaaaagaaatcttgtgtcggccttcttcaaaataaatggtaatttattcagccattcattcaacaaattcatctctacatttattgatacctactgtgtgctgggtgttacagctactatgacgagcaagagagacaaacccagtcctcaagattattacagtatgacggggaagtcatactatgaacaaataattataaaagtcagtaattttttagtaatcatttagtaaatgctttgaaggagaagcacaggaagtgtaaaagtgcaggcaaacggaagttagacctacagggattccatttttgcccctttttattatatggagtcgagcagccaaagacagccctcttgccacctgctagaatgctcataccccttcccctggactaaaataacattcctctccttagggtgatatacaacgccattcatgcctagacccaagtataccttttcagctttggcttctaatgagcactgcatactagctacccagggccactcacaagtccctcagcagggaacacattttaatttctctgtccatttgcattgttctcactagcccatctacctgttgaactcttacttgctcttctatacccagatcaaatgtcatttcttccctttagctttcacactttcatagacacttggcctctacctcttcctgggtggcagtaaatgcttcctcagtcatgtgcacattcaagcacttagcaataggaccctgtaggatacagcaaggggtctggaccttggaatcagagaaacatgaggcttgagccttgtgtttgtgaactattgattgcaacaatttacttaagtctctggactttagtttcctcatttgtaaaatggaaagattataaagattgactttaaatgcaaaatgcttagtacagttcagggcatctagtagacaactaaaaaatgctcatttgcatactcttgtatcatattggattgtcatgtaactgtctgcttcccctgagaacaagagccatgtctttttattcctatgttgattctgccttgatttatattctaactaaatttcataagtattttcctcccaactatgtttctttcatgcaagaagcttttaaatctccacaacaaaaatggaaactcaattgattatacagattgaatgaaaaacaaaacaaatatttctagtaataaaaaaaaaaaaaaaaaaaaaa

SEQ ID NO: 553 - DNA, 1336 bp, Homo sapiens
gaaaaaaaaaaagtcaagaaactgaaattcccatttaagttctcaaatcagtgatctgtcaaaataggccttgtaactgaaataccttacaaagcagttctaactaatgcaatgtgttttttaaaaatttttaatgaaccttacattgtgaacataattgcaacatgttttaagacaaacagtatttaatccttgaagacctgtcttgtatgtctctcaattttgtcagaatttttattattgtttttcacatatgtgaaataagcagttttttcagggtacatagggtatctttgttttacagatttttaaagatgaggttttgaaaagccctcagaggtttttgttaaaagactatcttgcttaataaatgacaacttgttacagattcacacattacaagtaggacagtataacaggagattggtgtgtgaatgctacaaaacagtcagcaaaaggaatcgtttgcttgtgaaacttcagaggtaccctgaaagtcatttcctaaagctagtgcatgtgaatyttttccttgaattgtgcagaataattggattgaggcacatattttgaggagtagcaagtggaatggtataatgactacagagaaaattatcttgaaatatagcaaggaagagaaacaagttttctttctccactttattgttggactaattgggtcaatttgctgtgacatatcaaagatctctttgtgccaggccaagactggctactgagttctcaaagcgttttaatatatagattacgtatgagtgcctattttttcctcctcctttcattttttatcttaatacccattttacttctgaaataattcatctgttttgctttatgaccagctttaatttcaattgaggaataataacaaccctagagattcataggaaagagcattgaaatacattttttgcataaagatacctaaaaccatctacccagcttagggttgaactgaatttctgtgaaataaatttgttttaaatactaattattttaaaactacttaattcttaaaaacaatgtcatcagtttcaaaagtttcactttgggaggatattccttaaaaggcatacatagatggtaaagtataaaatatttctgacagaattattcagtattattcaacatttactttcatgtttgttattgtaccacaaagatagtgtcattgttgggttaaaatgttggctgtttttgttaatatacttaaaactgtaaccagtgaataacacctgtagtattttttattatagattatattttatttcaataaactttgatatttagaccaaaaaaaaaaaaaaaggggggccgc

SEQ ID NO: 554 - DNA, 3569 bp, Homo sapiens
  SITE (903): n equals a,t,g, or c
gcccacgcgtccgggggattcgtcgcggcgccttctgagtggtcgggtcgaggcttctcggcctagcagtgccctcgctgcgcgatctcaggcgggttctcctcggctccgcgcagcccgcgccgcggtgggggacccggcgcagcggcacctgctgccgagggaccccgcggcccgccccggtgctcgtgatggggctgatcttcgccaaactgtggagcctcttctgtaaccaagaacacaaagtaattatagtgggactggataatgcagggaaaaccaccattctttaccaattcttaatgaatgaagtggttcatacttctccaaccataggaagcaatgttgaagaaatagttgtgaagaacactcattttcttatgtgggatattggtggtcaggagtctctgcgatcatcctggaacacatattactcaaatacagagttcatcattcttgttgttgatagcattgacagggaacgactagctattacaaaagaagaattatacagaatgttggctcatgaggatttacggaaggctgcagtccttatctttgcaaataaacaggatatgaaagggtgtatgacagcagctgaaatctcgaaatacctcacccttagttcaattaaggatcatccatggcacattcaatcctgctgtgctctcacaggagaagggttatgccaaggtctagagtggatgacctcccggattggtgtgagataacttttttgcttgaaagagactgctctatttattctgtgacatgaacattttttcctagtacctttggctgctaaggcagcagcatgtttaatttataacaacacaaacctctgagagcaacacttgaatcaagtgcagctgaactggaacataaaagattttttcttaattnttttttttttaacacactaatcttcagttggatgaatgtaatgtataactatgttttcagcaacaattcttctgtttattctaattaatcagtgactgccttgtaagaaatgtttgtcatatgcgtgatgtcttctgaaatattcttataaccttaatgaccaattgctttcaattcttgaccagcactccctcccaaccagagaattactggtttgatagagtagtcttggaaaccatcaggtactgcctgcagacttctccagcactaaatatatttgttccctctataaaccattcatctttcggacagaacttactgtaaagaaagaaatctgcctagaggatatatgtaaggaagattccacatcatgagtacttgccttttaactttcccccacattactgttgagtcatggaataatgtttaagttgttatttgcatggaaattaagtaggctgtttatttatctaaaggaatcaagtccactcttctgcctgcaacatttgttcaaaaactaaccaaggtaaaatatttatttgaaagcccaactttgatgttaaatattcttgaataaatctgttattttaagaatatcacattattcaatgcatataaaactatcagaagttagtaaatcataccagcactaaaaataagacaattggaatatattttagcatcagtttacaaacaactttattatcaacagaaattttagctcttttctttgcaagatatatcacagctgctttgggcagtagctgaagccgaagtatgaacagtccattttgkttcttaaaatttgaagtcgtgtctgtcatagcatttttactaccagcagtatgttacttaaaaaactacatggctttccttgaatttatttgacggtwttatgtaatakacttgaaacaattgccatctttgtagttatgccttgggttctaaaatgktataggaaactgctgaattgaatcctagcttttagaatattaataggagactcaaagttaatattcttaacaacttaaaattaaaaaaagtcataatctatcaaaagtttatttattggatggcattaaaacatttttgaggcagttgtctaatatgaacaataatctaaacaatatattccttaaattaagaggaaagacaagtgtcgtatttcgatcctgkttattcaaatgtgtgattttgctgaaatgaaagggataaaatgaatacttagagaataatacttcatttttgcagtactttttaattttgataaaaaagatacaaagttcataatatcaaaatatgtgttcaaaattggtattttaattttaatatttttgtaagttgatttaaattttgctctttttttcaggtgtgcttggtttattatatttagtcaagttaatttagtcgaatgtggtaacattcttctgatttatctttagttggagcacacccttgaactgaacagtggccaaaggaaagctttctgggctttggaaagtagttgtttaactttgttttaagccgttttcttagtgattctgtatcaagtagaggataagtgwagtttaacttagtttttaatataacccataatcaagaacatgagcgaaaagcagacataaatcgatatggatggtttgtggtgtgtgtgggatgtgggggaattaagaaaatgccatttacctaagcacagtttgcctgaatttctgcttggttgtgttgtttaccgtaagtactgagggtagtttccctaagtctgtcctgagaaaaagcatacttagtactcctgtatttgttcttatgaaatgactatctgccttcttgtatctagtaagattggctggctcaattttcttctgtcaaattatatggttattttttatattaccacatcagcattatattaaaagtgtttttaatagttgattgtattttgccaactactagtatagactcaaatttgctatttaatttttaaaatacaatttattttgtaaatcctttaaaaaatatttggttagttttggattagaaatgatttatgttagccatgtgttgaagatgaaattggcatcagtgtagacggtgctgattgggaaaagttcatgattaggaaattcatgtaagactttttaagagtattttttaggttttcactcaatctttcctgtcacagtaacgtgaaaactgattattctttactccaagagaatgttttaacccaagcaagtatctaatactagagcattggttctgacattcattgtaaatcagtgaactgtaagatactgtctaaaaaatgtacatttgtaattagtgcctttattcatattttgaaataagttcttagttttatattatacctgttctttagaagtcatgttagcagctaattatttcagtgatgaaataatttgtgttttatatcccccttcacctccatgtattggttagcacagtttatagtaagtgaaaagcaagggacccacctacattaccttcaggagactgttctaccttttaatttgaaaacaaggaaattaaattttaacagaaatcttttaagtatgttataaccaaagtgttcaattatccttgcaagttcaaatacagcatttttcttaaaaaaaaaaaaaaaaaaaaaaaaaaaaaagggcggccac

SEQ ID NO: 555 - DNA, 2074 bp, Homo sapiens
acgcgtccgcgggagcttcctgctcgtgttcgctgttgagaagctacccgcggggttgtagacttcggacctcatggcagagataattcaggaacgcatagaagatcggctcccggaattggaacagctggagcgcattggactgttcagtcatgcggagattaaggctatcattaagaaggcttccgatctagagtacaaaatccagagaagaacccttttcaaggaagactttatcaattatgttcaatatgaaattaatcttttggagctgatccagagaagaagaacacgcattggatattcattaagaaggatgagattgagaattctattgtacaccgggtacaaggtgttttccagcgtgcctcagcaaaatggaaagacgatgttcaactttggctctcctatgtggctttttgtaagaagtgggctactaaaactcgacttagcaaggtattctctgccatgttggcgattcattccaacaaaccagctttgtggattatggcagccaaatgggaaatggaagatcgattgtcttcagaaagcgcaaggcaactatttcttcgcgcactgcgctttcatccagagtgcccaaaactttataaagaatactttaggatggagctgatgcatgctgaaaaactgaggaaggagaaggaagaatttgaaaaagccagtatggatgtggagaatcctgattattctgaagaaatccttaagggcgagttggcatggatcatctacaaaaattctgtaagcataattaaaggtgcagaatttcacgtgtcactgctttcgattgcacagctatttgactttgccaaagatctacaaaaagagatttatgatgaccttcaggctctacacacagatgatcctctcacttgggattatgtggcaaggcgagaattagagattgagtcacagacagaagagcagcctacaacgaaacaagccaaagcagtggaggtcggccggaaggaggagaggtgctgtgctgtgtatgaagaggcagtgaagactctgccaacagaggccatgtggaagtgttacatcaccttttgcttggaaagatttactaagaagtcaaatagtgggttccttagagggaagaggttggaaagaaccatgactgtattcaggaaggcacatgaactgaagcttctgtcagaatgccaatacaagcagttgagtgtttcgttgctgtgttataacttcctgagggaagctctggaagtggcagtagctggaactgaattgtttagagactctgggacaatgtggcagctgaagctgcaggtgctgatcgagtcaaagagccctgacatagccatgctttttgaagaagcctttgtgcacctgaaaccccaggtttgtctgccattgtggatttcctgggcagagtggagtgaaggtgccaaaagccaagaagacactgaggcagtctttaagaaagctctcttagctgtcataggtgccgactcagtaaccctgaagaataagtacctggattgggcttatcgaagtggtggctacaaaaaggccagagctgtgtttaaaagtttacaggagagccgaccattttcagttgactttttcaggaaaatgattcagtttgaaaaggagcaagaatcctgcaatatggcgaacataagagaatattatgagagagctttgagagagtttggatccgcagattctgatctttggatggattatatgaaagaagaattgaaccacccccttggtagacctgagaactgtggacagatctactggcgagcgatgaaaatgttgcagggagagtcagcagaggcatttgtagctaaacatgctatgcatcagactggccatttatgaagatgaagaatacagtcagctttgtgaaatagtattgcaagcaagccccgtgggcaaatttgtattgagtccatctgtaatttgctcagtgatggcagacaagatggctgtctggttttgagacacactttaattttatgttaacttgttaaatctttttaaaaattaaaaaatttttatgattgaaaaaaaaaaaaaaaaaaaaaaa

SEQ ID NO: 556 - DNA, 2010 bp, Homo sapiens
ccggaattcccgggtcgacccacgcgtccgtgaaaatctttagcaggatttataaacgtctttggaatgatgtagcacaacagtgttttactgtggggaatggggaatgactatctgaaagggaaaattgtttggcattttatattatttccaggcagtgcaaactgtctagcaagtagaatgttcatatatgaatctaatatagcaaatttatccctcataatactgtttttgaaacatcaagtttattctcaatgtgtggctctaatgacaatttcttgggaacgtaatagaactgcaataatgactaatggaaaagactctaaagctgtatctgatgggaaatgatttactttttaaactctttctatttaaggaattagcttaccgaaaggagatggtgagagctgacctaattaacaagaaagttggaatcagagaaactccagaaaatcttgccaaaccttctgaccaggaggtatttaaatcagaagtcataggtgatgggaacaggttggggattgaaatccctccaaccagaggctgaacttatccatgccatgtgaaattgtaggaagaggcagcatggctaagggtataacaacattcagtggccccccgaacctttaaccataggcgaaccaaatttcccctgaaaaagggccaccggaatttctccggaatgaatgggacccggtggggtactggaagggtttaccttggcctggggcccccagagggaatgccgggaaaaaaagggggggaaactggacaaaagggggccaaaggcaaaaagggattttggggggggggttgtttatgctatagttcattaatgaaaagatctaaagcgtatctgatgggaaatgatttactttttaaactctttctatttaaggaattagcttaccgaaaggagatggtgagagctgacctaattaacaaaaaagttggaatcagagaaactccagaaaatcttgccaaacttctgaccaggatgtatttaaaatcagaagtcataggtgatgggaatcagattgagattgaaatccctccaaccagagctgacattatccatgcatgtgatattgtagaagatgcagctattgcttatggatataacaacattcagatgactctcccgaaaacttacaccatagctaatcaatttcctcttaataagctcactgaacttctccgacatgacatggcagccgctggcttcactgaagcacttacctttgccctgtgctcccaagaagatattgctgataaactaggtgtggatatctctgcaacaaaggcagtccacataagtaatcctaaaacagctgaatttcaggtggcacgcactacccttcttcctggcctcctgaagaccatagcagcaaatcgtaagatgccccttccactgaaactgtttgaaatctctacattgtaataaaagattctaatacagatgtaggtgcaaaaaactacagacatctctgtgctgtttattacaacaagaatcctgggtttgagatcattcatgggctgctggacagaattatgcagttgctcgatgtgcctcctggtgaagacaaggggggatatgtgatcaaagcatcagaagggcctgctttcttccccgggcgatgtgccagagatctttgccaggggtcaaagcgtcgggaagcttggggtccttcatcctgacgttatcaccaaatttgagctgaccatgccctgctcctccctagaaaatcaatattggaccctttttgtgaagattggtctctgtggtgtgattctcttcccaggtgtccctttctcctcccctaagtgtccttaagtcctcctccacagggaacatctatttgggctttgatgtttaataaagtagaaagcactgtcaaaaaaaaaaaaaaaaaaaaaaaaaaaaaagggcggccgctctagaggatccctcgaggggcccaagttacgcgtgcatgcgacgtcatagctctctccctatagtgagtcgta

SEQ ID NO: 557 - DNA, 1426 bp, Homo sapiens
tttttaattttagaccttctaataggtgtgtactgattcctcattatggttacaatttgcatttctctaatgacattgagcatcttttcatgagcttattgccatccatgtatcttctttgttcaaccgttgaaatttttttgcctatttttaaattgggttttttcttttgttactgatactattaatatcctttattctggatacaaatctttttcatatttatgtttgcaaagatttttcttgctcttgacttgtctttttataacagtgagtttgaagagaagtttttcattcaatgaagttcagtttatccattgttcttatgctttaaatatttttctgcatttcttcaggaagttcatagttcagggtttatatttatactgatgatttatgtaaatttttatatatgatatggaggtatacatctgagtttattattttcaagcaccagtagttgaaaaggctatctttcttcacactgcagtgcctttgggactttgtcaaaagtcagttgtccatatatgtgggggtttttttttcggagttatattctgtgcatgatctgtttgtctgctttatgccaatacctcttttgattacataaactttataataattcttgaaatcaggtagtgttaatccttcaactttattttcagagttgttttggctattctaggccctttttatttcaatatgagttttagcatcagtttgtcagtttctcccaaaaatcctgctggatttgtggttgggattgctgtgaatgtgtagattaacgggaaaatttacatcttaacaatgttgagtctttcaatctatgatagaagtgatctctctttaggccttctttaatttctctcagcaaaatttcatattttttgttgtataggtctttcacatgttttgtcagatttatctctaagaagttaatattgttgatgctactttaaagggtatttaacctttgaaaatagtatgtgatggttcatatattgattttgtatctgtaaacttggtaaacttattagttatagtaactttattatttattcattgggttttctataaagatgtattagtccattttcacactgctgtaaagatactaccagaggccaggcgtggtggctcatgcctgtattcccagcactttgggaggccaaggtaggtgggtcagttgaggtcaggagtttgagaccagactgaccaacatggtgaaaccctgtctcaaccaaaaaaagacaaaattatctgggaatggtggcacacacctatagtcccagctacttgggaggctgaggtggaagaatcacttgagccccggaagtagaggttgcagtgagccgagattgcgccactgcactccagcctgtgtaacagagtgagacactgtctccaaaaaaaaaaaaaaaaaaaa

SEQ ID NO: 558 - DNA, 2382 bp, Homo sapiens
tccacggttacaagcagtggtaggattgcagccgtgggcctgctggacacacacatacaccaaagatgtatttggatctgggcaccccctcccaggatccctgtactcacgtgccagtctcctgactagagcactttactctgtttcctcagccctgyagcccctgggagcacacactgggtgcagccctgggccaggcacgggaggccctgccctgtgctgcccaggggctgtgtgcaccacatgagcacatttccctctggcctggcggcctccaggctggctgtggaaacagttcctgaggaaattagagattctatgaattgtaggagtattaaagaccaggctgttggcaccagaacttaaagcgatgactggatgtctctgtactgtatgtatctggttatcaagatgcctctgtgcagaaagtatgcctcccgtgggtatacgtttttaccttttttaaaaaacatttttgtagaaaaaataattaaatcccctttttggaaacttactgcaggttttgtgccttgacaacctctccctatgtgaggtttgtaaaaagtgtcctgtgacttaacacagaaacgcaataaacacacacaaaatagtttcatgagtgattcttcagatgcccttcccaactggttagttgatcaagaattttgggggtgggggttgcggagaaatcaagtttaaaattccttctgattaaaaaaatatagtggaatacaattgtctgccgtttccccttcttaatgtatatattgtgagtatttattagattcgtaggtcatattacttatcaactgagccaaatgtctgtgtgcaattgtgtttcctttaccttgtaaaattttgtacagcataaataagtaaaaaaatcactgtttttctcaactttttcaaaatcaaggattgtaaatattgtagattctttttctgtgtgatgtgtcctactgtttcataatgctgtaacttgtagaaatattgtatatttattttctgcttatttaatgtcttaatttctgaaaagtattaacatccctgtctcccactcccctgccgtcccatgaagttaactcctgagagttgtcgggggtgactggagagctcattgcagaccacgtggtcctccagggtggctctccaccttcgggtcctggtatttccagtcaagtgggtttcaattcttgggctttgccgcccttatgatgaagtgtgtgtttgatgccagtgagaaactcagtctggcaggctacaaaattctactccaagaaatacccagcaaccttctgtttgttccaaagcaactagcttatcatgcaagcaaattttgctgactccaggctttatctttaggaaaacaaaaaaaccaaagtattatcagcaggtgggaaagatttttctattgaaaatttatccctgacaactcagcgtttagaaaagaaataaaatgtgccacttccagaggtgctgcattgcagttgttcagggctagggccaggcaggacaagtgaatgggtgggacaggtggctcctgcctaaggaccacctcaggccactaaccccttgtggacaactgtgagtagctgggttttcccccacctgctgtgcaacttcctgtgctttgaggttggactaacttgtcttcaggagctaattaactgtacagccctccccacgccccacccatacggtcactgcatttggtcagcctgcttcttcaggtcgatgccctccttctgatactccatctccttcaggggaggttggggccccactggactgggtgtcaagatgtgaaagcttatgggagctttaaggagacttcatggtggttccatgcaggtggttctgccatccctgctgatttagcctggtgcctgtgtgtgtccactcacgtacacgtggggtgggggaaacgtgtctacagatgacgctaaatcagttggggtctactctaaacagcattgtgtgtaagaagcatcctcaagctcccagttaagtaacttgactacttttatttgggaatttcagactatagaagctctcttatgttttatgtccagattctgtgaccactagttactgtatcagaactcatcaggtacccacttataaatagcactgatctggctgtatactgatccatcactaacctgttttctaggacccagcgtatgtagcatttgtattgcagtttccctggcttacttgtgttttgcactgatgaattttgacagggtaattgccactttacttgtgcaatactgctgtaaataactgcagatttttaaacaatcttttatgttaattttataaaaataaaactttcaactagtaaaaaaaaaaaaaaaaaaaaaaaaaaaaagggggggg

SEQ ID NO: 559 - DNA, 1735 bp, Homo sapiens
ccggaattcccgggtcgacccacgcgtccggtaaactcacagatgttatgtgaatgctagttttgtgtgtgtgtgtgtgtgtgtgtgtgtgtgtattagtgggcctggctcctctgccacttactatgagtctttggatgcatcgtctaacctctttaagcctacagattttatcatctgcagaagggataattatatcacacaggactgtcatgaaaactaagtgaagtcatatttgtactggacacttaagtgggagctgcataaaagtagctgctattactaaagcatgtaggaaactgtaaattgttgtataggtattatttcttgcctctttcttaagacttctatgaagagaaagtgagttagcatttgtgaaaacagcttgaaattctgtcagtattcacatgagaaggctgaaggtggtttgggctaatgaggtcatgtaaaaagtgctgtgaaatcatggtaatggaaaattctgttctatgagagtgatccttatgagcccttgggcaacagggttgagggtggggaggagattgactgtgttttcctctcattccttggctcagctgttggctcctgggaccctgtgccgcgagcaggccaggcagtgtgacctcccggagttctgtacgggcaagtctccccactgccctaccaacttctaccagatggatggtaccccctgtgagggcggccaggcctactgctacaacggcatgtgcctcacctaccaggagcagtgccagcagctgtggggacccggtaaggctctcctggggagcacggctctccccagcccaccacttcccagccagcctcccctggccctcagggtagtttggaatcttggcttcaaatggcacctctagatactacctctttcatccccttgactcagggtagatgttcagggagaaccagaggacagtgttccttcccagtcccttgatgcttttatttctcagagtggacaattgaataagagtaatccaaaagaaaaaatgagcagaggatggagacagagaagcaaatgcaaatggcccttaagctatgaaaagacgtttaatctcagtcatattaagggaaagcaaagtataattatgatgaggtgagatttttcatatatcagattgcaaagactgaaagttaagataataataatataacaacaataataatgatatagtgttgtggagggtgtgaagaaacaggtagatataaccactatggaaagcaatttggagatatacttagaaatgcagctaacacttgcacatgtatgtgaggatatatttactatgatgtttactgcaccattgttagccatagcaacaacaacctatgtgtccttcagtagggaccaattaaattaattctggtacattcatataatgcaatgctttatggctaaataaggaggcagccctatatttactgaataaaatcatcttccacaaaaaattaagtgaaaaatgcaaggtgtagaacagcaaataaaatatgctttcaagccagatttggtggcttgcacctgtaatcctagctactcaggtggctgatatggtggcttgcacctgtaatcctagctactcaggaggctgaggtggggggatggcttgagcccaggagtttgaggctgcagtgagccactccactctaggactccagcccaagcgacagagggatgtaccatctcaaaaaaaaaaaaaaaaaagggcggccgctc

SEQ ID NO: 560 - DNA, 1581 bp, Homo sapiens
  SITE (363): n equals a,t,g, or c
  SITE (1451): n equals a,t,g, or c
  SITE (1519): n equals a,t,g, or c
  SITE (1523): n equals a,t,g, or c
  SITE (1578): n equals a,t,g, or c
gcctgctgataagtgattccttaacttcctcgggagcagcagaaacttgttttgaaaaaaatcagattctaaatctttacagctgtttacttctgcaagcacaatggccgtagtaaggaattcaagtcacagcgcaccgtggcagggaaggctctgcatggagtcacaggacaaagcctgtcctggaaacgtgctggaaggaagtcggcctcattctttacgacgggcagcagctccaaatgagaaaccaaggggcttggctctgggtcagtagcatctgcctggcatgcggtgccagctgtggagaccagtgaggtggcagcagctgcactggggctcctggggtgtgcgtggggacctcangggtttaggagctgatatacttttggttctcatcatcttgtgtgttccttgcagacacagaatgttcagcttaacaaagaaatgacacttgccagcaaccggagcctggcagaaggaaaccttttgtaccagccccagctggacacgttgaaagcacgcttgacccagaaataccaggaactccaggttctctttgaagcctatcagataaagaagaccaaattaggtaactttttaagggtgatcattcgagaataaagagttgagagaaggacacattttcaagctattgccctaccaggaaagaaatattacggaaaaatttcaggttaagatagcgactctactgcaatgaacaaatagcttatgtatattatttatttatttttagagacagggtcttgctcygkcagactggagtgcagtggcgcaaccatggctcagcacgacctcytgggctcargtgatcctyctgtctcagcctyctgagtagctgggaccacaggtgtgcactaccccaagcaggctagtttttcattttttttgcagagaggttgtcttgctatgttgcccaggctggtcttgaactcaagccatcctcctgcctttgcctcacaaagtgctgctattacagacatgagccactgtattggactagtttatgtatggaatatggagggcccccagacctgcggcctctctgcacttgcggttcgagagggcagggtgtatagcaggactgccccctcctcccagtggccctgactggtggcggtgactgctgaggtcagcccaggtccacacgcacctccagggtctgcagtgtgaagcaggttgcagaaacgtgggtacctcggggcagttaccagaaaaggggctggagattaggaggaagccagccagtttagcagtcaccagtttagaagaggagacttaaccactttttaaattcaagaccccaccttctctaaacagcatagaaaaagctttctgaattatgatattaaacagatgtcttatgacgtttgcccgtttgtcttatgctgkttgttaatggtaaaaaaaaaaaaaaaaagggcgggccgctntagaggatccctcgagggggccccaagcttaccccgtgcatgccaacgcatacttttttccctatagngagncggattataagctaggcactggccgtcgttttacaacgtcgggacttggaaaacnggt

SEQ ID NO: 561 - DNA, 1226 bp, Homo sapiens
  SITE (234): n equals a,t,g, or c
  SITE (775): n equals a,t,g, or c
  SITE (863): n equals a,t,g, or c
tcgacccacgcgtccgctccctttgtcctgggaaacacctggacaaaagggagagtgacctcaccccaaccctgtcacaggtagccaggtagcaatgcctgctagaacttctggcaaacagtcccacatctgtgagaactcaggaagaaggtgcagcctactgttgcttgtaaagtgtctagagagaaggggtaggtcacctacaaagggaaccccatcaggctaacagtgaantttcagcaaaagccctacaagtcagaagagattggggggtctatattcagcattcttaaagaaaagaaattccaaccaagaatttcatatttggcaaaactaagcttcataagagaaggagaaataagatccttttaagacaagcaaatgctaagagtatttgttaccaccagacttgctttacaagatgtcttgaagggagtgctagatatagaaaggaaagactgtgttaccaaccatcacaaaaacacatttaagaacgtagactagtaatgctatwaagcagcaacacaatcaagtctgtgtgataaccagctaacaacatgatgatgaaatcagacctgcatataccaatattaaccttgaatgcaaacaggctgaaagccctaattaaaaggcacagaatgacagcttggattaagaagcaagatcgaactgtatcctctctacaggactcatctcacatgcaatgacactcataggctataagtaaagggatggagaaaaattgcccaagcaaatggaaaacagaaaaaaggangggttggcattctactttctgacaaaatagacgttaaaccaccatgatcagaaaacacaaagaaaggcattacgtaatggcaacaggnccaattcaacagagacttaattattctaaatatatatgtacccacccctggagcacccagactcataaacaagttcttacagacctatgaagagacttggatagccacacaatagtagtgagagagttcaacaacccactgacactattagaagatcatggggcagaaaactaacaaagatattcagaaccagagctcaacatttgaccaaacgggcctagtagacatctacagaactctctacccaaaacaacaagatatacattcttctcatctgcacatggcatgtactctaaaattgaccacacaattggccataagacgattctcagcaacttaaaaaaaaaaaaaaaaagggcggcc

SEQ ID NO: 562 - DNA, 3840 bp, Homo sapiens
ccacgcgtccgcggacggtgggtcttgtgattcagttgagaaattttgaagactaagtatttattctgttatcaccctggaaaaaaaatgacagaatttagctgttttttatttccattaaactaaatttgaatgacagtttaaacaaactatttgtatgggctgatgcctagggttttagtcaagtaatccagaggctgttactatttatttctgactctacataaacaatattgtactcttaactatgaaggatgacaaaggatttgctttccactgagcaagtgtcattaggaaagcttctatgatgaattatctcttgaaactatttactgtacctctgcctgccatatgctttttattttttttcagtcctgctccctctgtatgccacatgttttgaaagcaaatactgtgaattgcattcctcaactctgtccccaccacacacattctctcacatgcctttcaagtagcagtttaaccctttcttagcatcatcagtgtcatgagtggttttccagtggatttgtcttttaaaagtattcttgctgataataatagagtaacaatttattagtaattgtttctgtctttacattttggcacagttttagtacctgatacttactcgtttaatgaataattctgagaccctagtgggaatcaggcaccatgctagttacagtgtgagcaatagtctctgctctcaagaaagggttcagcctaagctggggtttagcggcaagtagttgcaagatacatgtgtgattctaacctgaggccaggctggataggagtattaaattcgggtcagagcatgaactgtaggaaactgctttagggtatgccagaaagctgaaggcagaagttctgttcgggaaaatctgctgctttctctccttaatgagaatgatgctggtttgttcatcaaccgggtaaggctgatgtttattaaaatgctcttaaataaaagcatatagtcccaagtgtccatcgatagatgaataaattgtggtatatattaggttggtgccaaagtaattgtggtttttgccatttttaatggcaaggtgttccattgtaataaagattaaatggaacagctttcagttagaaaagacatactgactcatgctacaatatggacaaaccttaaacacattaagttgaaagaaggcagacacaaaggccacatagtgtataatttcacttatatgaaatgtcagagtaagcagattcatagagacaaagcatagacgtggttgccatgggctggagggacaggaagacatgtaactgcttaatgggaacaaggtttttggggggtggtaaaaatgctctaaaattagataatgatgatggtacacaagtctgaatatactaaaaaccactcagttgtacacttatttaaaataatttatggtgtgtgaattctgactccatgtgagttcttccagaatgtagtaaacctgaatataaaaaagggcagtaactgacttggatactttaacatggttaaaaaggtggattttatggattatattttaccactatttgaaaaattttttaaagacaataactagaaagaattggatttctctttctactctggcaggaccaaaaaaaaaaatttgtaacaaaccagtaggttaatgtggttttgtttgtttcggttttggtcagcttcatttagcctatgatgggtcatggctttgaaacttttgtctagcacttagtcaggctgatgaggcaggatgacttataaaggtgggtgtaagaagagcccttggattacagagaactgtagtaggtaggagagatgctagacaattcactacttaatcgtcagtcttcattaatccctggggggagtagcctctatgtttcaggcagctctggacagttagtgtttgtgcacatacccagtgatttgttgatgagactctgtgggcaacaaccacagtcattgtatatgcaaccttgtgcctactggcctaatttgcttgttacctgaaactgtgtcgaaactaaagtttccagaaattgagtcgaaatgtttacaaaatgtgacatgacagtgctctctggcctgaatgtgcatttacttgccttagtttattctttatcttagtaatttacttcgtatggtttggtctctgataactttcacagattctggttaacacgagttactaaaatttgtgaaataatagatcacattgtgtttcttggtcacatttgaagtcagtcaaaacaatgtttgagaatgtgtctggctctttaatgccctatgcagcagaggactttgtaaaggatttcatttcaatcctaaatgacctgtgagaatctggtctcaggtaaaaatctagttacattttgagccactacctaatttaattatctttggatatacttgtttgcataaacatttaatatctgattgcataggtaatatgacattaccctctctatcccaattcctaccctctctcttgacacccagaagtttctgcagttggatttcctgtttcattgcaaggcagtattggagcctgcattcctagcagctgagaatagaaataacaaataattattattaatttaataattgttaatagtgtaaatagttcattgttcctacagactgcattttgagaactggtattcctaatgtatttcatatattaaaaatgaagtcaagcgttttagatttaggcaggtagcacttagagaaaggatctcacaatctctgctcctctttgcacaagtctagcaaaagtgaaactatgtttatagcttcagctttgatacaaacacttttctcaaacagattctagacccatgggaaaaggcttctttccttgtgctccttgagaacactgtgtaaagaacgtactaatgaaagaatctaaggtcaagaagaatgaatgcacctttaaaatgacaagttttatcttgttactctcctgctaaaaacagtctgttgcattctatgagatggtatggatggtgtccagatgcctcactaggccacactcagggtccttgaatagctgcagtttgccaggcttttctgcattgtcgtggtggtccttcccttgttgctgctgcctgagagatactgcctggttcttacagacacagattatgtcatccttgcagccttcacccaaagttgctccctccttctagggcattttgttttcctacttaataccaagtgtcagcatgttagtaataaacaggtgtctctaccattagtcaaaggtgggagttaagcctttcatctttgtagctttctccagtacctaaccatgatttacttcatgggaagtccctcaaagtactattaattatcctgtgttctcctgccttgcctcttaacaaaaattctgctgttcctgattatttccattttaccagtgttttgttccttttctatccaggcagcataattcgttgtatgaggcgcctggaagaattgcttcgacaaatgtgtcaagcagcaaaagccattggaaacactgagctggaaaataaatttgcagaaggaatcaccaaaatcaagagagatattgtgtttgctgccagcctctacttgtagagtcagctaaaggaatgtgagattttaaattattgaccacctgtttgattacagttgactacaaatgcctgcaagtgtggatttggttctcccatacattttaatatgtattatatttaaatcaaacatcattcatagaaagcatattacatacatgtttatacataagcattacatttttttaataaaaatgtatacaggtgggaaaaaaaaaaaaaaaaaaaaaaaaaaaa

SEQ ID NO: 563 - DNA, 2243 bp, Homo sapiens
cgcctgcaggtaccggtccggaattcccgggtcgacccacgcgtccggctttctgcccattcctagcattctggtgcaaaacgatctgggatggcacacgtttttaccctcacagttctccagcatctaaatatctgcagtaggttctcgctggacaaggacacgggactcatcatgctgattgccaggctggactatgagctcatccagcgcttcaccctgacgatcattgcccgggacgggggcggcgaggagaccacaggccgggtcaggatcaatgtgttggatgtcaacgacaacgtgcccaccttccagaaggatgcctacgtgggtgctctgcgggagaacgagccttctgtcacacagctggtgcggctccgggcaacagatgaagactcccctcccaacaaccagatcacctacagcattgtcagtgcatctgtctttggcagctacttcgacatcagcctgtacgagggctatggagtgatcagcgtcagtcgccccctggattatgaacagatatccaatgggctgatttatctgacggtcatggccatggatgctggcaacccccctctcaacagcaccgtccctgtcaccatcgaggtgtttgatgagaatgacaaccctcccaccttcagcaagcccgcctacttcgtctccgtggtggagaacatcatggcaggagccacggtgctgttcctgaatgccacagacctggaccgctcccgggagtacggccaggagtccatcatctactccttggaaggctccacccagtttcggatcaatgcccgctcaggggaaatcaccaccacgtctctgcttgaccgagagaccaagtctgaatacatcctcatcgttcgcgcagtggacgggggtgtgggccacaaccagaaaactggcatcgccaccgtaaacatcaccctcctggacatcaacgacaaccaccccacgtggaaggacgcaccctactacatcaacctggtggagatgacccctccagactctgacgtgaccacggtggtggctgttgacccagacctgggggagaatggcaccctggtgtacagcatccagccacccaacaagttctacagcctcaacagcaccacgggcaagatccgcaccacccacgccatgctggaccgggagaaccccgacccccatgaggccgagctgatgcgcaaaatcgtcgtctctgttactgactgtggcaggccccctctgaaagccaccagcagtgccacagtgtttgtgaacctcttggatctcaatgacaatgaccccacctttcagaacctgccttttgtggccgaggtgcttgaaggcatcccggcgggggtctccatctaccaagtggtggccatcgacctcgatgagggcctgaacggcctggtgtcctaccgcatgccggtgggcatgccccgcatggacttcctcatcaacagcagcagcggcgtggtggtcaccaccaccgagctggaccgcgagcgcatcgcggagtaccagctgcgggtggtggccagtgatgcaggcacgcccaccaagagctccaccagcacgctcaccatccatgtgctggatgtgaacgacgagacgcccaccttcttcccggccgtgtacaatgtgtctgtgtccgaggacgtgccacgcgagttccgggtggtctggctgaactgcacggacaacgacgtgggcctcaatgcagagctcagctacttcatcacaggtgctgccccggcctccgcccacctgtgcaggcctcctggggccctgcctccacccctcccagatggacagccagactaggtgggggcaggtgagggtggaaaagaggtcagggctctactgttgggctttagcctctggtggtgcctcccgaggatttgctcctggctcttcccaagggctttgcagctggatcactctggactggctccctggggacctcctgaacctgttggttgcagggacggggagcatctaccaaggttcattctagagggaggtaaggccccatgattcctagggaggagccctgagccccactccccgccccaagtctgggtgacagagcagtgacttggaggaatgtggcctcatccttccttggggacctgttgagaattcccacctgtttagaggcagatggttttgatctccctaaatgaaatggttttagctcaaaaaaaaaaaaaaaaaaaaaaaaaaaaaaaaaaaaaaaaaagggcggccgc

SEQ ID NO: 564 - DNA, 1635 bp, Homo sapiens
  SITE (1018): n equals a,t,g, or c
  SITE (1176): n equals a,t,g, or c
ccacgcgtccgccaagatggaatgttgagtatttgggatgttagacaaggtactatgcctgtatctctgctgaaggctcatgaagctgaaatgtgggaagttcactttcacccatccaacccagaacatctttttacctgctctgaagatggatccctctggcactgggatgcttccacagatgtacctgaaaagtcgtcactctttcaccaaggaggaagaagcagtacttttttgtctcatagcattagtaaccaagctaatgttcaccagtctgtcattagctcctggctcagcactgatcctgcaaaagaccgaattgaaatcacaagcttacttcccagtaggtctctgtctgtgaacactttggatgttttaggtccttgtcttgtttgtggaaccgatgcagaagcaatttatgttactagacatcttttttcgtagaagtactataattataagatttcagatagaacatgcaattagccttttgaaatccaacttctgtgcaaaattttagtatcagaaaatacgagatttgcaggggaaacatcagtaaactaccattaatgtcaatgcccagttttgacttttgttagcctgacactcccaaacagttgtagaatccgatagatgactgatggcaaaagattgtgaacatgtggaagaaaatcagtgggattctggtgctgatgaataggttgccttcagagtattattgacagacagcttgtggaactaattctttatttttgatgttgtgggaattaacacatcaatggtggttatgggaactaccaatgggttcctacaatttttatcagtagtatgtggcatatacaccttcctagtggcagttgccaatgttaatgattattctttttattgcaagtatttcctatgatccttccacactttatttccttaataataataaactttttcagaaagaattgagtagagcaaaaatgacaaagatgtgtagctgtgttcaattttttttttttttttttttttngaggcagagtcttgctctgctggagtgcggtggtgcaatctcggctcactgcaacctccacctcccaggttcaagcaattctcctgcctcagtctcctgagtagctggaactacaggtgtgcgccaccacgcccagctaatttttgtaattttagtanagacagagtttcaccatgttggccaggatggtctcgatctcttgacctcatgatccacccgcctcgacctcccaaagtgctgtgattacaggtgtgagccacttcactccagcctgggcaaaagagcgaaacgccatctcaaaaaatatacatatataaggagataaagtttcccattttccaatacagtttcacatttgaacagccctaattgatacaactttatggcagggttttagtgtgtgagtgggatccaaaacactcaatcctgtaaaagggtacagtcctattgtatgttaacacactgatgatgtgagcctgtgagatgagccaatcaccagttgttatgttcgaatctgctttgtgttgggacgctttaatgtcagggtttcactaaataaatgaattttcatatactgaaaaaaaaaaaaaaaaaaaaaaaaaaaaaaaaaaaaaaaa

SEQ ID NO: 565 - DNA, 1533 bp, Homo sapiens
  SITE (775): n equals a,t,g, or c
tcgacccacgcgtccgggctttctccaaggatgaacctgcttattagagcttggcctgtgatttcttacatttcttatagtttaatggttaagagtgtgggctgtgtaccaggttgcctgggttcaaatcccagctctgacacttaaaggttaagtggcctagacataacttccatgcacctaacctacctgaagagttgctaagcagattagatggattaatacatctgaagagcttagagtggtgcctggcacatgacgaacactccatcaactagtcatggattagtcgttcttttcctgccttcctctctagccttgctgctcaagagccatagactaagaatgagaagggctgttaaagacacctctagtgcagccttttaaatttaccgataagaaatcagaggcctgaagagaagtgagttgcytgaaagcccacagcaagtcagtgacaggccaagaccagatccaggctgcctgactccagtttcttcctcgggcccccatgacctttccaggcgccatgtatgtttctccctggtctcagggtgagggtagaagataacctttctgaaagaggccacgtccctggcctcccagtgaagcactaggtgaagccaggccaaaaagaaagcacttctctggagacagtttccaggaggagatttttactttcgagaagagctttattatttttgtgaaaataatacatgcgcatacttaaaagattcaagccattygggaaagtacaacgaaaacagcaaaagtcccntttgattctaccactgggattcagccactgttatatgttggtaaacatccatctggacatcttgtacatatatgtagacattttatttctttaattatctttcttattgtgtttgatttgtcragcaaagttcattttctggctctaggtaagcattccaaatagtgaaactcaaatagtgaagctgaaagtggggcagccttcatattggagaagtggccagccgtgcctaacgggctgtcagagatgatctcatagcatcagactgggctcaggcctcgggcacagagaggtcctcccctcccccagtctggccacagagcctttaaaatccagagaatcagggctgcagccctgccaggggtttggagaaccttccaacaccttcattttatagatgagcaaactaaggccctgagaagtgtccttcgctcttaacctagactttgtacatggtctcgttccccgctttaatagaggaattgctttatgtcgtaggactggaccttgctgcctttgggttggttcctggagaagcaggaataaccacctgccctcctgcccggaggcctttcttcccaggtgactcacaatgccaccctggggtggggctcacggtcaacctgataagggactgataatgaaatttctgtaccaactggctccacacaggggaaagatgttttctgggtaagtctggtcagaagaggttgatggggggaaaacaaaacagccaaaaaaaaaaaaaaagggcggcc

SEQ ID NO: 566 - DNA, 2185 bp, Homo sapiens
  SITE (774): n equals a,t,g, or c
gaaaacaacaaagcagggtatctgtcaattgatctgtagacccatttcctcatcacaccccaaatctgttatgtggtggctatgcatttctggatctgaggcatttgtgtagttagttttaaggtatgtttatttattattttattactgtgaacagattgcagtgtgtgtatgtgtggtgtgtgtctgtgtcttctgcctagaacaataacctcctttcctttctcccacatcactgcacttttggctgccgctgtggtttgttgcaaatctgagctcattaatcccacagagtattaaacaatatctggtctcggtggctctgtcattccactgcaggcgtcccaccttcatttgccagctgggatctcttaatgagctagctgtgcacagttcaatagtaaaamccttttagctggtgaaatatgtttgaagaactcactgttggagtgttccatgtgaggcctgcttccactcytgctggcattcycttttcaggatggctgcagctcctccaagttactgttttgttgccttccctccacgtgctaaggatggtctggtggtatttgggaaaaattcagcccggcccagagatgaagtgcaagaggttgtgtatttctcggctgctgatcacgaaccggagagcaaggttgaggtaagccgwgcattgcagtctcgcgagtcacactctcttttctctggctttgccgctagcacaaccctaacttcttgcttggaagcttgctcacaagtcagagctatcatgtcagntctgctgattcctgtytccatgcaggtttgctcatagccttgaaaacaaggtcatgggagagctctatgctcactgctatggccattgttttataattaagtgaaatatgtacatagttctgaaatcaaatctaaaaaacaagatttattcatagaagtctaacttgtatccttgtcccctttactccatgatcttttcccctataggtaatcatgttttggaagatcttggtttatccttccatttgcaaaattacacatatatatgtaacaaatcacacacacatgtgcatattcatcctggtccctttcctcctttcttcgattaacagcagcatgccatatatacttttctctactttgcattttttttcatttttatttttttattttcttcaatcagctttctcaggttgaatctctactttgtatttttcaactcaaaacatattctggagatcactccctacggtacatgcaggtcataattcctcatttagagctgcatggtgtttcattctatggatgtatcatagttaaccagccccatattactgctggacatttggattgttttcagtctattgctattacaaacagcactgaagtggataacagccttatgcatctgtcatagtgtctggtctcagtttatatatttttatcataataaaacattatccattaattcttatttcaaatcttttaaaaatactatttttgtcagtatttctttgggatagatgcctagaaatgaaattgctgggtcacaaggtaaataaaaatgtaattttattaaatattatcaaatttccttccataggtggtgtaccgttttgcattcccatcagcactgtatgacaatgcccatttcttcatattcccagaatgtgttgtcaaactttcacgatggctattttatgttaattatactttctgccattttactaaattcttttattggttgtgtcagcttttatcattgcttttcttggggttttcaggtatatttttatatcacttgcacatagagattgtttagttgttgttctgtctttaattgttttcttgtttgattgctttggcttatagctcgggttttatgttaagtagtagtggagatagtggrtgtccttggctctgcacctgacctgagtggggctgtctctagtgcttccctattaagtaagctgctggttttgggattgagatttatatagttttatgtgccactgcacctggcttatgataaaaagtatacatcagtcaggtacagtgacacatgcctgtagtcccagctaccctggaggctgaggtgagaggatcacgtgagcccaggaagttgagaccagcctggacaacatggtgagaccccatctctttaaaaaaaaaaaaaaaaaagggcggccgc

SEQ ID NO: 567 - DNA, 1119 bp, Homo sapiens
ccacgcgtccggcaaaatgtggcatctgttagtttttattgtctgtgtcttctttgtttactataccttgggtaattttgtgttaccaaaaaaaaaaaaaaaaggaagtgtaatgtcagacacacaagaaaagcaaatcagtgttgtaagcttaaagtacaatttcaaaggtcattaccaacagcagggttttttttatactttaaaaacattatgctacatatcattgccattttcatattttggggttttgctactcttatacaatggaatcaatggaaatgtcatccagccactgaattgccattattatatctaaaaagtttctaagatgacagttatcactattttgttttatctccatgctgacatttgaaagaaggtactagtatccctctagccagattgcttagtttttcgttggtaatcaaacaacagttgtactaaaggaaagtaaagctaggacctaaatcagaatcatagttgcctgcatatatggtaacaaggtcgtgtgcatttgctttcacagtgatgagtgagaggatgagaagaaattatttgacatttttctgtggttgaatagaagacacctttcttttgtctttaggtttaggaggagatactaagatactggatgtttatcctatcttagtttggttggagtaataagagagaagaagagggtggactttggcttttcagtgttttttcccctaaagagtgatattgctgacgtttctatcaattttacacataatatgtggctatgaaaccatatatctcacttaagtaacaaagtaatcactttgtctatcactaagtaatagacaaaaatcattgtctattatttaaagccaacaaaacagtgtaacagttttaagttcaataatgttaagtattgtatagaaatatattggaggcaaagttcagttgatgacaattgtgtatatgttactgatgctgtaaattatttttaataaagaaaattgtattatcaaaaaaaaaaaaaaaaaaaaaaaaaaaaaaaaaaaaaaaaaaaaaaaaaaaaaaaaaaaaaaaaaaaaaaaaaaaaaaaaaaaaaaaaaaaaaaaaaaaaaaaaaaaaaaaaaaaaaaaaaaa

SEQ ID NO: 568 - DNA, 2608 bp, Homo sapiens
  SITE (2525): n equals a,t,g, or c
tttttttttttttttttgaagatcagaatgatttttatcttatctggttccagagtggtgatggagacaaaaatcaattacagacagaattcctgaaatgtaaattgtttttaatatatttaagagcacacagaagtcttgatttataaaaaaataaatatataacatgacaaatttactgatgatcctggagctctgaggtcaaactctttaaatgatcagtgaaaacataaaacatccatgatctgttaacacacacaggagcatattccagttgtaaaaaacaaattccttgaaggctcagaacgaacaaaaatcagtctttatggcagaaagcacatccaaagctaggcaatgaagttcagcctgggccacgtgaacctttcaccagccagcctataacctatggagccaggacaggaaagcatgatccttcagctcatgacgccacccaggcttccagacaactgcagaatgaaagagtccctcagaggctccccagcccctgctgccatcataaagcacgggagggattgttttgtccttagcggctctgtcctaaatttgagagcaggagactgagaaggttatgctcattaaatattgtcattgtaacacggaatggaaatcatgatccttgcccatgggcactgagctgaaagaaagaggaacctcacatgaggctttcctagagaccaggatgttgggtgagtgggcgtgcacttctcaagtgggcaaggaagaactgcttttctccagctgacatgctctcaggggtgaagaagtttagcttaaaatacctgatggcgctgcataaactggggatttgggaactgagtttttagctctgtgacacacaacataaaaaacaaaaatccagtctcattagctaaattcggattaaaatctgaaatgtttttatggagttgccaacaggctggaatgtacctgatacartttaatctgcttttatttctttggctgtcttccaaaccactttcttcctgtaattcttaagttggctagttctccttcctcagaaaaattacccctaagaatcttcctaatagtgagggtgtacttccgaatagaagagtccttcggctgaaatggcatctccaaggcctacagttcgaatggggtctttacacaccaatactggtgtgaagtggaaggatattccctctctgtgccattctactactggcttgtttgggtttaatacaatcctggagcctgcctccgaatgggaagtcatgaactcttggggtgccctcagagacactcggctggtgtctatggtttctgtggcgcaggcctgtgtcccagccacacgagctcctgcagccacggctgccagctggttggcccagtgtccatccacagttgccaggatgtggtagaccagcgtgtggaaatggatcctggtgagatccgaggctctgcttttactcctcccatgttctttcaagatccagaagaggatgtcactgaccatgcccacatcaggaacaccgttccaggaagagagagaagagtgaggtccagaggctgactgggtgagaaataacagctcctgttcattcagcccaagggaagtcaccgcgggaaagacctgctgatggacaatgctgctcatgagctccctgttagtcatactggccagctctaggtgaactggaataccagtggggatgtcagaaatggaggttacaacctccaagagtctcttcctctggagctccttgctttgtccctccatcatgtgcaatccagagaggaccaccaggtctggctgaaactcctccaggctagacacaaacacctccagcatattcatggccccgttggagaggtcgtgagagaagatgaatcggttggcatggggagcttttaactggccccactcctcccctgcttgatactctaaaatgaggtggaactcatccacttcctgcaatgactctggtggaacaaagacattgtcatcaagaagctcatgtagctttggaccaactggaccgcaaagaagaacctttaaatctgagttggctgcaaatttctgtccaattaaagctgcatttcctcctacatagtgctgggctcctgggaactctgacgcaacctgggcaatgtcgtgaaaagtttccttatcactgaagaagcgctcagcagctgctcccttccccatgaagtgaatgaaggcttcttccagatcattccttgaatgcagaatgctgtgatctttcccattcccaggactaaggccaagtgcctgcaagagcttcacccctgagagcaccacatcaacacatgcattgactcccactgccacgcggcgccagcgccggactggccgcacgataagcgcgtcccagctgccgccaaccggccctcgggggagacgggtcccgggggcgcaggcgcgggccccagacacagcgagctccagagagagcgcagcgccgagcctggcagctctggctccagcaggaagacgcagcccacggccagcgccaggaagnccgcgtacgcggagccgcgccacagcgccatggggacccaggcgccgcacctgcgcgaaccaactcctttcctagcccgcgcc

SEQ ID NO: 569 - DNA, 2322 bp, Homo sapiens
  SITE (135): n equals a,t,g, or c
  SITE (168): n equals a,t,g, or c
gcggacagcgggcggcatgaaccgccccactttgccggatacctggagctgcaggaacgacccacacccaggcctctttacccctaccgccccgttaccttggggacgggatcacccgacccggcgccgtgcgantgcgcgggctgaaggcgggggcggtgccatgangcgcctcgggggcrtacctcgggcgcgcaccgctctcttacactcgggcctcagaagtccgtgccagtgaccggaggcggcggcggcgagcggttccttgtgggctagaagaatcctgcaaaaatgtctctctatccatctctcgaagacttgaaggtagacaaagtaattcaggctcaaactgctttttctgcaaaccctgccaatccagcaattttgtcagaagcttctgctcctatccctcacgatggaaatctctatcccagactgtatccagagctctctcaatacatggggctgagtttaaatgaagaagaaatacgtgcaaatgtggccgtggtttctggtgcaccacttcaggggcagttggtagcaagaccttccagtataaactatatggtggctcctgtaactggtaatgatgttggaattcgtagagcagaaattaagcaagggattcgtgaagtcattttgtgtaaggatcaagatggaaaaattggactcaggcttaaatcaatagataatggtatatttgttcagctagtccaggctaattctccagcctcattggttggtctgagatttggggaccaagtacttcagatcaatggtgaaaactgtgcaggatggagctctgataaagcgcacaaggtgctcaaacaggcttttggagagaagattaccatgaccattcgtgacaggccctttgaacggacgattaccatgcataaggatagcactggacatgttggttttatctttaaaaatggaaaaataacatccatagtgaaagatagctctgcagccagaaatggtcttctcacggaacataacatctgtgaaatcaatggacagaatgtcattggattgaaggactctcaaattgcagacatactgtcaacatctgggactgtagttactattacaatcatgcctgcttttatctttgaacatattattaagcggatggcaccaagcattatgaaaagcctaatggaccacaccattcctgaggtttaaaattcacggcaccatggaaatgtagctgaacgtctccagtttccttctttggcaacttctgtattatgcacgtgaagccttcccggagccagcgagcatatgctgcatgaggacctttctatcttacattatggctgggaatcttactctttcatctgataccttgttcagatttcaaaatagttgtagccttatcctggttttacagatgtgaaactttcaagagatttactgactttcctagaatagtttctctactggaaacctgatgcttttataagccattgtgattaggatgactgttacaggcttagctttgtgtgaaaaccagtcacctttctcctaggtaatgagtagtgctgttcatattactttagttctatagcatacttgcatctttaacatgctatcatagtacatttagaatgattgcctttgattttttttttaaattctgtgtgtgtgtgtgtaaaatgccaattaagaacactggtttcattccatgtaagcattaaacagtgtatgtaggtttcaagagattgtgatgattcttaaattttaactaccttcacttaatatgcttgaactgtcgccttaactatgttaagcatctagactaaaagccaaaatataattattgctgcctttctaaaaacccaaaatgtagttctctattaacctgaaatgtacactagcccagaacagtttaatggtacttactgagctatagcatagctgcttagttgtttttgagattttttagtcaacacataatggaaacttctttcttctaaaagttgccagtgccacttttaagaagtgaatcactatatgtgatgtaaaagttattacactaaacaggataaacttttgactccccttttgttcatttgtggattaagtggtataatacttaattttggcatttgactcttaagattatgtaacctagctactttgggatggtcttagaatatttttctgataacttgttccttttcctgactcctccttgcaaacaaaatgatagttgacactttatcctgatttttttcttctttttggtttatgtctattctaattaaatatgtataaataaagttaaaaaaaaaaaaaaaaaaaaaagggcgkcct

SEQ ID NO: 570 - DNA, 1371 bp, Homo sapiens
ccacgcgtccgctggtctcgaactcctgacctcaggtgatcctcccgccttggcctctgaaagtactgggattacaggcatgagccaccatgcctggcgttttttttttttttgtttttttttttaatagttattttggttgtgccttggtatcacagtgtagttttaatttgcatttttaatagatatttaaattgagcaccttttcttggtttattggctactcagacagcctcttttatgaagacatccaaatatattctacgtttgagtcttttgtccatttttctgttgggctgtcttttttttgtttaataggaattctttatgtaatctgtcaggtagtattttatctccccagattatatttttagtttttaaatgatgtcttctgatatacagaagttcatgatgttataattgaatatgtaacttttttctctttctgtatcctgttcaagaaatagttgtctactccaaggtcatgcagatgtttttttctaaatgctttattgtcttgtcttttattttttatatctatggtctatttggtatggcttcgtgtgtgtggtgtgaggtaagggattgagattcttttttttccattgggatatctgattgacccagcatcattttctaaaagatgcctttcctcattgcactgcggcgcctcctgtgtgcttttgacagggatgacagggatgaggatgataaagaataggcatagcgtgtctttctcttgtgagacacagggattccaactcctattctcaatcttaaaaagaagttatttttcctcctccaagtgggaattttactagtgcttctgcttccaggataccaagggttcgagttttggaggatgaagaggggtcgaaggacattgaattgtcagatgacccttatgactgcatacgactaagtgtggagaatgtcccctgcattgtcactctgtgcaagattggctatcggcatgtggtggatgctactcttcaggaaggaggcctgctcgctggccaagcttgctggtgtcggtgaccagcaagggagttgtgacgtgcatgaggaaagtggggaagggcagcctggacccagagagcatcttcgagatgatggagactggcaagcgtgtgggcaaggtactgcatgcctccttgcagagtgttctgcacaaggaagaaagcctggggcccaagagacagaaagttggattcctgggatgatttgcacatcaactgctcaactgtggattgttttttacttttccttttaaaccggttcgtatatatttttcttcgctgttacgaatttacagcagcatttgtacatgtaaaattaaaggctattttctggtaaaaaaaaaaaaaaaaa

SEQ ID NO: 571 - DNA, 4115 bp, Homo sapiens
gcctgcaggaaccggtccggaattcccgggtcgacccacgcgtccggcgcagacgaggcctgaggcggcggcgcgaggcagtatggtttgaagtggtgaacatggatttttctcggcttcacatgtacagtcctccccagtgtgtgccggagaacacgggctacacgtatgcgctcagttccagctattcttcagatgctctggattttgagacggagcacaaattggaccctgtatttgattctccacggatgtcccgccgtagtttgcgcctggccacgacagcatgcaccctgggggatggtgaggctgtgggtgccgacagcggcaccagcagcgctgtctccctgaagaaccgagcggccagaacaacaaaacagcgcagaagcacaaacaaatcagcttttagtatcaaccacgtgtcaaggcaggtcacgtcctctggcgtcagctacggcggcactgtcagcctgcaggatgctgtgactcgacggcctcctgtattggacgagtcttggattcgtgaacagaccacagtggaccacttctggggtcttgatgatgatggtgatcttaaaggtggaaataaagctgccattcagggaaacggggatgtgggagccgccgccgccaccgcgcacaacggcttctcctgcagcaactgcagcatgctgtccgagcgcaaggacgtgctcacggcgcaccccgcggcccccgggcccgtgtcgagagtttattctagggacaggaatcaaaaatgttacttcttgctgcagattctgcgcaggatcggagctgtgggccaggctgtgtccaggacggcgtggtcggccctttggctggccgtggttgctccagggaaggcagcctctggagtgttctggtggctggggattggatggtaccagtttgttactttgatttcttggctgaatgtgtttcttcttaccaggtgccttcgaaacatctgcaagtttttagtcttgctcatcccactcttccttttactaggtctctccttacggggccagggcaatttcttttcgwtcttgcccgtgttgaactgggcaagcatgcatagaacacagcgggtggatgacccccaggacgtgtttaaacccacgacttctcgcctgaagcagcctctgcagggtgacagtgaggcttttccgtggcattggatgagtggcgtggagcagcaggtggcctctctgtctggacagtgccaccaccatggtgagaatctccgagagctgaccactttgctacagaagctgcaggctcgggtggaccagatggaaggcggcgctgccgggccgtcagcttcggtcagagacgctgtgggacagcccccgagggagactgactttatggcctttcaccaagaacatgaagtgcgtatgtcacacttggaagatattctgggaaaactgagagaaaaatctgaggccatccagaaggaactagaacagaccaagcaaaaaacaatcagtgcggttggtgagcagctcctgcccacagtcgagcacctccagctggagctggatcagctaaagtcagagctgtccagctggcgacacgtgaagaccggctgtgagacagtggatgccgtacaagaaagagtggacgtgcaagtcagagaaatggtgaaactcctgttttccgaagatcagcaaggcggttctctggaacagctgctgcagaggttctcatcacagtttgtgagcaaaggcgacttgcagacgatgctgcgagacctgcagctgcagatcctgcggaacgtcacccaccacgtttccgtgaccaagcagctcccaacctcagaagccgtggtgtctgctgtgagcgaggcgggggcgtctggaataacagaggcgcaagcacgtgccatcgtgaacagcgccttgaagctgtattcccaagataagaccgggatggtggactttgctctggaatctggtggtggcagcatcttgagtactcgctgttctgaaacttacgaaaccaaaacggcgctgatgagtctgtttgggatcccgctgtggtacttctcgcagtccccgcgcgtggtcatccagcctgacatttaccccggtaactgctgggcatttaaaggctcccaggggtacctggtggtgaggctctccatgatgatccacccagccgccttcactctggagcacatccctaagacgctgtcgccaacaggcaacatcagcagcgcccccaaggacttcgccgtctatggattagaaaatgagtatcaggaagaagggcagcttctgggacagttcacgtatgatcaggatggggagtcgctccagatgttccaggccctgaaaagacccgacgacacagctttccaaatagtggaacttcggattttttctaactggggccatcctgagtatacctgtctgtatcggttcagagttcatggcgaacctgtcaagtgaagacactactcattatttttgtacatttttgtatatactgggacagcgtgaaacactggaatccttcatggacgagggcatatacaatgatgggacagtgccacactccttcaataaacgtggctgctggccagaggacgtgagcgtgtgacgggcgccttggcgccacctgttgggtgctcactgcctctgcaggtgcagaggggtcagcagcaggagaagcgtgttgaacacgtggctctcagacactccttgtttttaacgggaagctctttgcatttgcatttcctcaacaaaggagcaaagcagaggaagctgagagtctggcgtgttcttgacgctttggtcttcagccttgcactggctcttctaaaggacttttggagggcagataatttcatctgttaaatccaacacacatttctttcagggaaaaacaatgtcaccaaattttcagagttctaaactcctttccttcaagccggaattttccttttttcagcaccagtaggtactaagtctccagatggggaaataactaaaatgtgtttttctgctttgttcgctcttacttctgaggaaggtttccagtcaggactcgctgtaccaatatccatggaggaatatgggagcgtttcgctctccttgtaggctgaagtcagtctgacttgaaggggcctggtttggatctaagcaaacacccagatggggttctctggtctcagcaaggcttttcctgttgggagtcacagtaaacagaaacccaaaaatctcatcttgggtgttttcagggcttgttttgagttttgctgaatagggagcgcaagacgccctgagcctccctctcactggtggtgataagaggagccgtctggtgtgtcagggtcacgaacccgttacatttcaggacgatcctttttccttcagcagcatttcttactggctgtggctggaatctgccttttatcacagctgtcaccattctcacgtgattcttgtgagactctttttggttataattactatttaatatttagactattttactgagcagactttataaatgagatatctacaaggcacttaaagtgttacagatgttttaccttaagaattatttaagttgtgttgggttaagacagttttcagtgtaccgtaaatgttgtgttttcagaaaaagacaaaacgatggtgctgactggttttctgtatattgcacaacagtcctcaaatacactgatgtatgaaactattcatacatcaagcagcatttttttcactctccttagaattggaactatgcagttaaggcagataaaatgtacagatgtttcatatattacaggttacatatataaatcaaaatttcctatataaaactgatttgggatttggggtggaaatattttgaatattaatttatttttaaagatgcaagataggactttgtgcaatgtatttttgtaaatgcttttcaaaatatctgtctttggtagtgcttctgctgctgccaccaaattgataagatgctattaagaggtttaaataaagagttttaatttttaaaagggaaaaaaaaaaaaaaaaaaaaaaaaaagggcggccgctctagaggatccctcgaggggcccaagcttacgggtgcattcaacgactaag

SEQ ID NO: 572 - DNA, 2251 bp, Homo sapiens
acgcgtccgcggacctggtataactcagaggaattgggcaatgtctagcaaaattaaatatgcatatacctttaattaagcaatcacacttttgggaatatatcccaaaggcaaatttgcaaaaaatataaaagaacatatctgtaaagtcattctttgtgcctttatttgtaatagcaaaagattggaaagaacacaaatggccatctctatggaaaaaacactcaaagtgctttttctgttctctcacccagcaacaatcaacacagtagacttctgtgaaatgtgtggggttttttccccagacaccaagcaagtgttaacctgaaataatcgaaagaatcagagtctagctttattcaagtgaaaagctgagaatggccatctgggaaacacaaactccagagaaatggagtctgtgctcccaaattaaaagttaagttcttgcttatacaggcagaaaacaaatgtattagggttatagcattttctatgcaaggctggtttatgagttataacaatctaatgagttacagcttgctttcatttccttttcaatttaaaagagtgtttttaacatttcatcttagacatgatagtctgtgtatgaaaaaagtaaaagggcagttaatctacagtgaagagagaatggggctgcctaggtgccctttaatcatttacaacattttataaaactatgtgggtaagagagaaggcaaatctaatcagagaaacagtggttacagttccctgttacgtgactgaggtcctataatcacattcctttaaggctcaaaatgttttgaagttccaacagcttagattttgaattacttattttcacacaatcagttctccagcagacagtagctgagtatcctctaattcagttcaattctgacactgcctggagacagtgtgagatctcacaggttgagggatcccacttctgatgccatttgcaaaccccaggttagtttgcctgtgcttctgactgaccggctataaactggggatcccacaaccccctccttggattcgattaatttactaaagcagctcacagaactcagggaagcatgtttactagcgtattataaaggacataacaaaggatacagaggaagagatgcatggggtgaggtatgggggaaggatagagcttccatgtcatttctaggtgagccacactccaggaaacttcatgtcttcagctatctggaagcttcccaaaccctgtccttttgggtttttatggaggcttcattacataggcatgattgattaattggccattggtgatcaacttaaccttcagccgctctccctatctggatctttctaatcatgccttgatctttctgcatgaccagcccacatcctgaagctacctacaggctgccagccatcagtcaactcattagaaagacatcactttagagagtccaaggattttaagagctgtatatcaggaaatgggtcaaagaccaaatatgtattttgtaatattacatcatcagtaaagcagttctgtgcaaccttaaaaaggagaataaagatgatctttatgtggtaatgtggtatgattttcaagaatattattaagaaaacaagatagcacttaatatgtagcacatgatatataggtttatagcataaactatataaaagcactgctaccttttatataagaagaagagacatgcatataatctaaatgttttcatataattttgaaaagaaacactggaagaataaatcaaaagcaaatatagttaccttttcggcagaggaaagggattagaagtgagactttgaattttcattttattttatttatatattttttcgagacagggtctggctctgtcacccaggctagagtgagggcagtggcacagtctctgcagcatctgcctcctggcctcaagccatcctcctacttcagcctcccaagtagctaggactacaggtgcacaccaccacgcctggctaatttttgtagagatggggttttgccatgttgtccaggctggtctcaaactcctggactcaagaaatccaccctcctcagtctcccaaagtgctgggattataggtgtgagacaccatacccagacagaatatgtttttaaaatatttttgactttggaatcatccacatatttagcccttcaaagaaaagtaagtcaaaaacgtgaaaagcatattgagattttttaacttactagctgcaaaaaaaaaaaaaaaa

SEQ ID NO: 573 - DNA, 1011 bp, Homo sapiens
  SITE (682): n equals a,t,g, or c
gcggccgcccttttttttttttttttgccatcatcaacacttatttaaaaagtactttaaaatcattcattttctgaaaatgcttttcattattttccagggtccataaaaagcatagcacggggacgaaaagcttttctaagccagcagtgtttggtgaacactaacaatcccactggcataaagttaaagttttatttccttttttcttttcttcttaaaataaaattaaggctcaaatgttctattaagctctcattgcttatgtatattatattaaggcttataaatgcacctggtaaattaaattcaccctggattgaattaacacctgctatatgagtwatttgctttatgtaatcagtaatcycaaggtttckcctctttctctggaaacacaatttaaatattaacctaatctttaaactgcggctgcttctttctgacatttggaaactggtcatccatacaaaaaaggcaaatatggatatattaatgaaaaggcagcttctcaaaaatcttaaagtatgtaactcaatgaattgggaaggaaaatgataaaagtagcaggaaagtcaagtctttgtgtcactttmtagggaaaacaatgctggtcatctgccaacaacacctccagtctgagagcctggctgaagttgactgccaattgccaaagagtctntgggttttcttcatttgaatctctggaagaaccttgggaagctgccatgcgtgcaagagaattttaattttaaaaaatgcagtaaggtataacttaagttccagggatgataaatcctgcagaaagacccatgagggtgtgtggtgcacttggcctgatccggtcccaacgtgcagccagggagagggactacgggcctcctcaagtcctgctcagctgacagcctctggagaatacgaagctttcaaagtgctggtcctcggctttttctctgatgcgttgttcctctaaggaatcgacgagtttgtccctttgctcctcgtgccgaa

SEQ ID NO: 574 - DNA, 1646 bp, Homo sapiens
ccacgcgtccgcacactgatgccagaggtgggctgccatggccttggatagctccacccttgtggctttgctgggtacagccccactcctggctgctttcacagctggcgttgagtgtctgtggcttttccaggcacttagtgcaagctgtccgtggatcgaccattctggggtctggaggacggtggccctcttctcacagctccactaggtgctgcccctgtggggactctgtggtaagtgtgagtcgattgactctctttcctttataaattacccagtctcgggtgtgtctttgttagcagtgtgagaacagactcatacagtaaattggtactgagagtggccccggacaaccactgatcttctttcagtcactgcagattattttgaatttttaagagatagaaatggaataatacagtgtgtccttttttcgtctgacttttttctctcagtataaatattttgagatttatccaagttgtaggtattcatagtttatttctttttattgagagtagtatttggttgagatatatagtatagctcaactatgtatcttttggattcattcatctgttgatagacatttgggttgtttacaatttttggttgtgatacataaatgtgctataaaaattcatataaaagtctttgcaaagacttagtctttcattctcttagacacatctcttagataaatccagaggtggaatggctgaaacatatggtaggcacatgttttatatatgtatgcttgtatgtatgtatgtatgtttcagtcaccaggccggagtgcagtggcgcgatcatagctcactgcagcctcaagctcctgtgttcaagccatcctcctgcctcagtctcccaaagtgctgacattacattcatgagccaccgtgcccagctccatgtaattaattcctgctgtgaacttgcttagcacaagcccatcagttttgtgctattatagttttggaaattcagtccaatgctatgaactcaaaattattagaaactatatacttgtcagagtttttttcattctttccattctttccatgaactgccctgaagacataacacttgacgattgtaagtgcttgcaagtaactttcagaaaggcattggaataaagcaattgctatgaacaccaaggcttaaaatggctatggcaatgcagttgacaaggaaatttggttattcgtgaaccataattatgactgatagcatttatatgaagacataggtttctaggaactttatacaattttggaacatctattaataacacatccatataactgtcactcgaaggctaaacatcattccatgttttgacagtgcttcccatataatttaaaatattcgataagcccatgttggcttaatctctttgttttacagttccttttagaagttccagggctttctggaatgtcctaaagttaatttcggtcaaaagttttttgaaaagtttgtcaaatatccaaggtttaaattacatagctactcagggaggctgaggcaggagaattgcttgaacccaggagttggaggttgcagtgggccgagatcgcgccactgcactccagcctggcgacggagtgagacttcatctcaaagaaaaaaaaaaaaaaagg

SEQ ID NO: 575 - DNA, 2729 bp, Homo sapiens
gttctagatcgcgagcggcctcccaaagtgctggaattatagatgtgagccgcccaccatgcccggctggtggggtgccttaggatcgggccttctaactctgtccctacctctctccagatgccacagggcccagtgggctccgggtcctgccccagggctacggctggaacctgctgtatggctccctgctgctgggccttgtgggtggggtctgcaccctgggagccggcctctatgcccgggcctcattcctcacattcctgctggtctctggctccctggcctctgtgctcatcaattttgtgggtgtggggccgaaggacatccgcttgactcctaagcctggccccaatggctcctccctgccgccccggtttggccacttcaccggcttcaacagcagtaccctgaaagacaacttgggcgctggctatgctgaagactacaccacgggaaccgtgatgaattttgccagcgtctttgctgtcctctttaacggctgtacaggcatcatggctggggccaacatgtcaggaccctgctgcaggaagactatgggttcttccgcgccatcagcctgtggcccccactggtgttgatcggaatctatgccacagcgctctcagcgtccatgagctcgctcattggtgcctcccgcatcctccatgccctggcccgggatgacctctttggcgtgatcttgtcaccggccaaggttgtgtcccgagggggaaacccctgggcagctgtactttattcttggggcctggtgcagctggtgctcctggctgggaactgaacacactggctgctgtggtcactgtcttctacctggtggcctatgctgccgtggactgtcctgcctgagcctggagtgggcctcggcccccaacttccgccccaccttcagcctgttctcctggcacacctgcctgctgggggtggcctcctgcctgctcatgatgtcctcatcagtcctggcgcggctggtggctccctgctcctcatgggtctgctggctgccctgctcaccgcgcgaggaggccccagtagctggggctatgtcagccaggccttgcttttccaccaggtgcgtaagtatctgcttcggctggacgtccggaaggatcacgtgaagttctggcggccccagctgctgctcctggtggggaacccccggggcgccctgcctctgctgcggttggccaaccagcttaagaagggggggctgtatgtgctgggccacgtcaccctgggagacctcgactccctgccctcggaccctgtacagcccaagtatggggcatggctcagcctggtggaccgtgcccaggtgaaggcttttgtggatctaaccctctcaccctccgtgcgccagggggctcagcatctgctgcgaatctccggcctcggcggcatgaagcccaacacgttggtcctaggtttctacgatgacgctccaccgcaggaccatttcctgacggacccggctttctctgagcctgcagacagcaccagggagggcagttccccagctctgagcaccctgttccctcctccccgggctcctgggagcccccgggccctcaatccccaggactatgtggccacggtggccgacgccctcaagatgaacaagaatgtggtgctggcccgggccagcggggccttgccccctgagcggctgagccgggggtctgggggcacctctcagctgcaccatgtggacgtgtggcccctcaacctgctgcggccccggggtgggcccggctatgtggatgtctgcggcctcttcctgctgcagatggcaaccatcttgggcatggtgcccgcttggcatagcgcccggctccggatcttcctgtgcctggggcttcgggaggcgcctggggcggccgaggggcggctgcgggcactgctgagccaactgaggatccgggctgaggtgcaggaggtggtgtggggcgagggggccggggctggggaacccgaggcggaggaggaaggggactttgtgaacagtgggcggggagacgcagaggcagaggccctggcacgcagcgccaacgccttggttcgggcccagcaggggcgcggcacaggaggagggccgggtgggccggagggtggggatgctgagggccccatcacagccctcaccttcctgtacttgcctcggccgccagccgatcccgcccgatacccccgctacctggcgctactggagactctaacccgagacctgggccccacgctgctggttcaatggggtcactccagtcacttgcactgatctgtgatgcccctgcttccagggctaggtagagagggcccaggcaggcggcctatcctgatccttggaggaggaggaagaggaggccactgtggcccgtggccctgcccttgggacgtggagcccaggggaggtttgaaggggatcctgggcttgggcatcacgcccacctcctttggcagagggaccccagcacactaactctgggtggctgtccccaccgtgcaggggagggagtccgcagcctcccttcactggtgccttgatgctaggggccaggcctcctctgtgactctgggctacctcagtttccccattttggccagactcaccggcccactggggtggtgatgttttcgttctgttttatttttctaactctgctgaccatgaataaaagaccaaaacactaaaaaaaaaaaaaaaaaaaaaa

SEQ ID NO: 576 - DNA, 1978 bp, Homo sapiens
ccacgcgtccggagccggctgccagcactaggtcctgggcagctttgtttgtcccacttttctttgtttcttctcactaaaatgatcacgaagacctttgacaagaggagagatatgcactgtgatattaaattagaaataatttatcaaaatcagacctctcctaaaagaataagaaattcattgtttggcccatcctgaaaggtgaggtggcgagacagtggggtgcctccgtgccgcttcgtgcagcagcaagttcagcctgagatgctggctgtactcagcctttgcaatttttgtagatgtagcttaggacgtgagttatttttccgcagactggccaagagccaggttctaagcttggacctaaggtagaaagctgcccatcgggggccctagctcagccccaccaggccctctgttgggcctgcacacagctctgtggctagaacactccaaggcccttcggtacccatcagagtgggccccttgccaggtggcttttcagttacagagtccagtggaccattttgtagaaccatgcagctccctgcggaaggtggggtagggtgggaaagaggagcaggtctggaggtttgtggaacccagtcccctgcagaatctgtaaaacctaataaatcatggttgtggccattctcacggtggtgattgtgattagacgacccccgggaagcccagacactcggggcctggagttcctccccctgcctgacctagaagcagaaccgttttcagcgctctgccctgttggctttaaggctttgtcttaatttaaggaaaaagatcctcccgggttttatttctctctttcttgagtggactgtttccctataattaaaagaggtggtgagtcctggggcagcttccgcgcctccctgtccacgtgctaacagatcaggacgcccccagcacccctgcctgcttttgctggtggcagtgacgggaccccgactcctcactctcgggccgcagacaatgctgtgagcaagtgtggccatgggcacagaatgtccctttggacgccgctgctgggggctgccaggggccctctggggtcgtgctttgaggcccgtccggttcacgagggggtccgggcagcactgactgcttccgacctgcaggaggcgtaggagcggccctgcgggccctttcacggcagctgctgctgtatagatttgtctccactcagtgacgtgggatttttttgtcttccttttggctttatttttaaactgctttagatattactgctcagtgtttgtgaactttcctagttctctatgttgttagtgcagccagcacccagtggggacctactagaaaaaggaactggcatgcacacgtgcccagcaggaaaagcttcgtcttcacgtcggctgctgccatccagaagaggccctggagcctcacgccgtcgaggctgctctcaggcgttctgttccgggcgaggcttgtgctgcaaggaagggcaccagcatgcaggctgcactggagggtccgggtgctgcgggcagagttcagcgcttgtccaccctcccttagctctgactcagtgcatcctactgtggggacatctcgtgaggggacacgaaatgactgatctcaccctttcccagtattcagagctgtgaacccctgtggcgcaggactggcctgtgtctgttattttggttgtaaatcattctcctgtggaattggcaaaagctacatttttactgtccttaccagcaacagtttgcgtcgtcacatgctgtgagtgtgggctgtggtgtgtccgtgtgtgtacatatgtgtatatgtatatatcacgcagcaggagtgtcattcatgctgctgtcccctggtgaagtgacaagtacaattaaaggtggctctgaaaaaaaaaaaaaaaaaaaaaaaaaaaaaaaaaaaaaaaaaaaaaaaaaaaaaaaaaaaaaaaaaaaaaaaaaaaaaaaaa

SEQ ID NO: 577 - DNA, 1990 bp, Homo sapiens
  SITE (1747): n equals a,t,g, or c
  SITE (1752): n equals a,t,g, or c
aggcgggcagaggcggcgagaggcgggctgaggcggcccagcggcggcaggtgaggcggaaccaaccctcctggccatgggaggggccgtggtggacgagggccccacaggcgtcaaggcccctgacggcggctggggctgggccgtgctcttcggctgtttcgtcatcactggcttctcctacgccttccccaaggccgtcagtgtcttcttcaaggagctcatacaggagtttgggatcggctacagcgacacagcctggatctcctccatcctgctggccatgctctacggggacaagtccgctctgcagtgtgtgcgtgaaccgctttggctgccggcccgtcatgcttgtggggggtctctttgcgtcgctgggcatggtggctgccgtccttttgccggagcatcatccaggtctacctcaccactggggtcatcacggggttgggtttggcactcaacttccagccctcgctcatcatgctgaaccgctacttcagcaagcggcgccccatggccaacgggctggcggcagcaggtagccctgtcttcctgtgtgccctgagcccgctggggcagctgctgcaggaccgctacggctggcggggcggcttcctcatcctgggcggcctgctgctcaactgctgcgtgtgtgccgcactcatgaggcccctggtggtcacggcccagccgggctcggggccgccgcgaccctcccggcgcctgctagacctgagcgtcttccgggaccgcggctttgtgctttacgccgtggccgcctcggtcatggtgctggggctcttcgtcccgcccgtgttcgtggtgagctacgccaaggacctgggcgtgcccagacaccaaggccgccttcctgctcaccatcctgggcttcattgacatcttcgcgcggccggccgcgggcttcgtggcggggcttgggaaggtgcggccctactccgtctacctcttcagcttctccatgttcttcaacggcctcgcggacctggcgggctctacggcgggcgactacggcggcctcgtggtcttctgcatcttctttggcatctcctacggcatggtgggggccctgcagttcgaggtgctcatggccatcgtgggcacccacaagttctccagtgccattggcctggtgctgctgatggaggcggtggccgtgctcgtcgggccccttcgggaggcaaactcctggatgcgacccacgtctacatgtacgtgttcatcctggcgggggccgaggtgctcacctcctccctgattttgctgctgggcaacttcttctgcattaggaagaagcccaaagagccacagcctgaggtggcggccgcggaggaggagaagctccacaagcctcctgcagactcgggggtggacttgcgggaggtggagcatttcctgaaggctgagcctgagaaaaacggggaggtggttcacaccccggaaacaagtgtctgagtggctgggcggggccggcagcacagggaggaggtacagaagccggcaacgcttgctatttattttacaaactggactggctcaggcagggccacggctgggctccagctgccggcccagcggatcgtcgcccgatcagtgttttgagggggaaggtggcggggtgggaaccgtgtcattccagagtggatctgcggtgaagccaagccgcaagkttacaaggcatcctcaccaggggccccgcctgctgctcccaggtggcctgcggcantgctnatgctcaaggacctggaaacccatgcttcgagacaacgtgactttaatgggagggtgggtgggccgcagacaggctggcagggcaggtgctgcgtggggccctctccagcccgtcctaccctgggctcacatggggcctgtgcccacccctcttgagtgtcttggggacagctctttccacccctggaagatggaaataaacctgcgtgtgggtggagtgttaggaaaaaaaaaaaaa

SEQ ID NO: 578 - DNA, 2816 bp, Homo sapiens
ccacgcgtccgcttttaacatgcctgatatgttctgactgtttttatatgcttaaatatagcagcatgactttggaggcttaggagtgcatgtatttttgaggaaggcctctaaattcatatacttggattgagaaatatgtaaatgacccttctcctcctgtccctcaccccccaccccaatgcacattgttgctgtccaaaacgaacataccagtgtgtagatgttagcaggaaagtgccatttttatttgggttggtagttctggactgtttccttacaagcttcaatttttcacactttttaacggactattaaactttgtgtgtacacgatttaatttttctagagattgaaaaggtcctgttacagccatagagttttaaaatgattttaaatgtatgttgtctgcaaatacttaatattttttttgcatataacaagagtgtcttcattcctgtccattacaacccaaagggatgatgatatcaagtagcaagtcagatttatctggtccaattggccatgaaattaaatagtaatttcactggttttgacattacatggttttaattgaaagtcaaagccagtacaggaaatggtattgccttttcttaggaatgcaatgctagttatcagtggtcagctacaggttaatattaataataaacagtgatggccacttacttggtttatcttgactagttgcttccttttcccaggctagtcttaaaacttcatgcagcattttacgctttaattacattgtcaggttaaccttattttgggagtctttagagttggtttgtttttctttatagttgattcaactaaagttattaattgaactcttctccaactcaaaggtgtctattattgtagagggaacgtttttttagttttctataccgttacttggagagagaagttagtgggtgagttattattgacctcagattctgcctcactggggcgtttcaaatggacagtaccataatctcttggctccacatggccagcttactactttgaaattattcctgggtagaaaatgtctcaaaatggggataatcttacgtcttacctttagggcagaataagtcatgttaaagattaaattttagttcacactttgtaaatgccatctctctttgtccttttaaggggcccctgacaaaatgacctatttagaatgaataggtaagaaacaaagtggggcaatggaatgagcacttggcagctggagccctgtgttctctactcctcagtggttaaggcgcagagatttggaaggcagccagacctgggaagttgcttgactctcatggcctcaattcactcttacttgatgggtaaaataataatatctattgtacaagttattgcaagatttaaatgagacaagtaaataaaactcagaatttattgccttgcctttaaatgctagctcttattgagagacctcaggccagtctcatgtcttgttttagcttgctcgttgagtaaaatgaaatgagtggagtagatgatactattgactatgaactagaagcagaatttataaatgattatgtctgaatatgatataattatttgacagcctttgactacctgccattggtatatatggggaatggtatatggaatatatggagtatataggatgatggacagtgagtctaaaaaacccttctacctctgttttcttatcggtataatggggatgataatagtccatacctcatagggttaatgtgaggattagatgagataaaaatgtaaagctctttaaaaaaagcctggtatatggtaaacactgtacgtttttattatttatcttaatgacacaatgaatgagtagtattcaagactagaatgcaataactagtaaggtgttacatacctgctaattgtcctcaggggcatcccttggcttgatgtaaagggaacgaaagtagtaggccacattggggttagctgatgtaactattaaacatacttgaaagcaagtatttacttttggagtttgatatcttagaaagaaacttcattagaaattaagtagtgattagtaatgagtagggattgtcactcattacatgtcattatgtatattagaatcacaatttcatatatagtgatagcatattgaatacaaaggtttttaaaatcttaactacaaagtttcttagagtaacacagctttaaaaatactaattttgctatactttgtttactaagtaactttttctcttctgtattgttattgccaaagtaatgatacaaaaatagtacaacatgttgatttaaaagttggaaagtgaaaaaaatttttaaaaggaaaaagaatagaagtaagcaaaaatattgttaaaccctttatgcagtgataaaaacagtgacttccagggatatagtggttattttcagaaatattttgcttgtcattttgagggaaaaatatcacagaactgtatttccctaaggattaaaaaatagcaggggttaataacagcatgaaaaattcaattccctatctggattcattttattaacaccaaaagccaagggctggtgggggattggggggggcagacgactgtgtgtgtatattatgcagatatagataaatgaagtatatatagatgaaagatatatatctctatatgaaatatttaggtgacatttgttcactattttatccaaatgccatctaatctgaactttttttttttttgagacagagttttgctctagcctagcaacagattgagactccgtctcaaaaaagaaaaaaaggaaaaaaaaaaaaaaaa

SEQ ID NO: 579 - DNA, 1250 bp, Homo sapiens
ccacgcgtccggtttatctaggttgcagtggcatctgctgtgcacagagcttccatggtcactgctaagcagtagccagccatcgggcattaattgatttcctactatattcccagcagacacatttagaaactaagctatgttaacctcagtgctcaactatttgaactgttgagtgataaaggaaacaaatataactgtaaatgaatcttggtatcctgtgaaacagaataattcgtaatttaagaaagcccttatcccggtaacatgaatgttgatgaacaaatgtaaaattatatcctatatttaagtacccataataaatcattccctctataagtgttattgattattttaaattgaaaaaagtttcacttggatgaaaaaagtagaaaagtaggtcattcttggatctactttttttttagccttattaatatttttccctattagaaaccacaattactccctctattaacccttcacttactagaccagaaaagaacttattccagataagctttgaatatcaattcttacataaactttaggcaaacagggaatagtctagtcaccaaaggaccattctcttgccaatgcttgcattccttttgcacttttggattccatatttatcccaaatgctgttgggcacccctagaaataccttgatgttttttctatttatatgcctgcctttggtacttaattttacaaatgctgtaatataaagcatatcaagtttatgtgatatgtatcattgcaagagaattttgtttcaagatttttttttaatgttccagaagatggccaatagagaacattcaagggaaatggggaaacattaatttagagaacaagaacaaaccatgtctcaaatttttttaaaaaaaattaatggttttaaatatatgctatagggacgttccatgcccaggttaacaaagaactgtgatatatagagtgtctaattacaaaatcatatacgatttatttaattctcttctgtattgtaacttagatgattcccaaggactctaataaaaaatcacttcattgtatttggaaacaaaaacatcattcattaattacttattttctttccataggttttaatattttgagagtgtcttttttatttcattcatgaacttttgtatttttcatttttcatttgatttgtaaatttacttatgttaaaaataaaccatttattttcagctttgaaaaaaaaaaaaaaaaaaaaaaaa

SEQ ID NO: 580 - DNA, 1795 bp, Homo sapiens
aattcccgggtcgacccacgcgtccggtttgaaccggacagaagcgctggtcggcgtctggcggtttttttagaggtaatacacctagtttgtggctcagcatgtcaattgtaacagtgcaacttggtcagtgtggcaatcagattggttttgaagtttttgatgctttgcttagtgactcacacagttcccagggactctgctctatgagagagaatgaggcatatcaagcatcttgcaaagaaagattcttcagtgaggaggagaatggagttccaattgcccgggctgttcttgttgacatggaacccaaagttatcaatcaaacgctgtcaaaggctgcccagtctggccaatggaaatatggtcaacatgcatgcttctgtcaaaaacaaggttctggaaacaactgggcatatggttactctgttcatggacccaggcatgaagaatctataatgaacataatccggaaggaagtggagaaatgtgactctttcagtggttttttcatcataatgagtatggctgggggcacaggatcaggattaggagctttcgttacacagaatttagaagatcagtactcaaactcattgaaaatgaatcagattatttggccttatggaactggtgaggttattgttcaaaactacaactccattttgacactttctcacttgtaccgatcttcagacgccctccttcttcatgagaatgatgccatccataagatctgtgcaaaactgatgaatatcaagcagatctcctttagtgatatcaatcaagtcctcgcacatcagctgggaagtgtgttccagcctacttattctgcagaaagctcatttcactacagacgaaatccactaggagacttaatggagcatttagttccccatcctgaattcaagatgctgagtgttcgtaacattcctcacatgtctgagaattcattggcatacaccacatttacttgggctggcctcctcaagcatttgagacagatgctcatttctaatgcaaagatggaagaaggtattgataggcatgtatggcctcctttatcaggacttcctcctcttagtaaaatgtctctcaacaaggacctgcattttaacacttccattgctaacttggtcattcttcgtgggaaagatgtgcaaagtgcagatgtggagggatttaaagatccagctctgtatacttcctggttgaagcctgttaatgctttcaacgtgtggaaaacccagcgggcctttagcaaatatgagaagtctgcagtgttggtcagcaacagccagttcttagtaaaaccacttgatatgattgttgggaaggcatggaatatgtttgcttcaaaagcctacattcatcagtacacaaaatttggaatcgaagaagaggactttttagacagtttcacgtcattagagcaggttgttgccagttactgtaatctctgatcttgaacaatgggaaaagtataccttaaggcatttctggactaaaatattttcaatactattttctctgtaaagttttcaaagttctccatcctggctaacacggtgaaacaccgtctctaccagaaaatacaaaaaattagccaggcgcagtggcgggtgcctgtagtcccagctactcgggaggctgaggcaggagaatgacgtgaacccaggaggcggagcttgcagtgagccgagatcgcgccactgcactccagcctgggcgacagagcgagactccgtctcaaaaaaaaaaaaaaaaaaaaaaaagggcggccgctctagaggat

SEQ ID NO: 581 - DNA, 2486 bp, Homo sapiens
ccacgcgtccggttttggttgggcatcttttcctaggcctcccaaggtgctgggattacagacctgagccaccacgcctggcccattgtctcgcccattttagaatagggcaagctgaggctcagagccaggcaagagcctgcacccttcattctttgttttgagaagtactgatcgagcgcccacagcagtgatgaaacacgcagaacctcctgctttgctgaactggcagcctatgagaagacggctatgggtacacaacgccactgactgatgcgggcaaggccttctccatcgcctttgcgctcctgggcgtgccgaccaccatgctgctgctgaccgcctcagcccagcgcctgtcactgctgctgactcacgtgcccctgtcttggctgagcatgcgttggggctgggacccccggcgggcggcctgctggcacttggtggccctgttgggggtcgtagtgaccgtctgctttctggtgccggctgtgatctttgcccacctcgaggaggcctggagcttcttggatgccttctacttctgctttatctctctgtccaccatcggcctgggcgactacgtgcccggggaggcccctggccagccctaccgggccctctacaaggtgctggtcacagtctacctcttcctgggcctggtggccatggtgctggtgctgcagaccttccgccacgtgtccgacctccacggcctcacggagctcatcctgctgccccctccgtgccctgccagtttcaatgcggatgaggacgatcgggtggacatcctgggcccccagccggagtcgcaccagcaactctctgccagctcccacaccgactacgcttccatccccaggtagctggggcagcctctgccaggcttgggtgtgcctggcctgggactgaggggtccaggcgaccagagctggctgtacaggaatgtccacgagcacagcaggtgatcttgaggccttgccgtccaccgtctctcctttgtttcccagcatctggctgggatgtgaagggcagcactccctgtccccatgtcccgggctccactgggcaccaacataaccttgttctctgtcctttctctcatcctctttacactgtgtctctctggctctctggcattctcgctgcctctgtctttccctcttgctgtctctgtttctcattctctttcatgttccgtctgtgtctctcaattaaccactcgtcaactgctgattctactgggctgtgggctcagacctcatttcaggcaccagattggtcgctacaccctggacaagtgactgcccgtctctgagccttgatttcctcagctgccaaatgggaagaatagaagaatttgcccctaaacccctcctgtgtgctggccctgtgctagacagtgctggagacatagttgggggtggagaactgcccttatggagcttgcagtccagtgaggtggacagacctgtccccagacagtgatggcccaaaatggtcaggactttaatggaggaggtgaggtgttgaaagcacaggcagagtggtcagggctgaagtcggagaagcatagggactaggcccaatccagcctggaaagtcagggaggacttcctagaggaagggacatcgaactaagacctgaactatgagaaataggcaggaagaagttgtacctgactcatttttctcaggtgtctccagggagcaggacccatggagggacccctggtgtaggcctgggcgatagactcttcctcagcagcctggcaggcaggaaacagacataggaccccagcccagatctgaatggcatgggaggtgctgcccttaaccatgacaccattgtaagagctgtccacatttgtatgttgtgccctggaatcagcctggttgagctcaaatcccaacttagccacgtctggcctgtgtccttgggcagtcacactacctctctgattttgtttccttatctgtaaaatggtgatcatcataatacaacttcaaaaggatttcaggctgagtgtggtggctcacgcctatacacccagcactttggaaggctgaggaaggaggatcgcttgaggccaggagtttgagactagcctaggcaacacagtgaggccttatctcaacaacaaccacaaaatctaaaaattagctgggtgtggtggtgcatgcctgtgatcctggctacttcagaggctgaggtggaaggatcacttgaggccaggagtttgaggctgcagtgagttatgatggcactgctgcactccagcctgcgggacagagtgagaccctgtctgaaagaaagagagaaagaaagaaagaaagagagagaaagaaagaaagaaagaaagggaaagatggaaggaaggaaggaaaaagaaagagaaagagagagagagagaaagaaaaagaaagaaaagtaagaaagaaaaaagaaaaagaaagaaaagtaagaaagaaaaaaaaaaaaaaaa

SEQ ID NO: 582 - DNA, 554 bp, Homo sapiens
acgcgtccgggagaaggcaactccagtcagaacagcagaaataagcgtgccgttcagggtccagaagaaacaggatcttacacatttgttccatggcttctcagctttaaaaggggaagtgccctagaagaaaaagagaataaaatattggtcaaagaaactggttacttttttatatatggtcaggttttatatactgataagacctacgccatgggacatctaattcagaggaagaaggtccatgtctttggggatgaattgagtctggtgactttgtttcgatgtattcaaaatatgcctgaaacactacccaataattcctgctattcagctggcattgcaaaactggaagaaggagatgaactccaacttgcaataccaagagaaaatgcacaaatatcactggatggagatgtcacattttttggtgcattgaaactgctgtgacctacttacaccatgtctgtagctattttcctccctttctctgtacctctaagaagaaagaatctaactgaaaataccaaaaaaaaaaaaaaaaaaaaaaaaaa

SEQ ID NO: 583 - DNA, 1422 bp, Homo sapiens
acgcgtccggaaaatgttctttgatgtctcataggcaactcaaatttgatgtgaagaaagctgaacttgccttctctttcacttttccccttagtcaatgacccaggtaactatctcgaaacttggaaggctgctgcttctggccttacccctatgcccaatcagttgtcagtatagtcagttctcccgtgaatagctgtacactctatatactgcctgtcactgtgcactgccaccaactaagaccaagccactgctgccatctctttcctaggttacttaaagggcagttgcaccccctacactttctccagtctaacatcctatgctgctattggcctcataaaatgtccatctgattgcatcatcctttgcttaaaatgcctcattagagttttgataaaatctaaactttttaacagggcttataagatccttaataacctgttcccaagctggctgcatttcttggagtttctcggaaatatctgcctccctcaagcacattcccaccccaccctgcatacatacacatctctggccacttgtttgtcatttaccctagagtctaacatagggcacagtaaggcctcaataaatatttgttaaataaaggtaggaaggcagtggtcctggattttaattgtatgtcctcacattttaatttaatttaccttaaaaatgtaaatgattccagagtcaaaagttgctgttttgttttatagtgctctgtatgtttccctccactctgtagtttccagagggttattaaaaatggactaaaagaagcatgtgggcttctgttagcaaatcagttgtaatctgtgttctttggctgagtgctgagcttaggaggctgccagatggggacacaggaaccaaatcatctttgcttcccagtggggaacaggggcataaattggctgaatgggcttctgcagtaaaaactccttcaatttgagcttgtgtaagccaggatcaaaatacctgggacttggtgagacttgtctagactggttggtaaactttcaacctgtttgggaagaaggcttggaacaacagtgggtttgggtcttgtgaagtaaatcttatttaaaggaaatagacaaaagcttaatcatgtttaatttgtaacattataggtaagactgttggttgctgttgtaatgactctaaaaaagaatagagaatatttttttccttagaagttccaggttcaatgatgaagccccatctctaccaaaaattcaaaaattagccaggtgtgttggccagtgtctataatcccagctactcgagaggctgaggcaggaaaatcacctgaacccaggaggtggaggctgcagtgagccgagatcgcgccactgcactccagcctgagccacaaagcaagacgccatctcaaaaaaaaaaaaaaaaaaa

SEQ ID NO: 584 - DNA, 1181 bp, Homo sapiens
gggaattatgtatttaaaaacatgtcacgtggaccaatgccatgcttttaaatacataattccaaacctattgtatttgaaagcatggcattggtccacgtgacatgttgggtgtcttgttttcattttaccagactctgtttttatttatgktttcagtttatgatcctgtcctttgttcataaggtacttagatggtttaagatgtagacttcttatatgaagatgttgctgttgtttttccaaagtaatggtggtcatcagcccatttttctatttagtctcatgaatagaatcatgagtagaatctttcttaaattattacttgtaaatggatcactttcttgttttctttttcttaattggagctttaaataaatatggaacttggacaaaaagattttcaggaattttatggaaactaacttttttgacctaaatcgaaagggatgaaagtttctgaaaacctaacaaaatgtgtgcacagccaattcttttaggggaggaaataggcagggaatgtgtaattggctattttaaaaacatatgccttcttttgtaacttattgttgtttcaagttacaagatctttgaaggcaagtgtttatctcaaaatatttgaaagcttttatagtgcttaacatattaagacgtcctattagggtttacttagaacaagcttatccaacttgtgggccacatgtggcccaggatggctttgaaagcggcctaacacaaattcataagctttcttaaaacattatgtgatttttttttttagcttatcagctatcattagtgttaatgcattttatgtgtggcccaagacaattctttttcttccagtgtggcccagggaaaccaaaagattagacacccctgacttagaactttccataggttaggaaaaagttgtactttcttgatgtctataacctagaatttctggtaaaggaattgattggaaatgttattaaaagttgaaaataatttggaaattwaacattttagtgatcagttcttccattgagactgtgttggttcctttactagatatgtgccatctttttaaaaacttactgtgttgcttcctttactagaaattgccatctttttgagccttgtctattgaggaaccaagaacacagaaaaggcagtaaaaaaaaaaaaaaagggcggcc

SEQ ID NO: 585 - DNA, 1430 bp, Homo sapiens
ttttttttttttttttttttttttttttttttttttttttttttttttttttttttttttaagcttcatggcacagagtttaatgtgaatcatgagatgagacaaaagcctcctccagggcgatgggaagacccagccccaaaccagactcttgagcacgcagccctaaaccagactccgggaaggggctgcgtggtcatgcaccgcctaagactcagaggtgaagatgggaagacccagccctaaaccagactcctggaaggggctgcgtggtcacgcatcgcctaagactcagaggtgaagatgggaagaccccagccctaaaccagactcttggaataggctctgtggccacccatcgccgtaaggtccgggatggagacagcatggacagggacctcgcacaaaggcatgtcgggagggctcttttccaaggcacagccccacttgttctttctcagcccacgacgggagcagagccatgtcgaagccgtgccccacacagggtggacaaggacatggcctgacagctcctcagaaatccttagagatttttccaaacgcaggttaccagggcttctgcagagagaggggcagcaggacgtgctgctgacagtccctggggacttacactgacttgcagtgagagcccacatctgccaccaggatggctcccagcaccaccgcgtcacaagcaccacacttccaccgtgggacgcccagatggctcggcaggcaggccgggctggggagctgacagcagacgcctgggactctgcccagcgtcctcacccacaaccttttaactgtaactggcagaggagacagcagggagggcagaaggtacagtgatggctaggatgcagttctaggttttgccagacatactttcaggggccactcctggctacctaattaatctacctgtgtataagaattttttagcttattaaatattccaagaggccaggcatggtggctcacgcctgtaatcccaacactttgggaggacgaggagggtggatcacctgaagtcaggagtttaagaccagcctggccaacatggtgaaaccctgtgactactaaaaatacaaaaattagccaggtgtggtggcgcgtgcctgtaatcccagctacccaggaggctgaagcaggagaatcactggaacccgggaggtggatgttgcagtgagtctgcagtgagccaagatctcgccactgcactccagccggggtgacacagtgagactctgctgggaaagggcggggatggcaagagtgccaatacatagacaatgctgggcaaggccagagatgctggtcaagggcggggatgtcgggagcggacgcgtgggtcgacccgggaattccggaccggtacctgcaggcgtaccttctatagtgtcacctaaatagctttttgcaaaagc

SEQ ID NO: 586 - DNA, 1719 bp, Homo sapiens
gagcgggagtggagggcccagtccctacccmtggcagtagggggcgttttgaagctgcggctctgtgagctgtggctactgctactgggttctagtttgaacgccagatttttgccagacgaggaggacgtagactttatcaacgagtacgtgaacctccacaatgagctgcggggcgacgttattccccgagggtctaacttgcgcttcatgacttgggatgtagctttatcacggactgctagagcatggggaaaaamatgtttgtttacgcataatatttatttacaagatgtacaaatggtccatcctaaattttatggtattggtgaaaatatgtgggtcggccctgaaaatgaatttactgcaagtattgctatcagaagttggcatgcagagaagaaaatgtacaattttgaaaatggcagttgctctggagactgttctaattatattcagcttgtttgggaccactcttacaaagttggttgtgctgttactccatgttcaaaaattggacatattatacatgcagcaattttcatatgcaactatgcgccaggaggaacactgacgagaagaccttatgaaccaggaatattttgtactcgatgtggcagacgtgacaaatgcacagattttctatgcagtaagataaagaaaatwaacatgraaaaaatgcataatggattggacaacaagaaaaataagcgattgaacactagttttttatggtcatgttaatattattcctttgatcagaatgctactattatgttatcaaaggatggttgacacagtatcatctttagatttttcyaaactgcagagctttttctgttctatcttaaccctattccttcccctgaggacataccagagtgtcagaaagaaagaatgagaactaacagttatacccttaaaaagcttcacagtttatgcccaaacagcagcctgtttgataaatactgctttaaaggatagtatattccaaaatatttatgaagtagcatatatttaatacccttttcttttagtttttcctccaaaaagctgaaatctccaaatatttcaaaagtaaaaagtagaaaatatgtttgattacatttttcttttagtttttccaaacatgagagaatatactccaaaagtataactgtagctaaaatatacaatgcttagaggaatatggtaggagataaatttggataataagtaaatagcatattatgttgttttttaattattatactttaagttctggggtacctgtgcagaacgtgcaggtttgttacataggtatatacatgccatggtggtttgctgcacccatgaacccatcatctacattagatatttctcctaagctattcctcccctagccctgaccccctgacaggccccagtgtgtgatgttcttctccctgtgtccatgtgttctcattgttcatctcccacttatgagtgagaacatgcagtgtttggttttctgttcttgtgatagtttgctgagaatgatggtttgcagcttcatccatgtccctgaaaaggaaatgaactcatcctttttttatggctgcatagtattccatggtgtatatgtgccacactttctttatccagtctatcattgatgggcatttgggttggttccaagtctttgctattgtgaacagtgctgcaataaacatatgtttgcaggtgtctttaaaaaaaaaa

SEQ ID NO: 587 - DNA, 797 bp, Homo sapiens
  SITE (779): n equals a,t,g, or c
  SITE (793): n equals a,t,g, or c
ggcatggtggtgtgcacctgtattctcagcctcccaagtagctgggattacagtcaggcaccaccacacccggctaattttgtatttttttagtagagacagggtttctccatgtcggtcagggtagtcccgaactcctgacctcaagtgatctgcctgcctcggcctcccaagtgctgggattacaggcgtgagccactgcacccagcctagaatcttgtataatatgtaattgtagggaaactgctctcataggaaagttttctgctttttaaatacaaaaatacataaaaatacataaaatctgatgatgaatataaaaaagtaaccaacctcattggaacaagtattaacattttggaatatgttttattagttttgtgatgtactgttttacaatttttaccatttttttcagtaattactgtaaaatggtattattggaatgaaactatatttcctcatgtgctgatttgtcttatttttttcatactttcccactggtgctatttttatttccaatggatatttctgtattactagggaggcatttacagtcctctaatgttgattaatatgtgaaaagaaattgtaccaattttactaaattatgcagtttaaaatggatgattttatgttatgtggatttcatttcaataaaaaaaaactcttatcaaaaaaaaaaaaaaaaaaaaaaaaaaaaaaaaaaaaaaaaaaaaaaaaaaaaaaaaaaaaaaaaaaaaaaaaaaaaaaaaaaaaaaaaaaaaaaaaaaaaaaangggggggcgttttnaggg

SEQ ID NO: 588 - DNA, 1868 bp, Homo sapiens
caccgcctcccgccacccctgcccgcccgacagcgccgccgcctgccccgccatgggtcgacagaaggagctggtgtcccgctgcggggagatgctccacatccgctaccggctgctccgacaggcgctggccgagtgcctggggaccctcatcctsgtgatgtttggctgtggctccgtggcccaggttgtgctcagccggggcacccacggtggtttcctcaccatcaacctggcctttggctttgctgtcactctgggcatcctcatcgctggccaggtctctggggcccacctgaaccctgccgtgacctttgccatgtgcttcctggctcgtgagccctggatcaagctgcccatctacaccctggcacagacgctgggagccttcttgggtgctggaatagtttttgggctgtattatgatgcaatctggcactttgccgacaaccagctttttgtttcgggccccaatggcacagccggcatctttgctacctacccctctggacacttggatatgatcaatggcttctttgaccagttcataggcacagcctcccttatcgtgtgtgtgctggccattgttgacccctacaacaaccccgtcccccgaggcctggaggccttcaccgtgggcctggtggtcctggtcattggcacctccatgggcttcaactccggctatgccgtcaaccctgcccgggactttggcccccgcctttttacagcccttgcgggctggggctctgcagtcttcacgaccggccagcattggtggtgggtgcccatcgtgtccccactcctgggctccattgcgggtgtcttcgtgtaccagctgatgatcggctgccacctggagcagcccccaccctccaacgaggaagagaatgtgaagctggcccatgtgaagcacaaggagcagatctgagtgggcaggggccatctccccactccgctgccctggccttgagcatccactgactgtccaagggccactcccaagaagcccccttcacgatccaccctttcaggctaaggagctccctatctaccctcaccccacgagacagccccttcaggatttccactggaccttgcccaaatagcaccttaggccactgcccctaagctggggtggaaccggaatttgggtcaatacatccttttgtctcccaagggaagagaatgggcagcaggtatgtgtgtgtgtgcatgtgtgtgcatgtgtgtgcatgtgtgtgcaggggtgtgtgtgtgtggggggggttcccagatattcagggcaagggaccagtcggaagggattctggctattgggggagcccagagacaggggaaggcagcctgtccatctgtgcataaggagaggaaagttccagggtgtgtatgtttcaggggcttcacatggaggagctgcagatagatatgtgtttctgtgtatgtgtatgtctgcctttttttctaagtgggggcttctacaggcttttgggaagtagggtggatgtgggtagggctgggaggagggggccacagcttaggtttggagctctggatgtacatacataagtaggagcagtgggacgtgtttctgtcataatgcaggcatgaagggtggagtgaagtcaggtcataagtttcatgtttgcttttgttttgttttgtttttaatgtatgtagcagatgttacagtcttagggatccgggatgggagaccccactttagaaagggtcgtcactcctttaatcctctactcaacaatgtactcttttacttttatattaaaaaaaataaaataaatatgtgcctaaaaaaaaaaaaaaaaaaaaaaaaaaaaaaaaaaaaaaaaaaaaaaaaaagggggggg

SEQ ID NO: 589 - DNA, 2444 bp, Homo sapiens
  SITE (1655): n equals a,t,g, or c
ggcggaggcggaggcggccccgggctcgggcggctgggatggagcagaagagcgcggacaccggagggcacgcagctgacggagctgcgctgcgttcgcctcgtttgcctcgcgccctccactggagctgttcgcgcctcccggctcccaccgcagcccacccggcagaggagtcgctaccagcgcccagtgcgctctgtcagtccgcaaactccttgccgcccgccccgggctgggcaccaaataccaggctaccatggtctacaagactctcttcgctctttgcatcttaactgcaggatggagggtacagagtctgcctacatcagctcctttgtctgtttctcttccgacaaacattgtaccaccgaccaccatctggactagctctccacaaaacactgatgcagacactgcctccccatccaacggcactcacaacaactcggtgctcccagttacagcatcagccccaacatctctgcttcctaagaacatttccatagagtccagagaagaggagatcaccagcccaggttcgaattgggaaggcacaaacacagacccctcaccttctgggttctcgtcaacaagcggtggagtccacttaacaaccacgttggaggaacacagctygggcactcctgaagcaggcgtggcagctacactgtcgcagtccgctgctgagcctcccacactcatctcccctcaagctccagcctcatcaccctcatccctatcaacctcaccacctgaggtcttttctgcctccgttactaccaaccatagctccactgtgaccagcacccaacccactggagctccaactgcaccagagtccccgacagaggagtccagctctgaccacacacccacttcacatgccacagctgagccagtaccccaggagaaaacacccccaacaactgtgtcaggcaaagtgatgtgtgagctcatagacatggagaccaccaccacctttcccagggtgatcatgcaggaagtagaacatgcattaagttcaggcagcatcgccgccattaccgtgacagtcattgccgtggtgctgctggtgtttggagttgcagcctacctaaaaatcaggcattcctcctatggaagacttttggacgaccatgactacgggtcctggggaaactacaacaaccctctgtacgatgactcctaacaatggaatatggcctgggatgaggattaactgttctttatttataagtgcttatccagtagaattaataagtacctgatgcgcattgaacgacaatcttaagccctgttttgttggtatggttgtttttgttttcctccctctcctctggctgctacaacttcccctttctggtacaagaagaaccattctttaaaggtgagtggaggctgatttgcagctgaagtgggccagccttgcaccagccaggccagaccaccatggtgaaggcttctttccccactgcaggacccactttgagaaggaccgaggargargatttgggttgttttgttaggggttactttcaggggaacatttcatttgtgttatttcttaaacttctatttaggaaattacattaagtattaatgaggggaaaggaaatgagctctacgaggatttcaccctgcatgggagagagcanggttttctcagattcctttttaatctctatttatctggttgtttctgacaggatgctgcctgcttggctctacaagctggaaagcagcttcttagctgcctaattaatgaaagatgaaaataggaagtgccctggagggggccagcaggtcacggggcagaatctctcaggttgctgtgggatctcagtgtgcccctacctgttctcccctccaggccacctgtctctgtaaaggatgtctgctctgttcaaaaggcagctgggatcccagcccacaagtgatcagcagagttgcatttccaaagaaaaaggctatgagatgagctgagttatagagagaaagggagaggcatgtacggtgtggggaagtggaagagaagctggcgggggagaaggaggctaacctgcactgagtacttcattaggacaagtgagaatcagctattgataatggccagagatatccacagcttggaggagcccagagaccgtttgctttatacccacacagcaactggtccactgctttactgtctgttggataatggctgtaaaatgtttaaaaacaaaacaaaacaaaaaagaggcactagtctatctgcaattactcaacgaggcattttcataggaaacagactatgattaatccatttattcttcccacacacttaccttactaagtctttgctttaataaatgagcaaccctgggtatagtcttaaaattctgcacaataaattttgagaaagaaaaaaaaaaaaaaaaaaaaaaaaaaaaaaaagggggggg

SEQ ID NO: 590 - DNA, 686 bp, Homo sapiens
ccacgcgtccgcccacgcgtccgggacagtgcagctgtgatgaagccacagtcggatggaaaactgacctgagatctaagcgcttctccctgcatgagcctcacactcacttctacaagtgtgttcagagaaaattcaccaaacgccacaagtctgtgaggcatcttcacagcaagcccagcttcagggaaacagcagccaggccgcgtaatgaaggccaactgaggcagcccccggggtcagcctagcccagggcttgggccctccatcatggagagtggtcaagtcagtctgtttggtttggttttcagtctgatgccatgttgtcagcacattcagaagggagcagcttgtcctaagacagtgaatctcaggaggccacagctgtcaggacttttgatttcctggcgattcctcaagtgtattctgctggattttaatgggtgggtgtggaaaagtccctaattagatccatttggaaatccctgagtgaaacaaagtctatttttattgcgcacctacgagccagcaggagaaagctgtgtgcttgtctctttgcagcaatgcagctgacctcggaaatgatgtccaagaatgcctgaagctgagatggaaagtggcagcacctactatgtgccaggtgctctggataaagctgtaaaaaaaaaaaaaaaaaaaaaaaaaaa

SEQ ID NO: 591 - DNA, 1112 bp, Homo sapiens
tcgacccacgcgtccgcccacgcgtccggggatttgttcttcaggtacgaggaacagcaaattcaggaaaaagtggcgacctttcgactcatgttgctggagaaggatgtgaaccctgggggcaaggaggagaccccagggcagaggccagcgtgagtgttgcgctctccctcgatgactctggactctactctggctgctggctgctgctgctgtccttttccttacgtgggacttcctccctgctttcgtctgcctttcccatgccttatttggctcctgcttatacttgtgttctgaatatggctctgtcctttatatttccttcagacttttgcccttcttttctctagggtcacggagactcaccagttggcagaattaaatgagaagaagaatgaaagactccgtgctgcctttggcatcagtgattcttacgtagatggcagctcttttgatcctcagcgtcgtgcccgagaagctaaacaaccagctcctgagcctcccaaaccttacaggtatacaaggccaagaaaccactgtcagcttcttttcttgattgtaagctccatgctctatttttgtctttttgcgggctggtttcttcccaaactcttcagattttgttcttctgaagttgaggtgtccaaaaaaatttgtccaagggttagtcacagtgggtcacgcgcgtaatcccagcattttgggaagctcaggcaggagatcacttgaggccaggagtttgagaccagcctgggcgatgtagtgagaccccatctctacaaaaagaaaaaaagctggttggtggcacatgcctgtagtccaggctgcttggagaggtggaggcaggagggtcttttgagcccacaagttggaggttacggtgtgagctgtgttgctgccactgcaccccacctgaggcaacagagcgagattcttatttttttatttttattactatttttttagactctgtcttttaaagaaaagaaaggaatgtttgttctaccacccatctctgctgcttttcatttttccctagccttgttcgggagtctagcagttctcgctcaccaaccccaaagcagaagaagaagaaaaaaaaaaaaaaa

SEQ ID NO: 592 - DNA, 1254 bp, Homo sapiens
ccacgcgtccgcgagaaacataaaaatgggggcttgattaaaggccggtttggacaggcacggatggtgacaactacacacagcagggccccatcactgtctgcttcctataccaggttgttcctgattctgaacattgctattttctttgtcatgttggcaatgcaactgacttatttccagagggcccagagcctacatggccaaagatgtctttatgcagttcttctcatagatagctgtattttattatggttgtactcttcttgttcccaatcacagtgttagcactgaagctataaattacctggtcattttgtgatcacaagagtctatgcaaaaaaaaaaatttctttaccccagattatcagatttttttccctcagattcattttaacaaattaagggaagatattttgacacaagaaagcaggaacgtggagaaattggagcaggaaaagaaattatcaaagcaatagaaatagcttggtggtcctatggtgtttttggaagtatttggcattgctaattgagcagtccatatagtactacttttagaagaaacaaaaagtctgttttttaaagtaatgttttttcttatgagaaaaaggtttagatagaattgggttttattaatattaatttaatgctattagcaatttccatatactatattgtggaaaagactgaagaatacaattctgagaaatacaaaaaaattttaatggtatactcatgttgaaagataaatgttgctaagtcctggtatgatggtgtgagcttccttggggaagtacttcttgagttatgtaactaacaggatgttttactacagatctggatggctattcagataacatggcaaaaaatgatagcagaagatcattaaaaacttaaaatatattttattagaaaacatttatctatgaatgaatatttccttgatgctggtctctgcacacatatgcttggttacttgcatgcattcattggttgttcaataagtgagatgattacagataacttaatactgtattttccttatatggaaaaccgttatagacccaataacaactaaacctttcaaaagaaaatattttctattatgaatgttgattttcataccaaagaagatggagagtctaaaatttggatatgattcttatgtttttttaatagaaaaccttcttcaagtttattttcctaaataaacatcataattgtgaaaaaaaaaaaaaaaaaaaaaaaaaaaaa

SEQ ID NO: 593 - DNA, 1240 bp, Homo sapiens
acgcgtccgggcatttgtaggcttggaggtaaagaactgaagataactggtgctggatagaggagccttattttttattatggcagcttgctatttttataacatggtgattgagttgaacacaatcaaagtacagtagtaactgatgtccccttcttcctggatgaatgagcagataaatattgatgtcagcatccttgaaccatatcaaagtgagcagtgtttggctactgcttctatttgaaatggtgctgtgttttggttgtggtctgaagctttgaagcgctacttagcatctcctttcttccatggagctctcacgattcaaacatgacagatttggtaaaatgctggttaggttgagtcttccttgcccccactcagtcatctttgtatgaatcccatgatttgggggtttttttcttttttttttataccagtttttagctggtgtttatgaagaacagtgagtacctagaactgtgccactaattaaaggaaatcctaagaaggtgcatttctttacagagctgtgtcatgccatcctttgggccctctgctggaaaagtagaatcaagtctcaaataatgcctttttaattgtatcctctagtattatagatataggacagtactgtatcatacctctgtgaatgtaaaatatcttgtacctgctttatgatacgtagtagtgaccgtgctttatcagagctgtttttaatgatgttattctagaatgttttctttccagatgatgattcagaagctaattttaaaaaacggtgccaggtaccacaacagtaacagaactttgcaattttctggggttttgttttttacctttttccccccttttttttaaatggagtgtgctggatgtctctataattttattcagatgactgcagaacctggaaaagctgttgctgctattgatgcataacatactgctattggtctttttatataaatatatatatatatatacatatatatatataatttgaatttttggaaactttagctgtgctgtcaactttggaaaaagtatcccggtttactgtgttgagttggcattgtacagaaattaacagccatattggtctagaaacgttaaacttaattttttttccatttgtacaggggtaacgcactgtattaaatatgtaaggtcttatctacatgggtttgattacagaaactaataaagtattctctaaataaaaaaaaaaaaaaaaaaa

SEQ ID NO: 594 - DNA, 1337 bp, Homo sapiens
ccacgcgtccggaaacccacagaaaatactgggctttatggagcaatccatttgaagagattgctgaattctgaactactgagaaagcacagagaattacaagcatcaacattattttaaagtagaaaagccaatgtaggaaatataaaagctatgttaccgtgctccttaaaatcaggacaaagttagttccaaacatcatcctgtgtgttattcaaaaaatctgatgctctctgcagatctatgaaggagcaactggctcaatttctcaaggtcacttctagcttccggctcctgcttcttctaacttggatgggtttggggattgcccccctgaccctgtgctatactgcaataacctaaacaaggactcagcagtttcccttagttttcactgcagaccacttatcaaaggcatgtgtgtgcaggacaggcttcaccgaaggtttgaggagccagaggggtttacattgcaccttgagctggaaaagtaaaatattggcagtctccgtccttcaaaaacagcaggtattttgtaactcaggctcctgccttctccctgtagctcacccttttttcttttcctcatttctttracccatccttcccaaaggcaaaaaaataaaagccagaaccactctttccattttattactcagaatagttcagctatctccaagctgaacccttcaacacagctgtggtcttcctctgaatattagcagaagtttcttattcaaaggcctcctcccagaagaagtcagtgggaagagatggccaggggaggaagtgggtttattttctgttgctattgatagtcattgtattactagaaatgaactgttgatgaatagaatatattcaggacaatttggtcaattccaatgcaagtacggaaactgagttgtcccaaattgatgtgacagtcaggctgtttcatcttttttgtttattttcaatgcctaataaacagagatcctaaaaaaaaaaaaaaaaaactcgagagtacttctagagcggccgcgggcccatcgattttccacccgggtggggtaccaggtaagtgtacccaattcgccctatagtgagtcgtattacaattcactggccgtcgttttacaacgtcgtgactgggaaaaccctggcgttacccaacttaatcgccttgcagcacatccccctttcgccagctggcgtaatagcgaagaggcccgcaccgatcgcccttcccaacagttgcgcagctgaatggcgaatggagatccaatttttaagtgtataatgtgttaaactactgattcyaattgtttgtgtattttagattcacagtcccaagg

SEQ ID NO: 595 - DNA, 1337 bp, Homo sapiens; identical to SEQ ID NO: 594

SEQ ID NO: 596 - DNA, 1337 bp, Homo sapiens; identical to SEQ ID NO: 594

SEQ ID NO: 597 - DNA, 1724 bp, Homo sapiens
ccacgcgtccgatcctcctgtcttggcttcctaaagtgttgggattacaggtgttagccactgtgcccagcccctttgacatttttaatagctcaacatttattaaacctgtaagtggcttaaagtttcaaaattctccattgtaagtcaaaaaatgtcttaagatttttatcccagacttatgctaagggttatgaatctgttccaccttttgtttgaaatagccacctgtctgatttgcttgtctatttcttcaaagaactctggggaaaacagtatgatagagtagcaaggagttggtttttcaaatcagataaatatgtaataaaattccatttctacctctcctaagacatgtaatttaacttcacaaagcctcagtttcctcatctaaaagatgaaaaaaataaaatctgtgcagtcatgatgttgaaataaattaatgcatatatatatatatatatatatagagagagagagagagagagagagagatacacacatacctatgttcctctttccctctgaatccacccagacataggtagtgataagggacaatttaaataaggcagcaaattaaaagtaggaaggttacattagcatgcttcttagctttacttcttatgaccatgatgtcattatttgagaaatgttagtttcagtcagatattctaagttcttatgcattaatagttaatttttttctctttgaagaatgaaagaggaccacaaggttttctctgacttagataggagatagtaaattaaaagaatatataaggcatcttgaattagccactattgagagcaattacctgttctagagaattctttagctatgtcctgaaatggtctgggttgttctcacctgtatctaatgtttgtggttgttcttcctagttgacctgttaggcttgttaaattggcgttccaactcccagaacattaaacacaacctaaagaagttaatggaagtggatggaggagagattgttaagtttttgcaagatacactagatgcactctttaacataatgatggaaatgtcagacagtgaaacctatgacttccttgtgtttgacgcactggtatttattatttcactgataggagacatcaagttccagcattttaatcctgtacttgaaacctacatttacaagcacttcagcgccactttggcatatgtgtaagtatgatctgaaggaactacatgttgttggatctttggatttgtactcttaggactggattgttgagaaacgagacggacctattactattcagtaaatacgcctgttaaggcagaactcttattctaagcttccgggtggaaaaagggaaccatctaagtattctaactctggaaagggggctaagatcagggccttcattctggatcaggcgaaatttccttaaggatccagaataggccaggcgtggttgctcatacctgcaattccagcactttgtggggaggattgcttgaggccaggaattcaagaccagcctaggcaacataacaagaacctatctttacaaaaaattaaaaagttagccaggtgtggtgacacacacctgtagtcctagctactcgagaggcttaggtgagaggattgcttaagcccagggaagtcaaggctgcagtgagctgtgatcatgccattgcactccagcctaagtgacagagcaagacttagtatctaaaaaaaaaaaaaaaa

SEQ ID NO: 598 - DNA, 1519 bp, Homo sapiens
gggtcgacccacgcgtccgaacaattctactgacaatgttattgtacctgctgccttgtattgttagcatggagatacccgatttttaaataagctgtgtattaaaactgagttagacattatatgtgcggattatcgtaaattagcacattgggccagtcagatctagtgaagagaggaaatcagagaagggctagaacttcagcagaccgtaatcacaaattctactacagtgatgctggacttcttgaggtcccagttgaaacttctcagctatctgcttttaggttttttattgttgagacagcgaggaataggtagaactagtgaaatttttgtaaactcataataataacttttctcaagcagggttgatgtaatttcaagtctgtcctgaggctacaataagtctgttgtaatgaagggaaagcaacaattttactgtgcagaaagtattcatccatttaaatgatcgtagctcctgtattgtggaactcacttggatgcagctgtaaagatatgttttcctgacacccagaacgtatgtgatgcgagaggaagacatcgagtgctaatttcttgatgtcaccatctccttgggaggaaactagtataggatttaaaaagaacccttttatgaactcatttggtgaattagctcccctaaaaatgccaatgagaactagggggtcatgggaagagtcgactaatctttcagggatatggagtttctgcctagaagtgggcaaagactccatgagatgaagatcttagttactgaatggtcattttttaaattcaaaatcaatacctgttgagataacagggaaactacatggtctgtcttgctgggcttatttcagcctttgagactggaataataatgaggcagtgtactctttcaacattgcagaaatctatttttacctctaaggtggactggacctagataacccctcccccctttagtgaaaatgtaagtaatgaattctgtgattgttgctaagctgacaagtcaggatcattcacattttaaaacttcatctttgtaaaactcagaaatggtgcttgttaacttgatgcacatatctctctactttagaagaaagagcatccataattagactcctacttttttttcatgccctagatagttaaagcctatcatctttttaagaatacaggccgtctgctttctatacagtaactggcttttattaatgatgtgtgaattaggttttcttttagttggttttcattttaagtgttctaaaatgccctctccagccacttgagtatagtggtggacagctggggctctggacctacgtgggttgtattctggctcttcgagcttcttaactgggtgaccactggggcaaggtcctaaatagcctttctgagcctccagtttcccatctgtaaaagaggtatactccactcttctgggagtgattgtgtgtcttaaataagaaagtatttgtttttaaaaaaaaaaaaaaaaaagggcggccgctcc

SEQ ID NO: 599 - DNA, 1108 bp, Homo sapiens
tgtctgtggtggagctggaggagacgcccttcaggaggttcctgggggagcgcgtgggtcgtgccctcatgaagatgtttgagaacaaccgggtgaagttctacatgcagacggaggtgtctgagctgcggggccaggagggaaagctgaaggaggttgtgctgaagagcagcaaggtcgtgcgggctgacgtctgcktggtgggcattggtgcagtgcccgccacaggcttcctgaggcaaagcggcatcggtttggattcccgaggcttcatccctgtcaacaagatgatgcagaccaatgtcccaggcgtgtttgcagctggcgatgctgtcaccttcccccttgcctggaggaacaaccgcaaagtgaacattccacattggcagatggctcatgctcargggcgcktggcagcccagaacatgttggcgcaggaggcggagatgagcactgtgccctacctctggaccgccatgtttggcaagagcctgcgctacgcgggctacggagaaggcttcgacgacgtcatcatccagggggatctggaggagctgaagtttgtggctttttacactaaaggcgacgaggtgatcgccgtggccagcatgaactwcgatcccattgtgtccaaggtcctgaggtgctggcctcaggccgttgccatccsgaarcgggagktggagactggcgacatgtcctggcttacggggaaargatcctgagctcacatgcagtagacttgggcaggcaaagggggcaccaagggcacaggccaagccttgggggcaggtgccaatytccagtcccaggatcccccagggcagaacctgagccctcccagtgcttgccttcagccacctggctcccctcctgggaggcctctgctggatccagaagatgctcaaccctcaaggcctctgctgccactgacagctggcactggaggcaggacaagccctgcctcttctccctctattgggactggtcccctgaagaaccctgcaacatgttagacattaccgtaaaattaaaacgcacaaatttgcagaaaaaaaaaaaaaaaaaaaaaaaaaaaaaaaaaaaaaaaaaaaaaaagggcggccgc

SEQ ID NO: 600 - DNA, 1579 bp, Homo sapiens
  SITE (1388): n equals a,t,g, or c
ggccgggcggtcgcagggactccggggcgaccgccgcgagtccgcagtagttcgggccatggaggcggagccgccgctctacccgatggcgggggctgcggggccgcagggcgacgaggacctgctcggggtcccggacgggcccgaggccccgctggacgagctggtgggcgcgtaccccaactacaacgaggaggaggaggagcgccgctactaccgccgcaagcgcctgggcgtgctcaagaacgtgctggctgccagcgccgggggcatgctcacctacggcgtctacctgggcctcctgcagatgcagctgatcctgcactacgacgagacctaccgcgaggtgaagtatggcaacatggggctgcccgacatcgacagcaaaatgctgatgggcatcaacgtgactcccatcgccgccctgctctacacacctgtgctcatcaggttttttggaacgaatggatgatgttcctcgctgtgggcatctacgccctctttgtctccaccaactactgggagcgctactacacgcttgtgccctcggctgtggccctgggcatggccatcgtgcctctttgggcttccatgggcaactacatcaccaggatggcgcagaagtaccatgagtactcccactacaaggagcaggatgggcaggggatgaagcagcggcctccgcggggctcccacgcgccctatctcctggtcttccaagccatcttctacagcttcttccatctgagcttcgcctgcgcccagctgcccatgatttatttcctgaaccactacctgtatgacctgaaccacacgctgtacaatgtgcagagctgcggcaccaacagccacgggatcctcagcggcttcaacaagacggttctgcggacgctcccgcggagcggaaacctcattgtggtggagagcgtgctcatggcagtggccttcctggccatgctgctggtgctgggtttgtgcggaccgcttaccggcccacggaggagatcgatctgcgcagcgtgggctggggcaacatcttccagctgcccttcaagcacgtgcgtgactaccgcctgcgccacctcgtgcctttctttatctacagcggcttcgaggtgctctttgcctgcactggtatcgccttgggctatggcgtgtgctcggtggggctggagcggctggcttacctcctcgtggcttacagcctgggcgcctcagccgcctcactcctgggcctgctgggcctgtggctgccacgcccggtgcccctggtggccggagcaggggtgcacctgctgctcaccttcatcctctttttctgggcccctgtgcctcgggtcctgcaacacagctggatcctctatgtggcagctgccctttggggtgtnggcagtgccctgaacaagactggactcagcacactcctgggaatcttgtacgaagacaaggagagacaggacttcatcttcaccatctaccactggtggcaggctgtggccatcttcaccgtgtacctgggctcgagcctgcacatgaaggctaagctggcggtgctgctggtgacgctggtggcggmcgc

SEQ ID NO: 601 - DNA, 1561 bp, Homo sapiens
ggccgggcggtcgcagggactccggggcgaccgccgcgagtccgcagtagttcgggccatggaggcggagccgccgctctacccgatggcgggggctgcggggccgcagggcgacgaggacctgctcggggtcccggacgggcccgaggccccgctggacgagctggtgggcgcgtaccccaactacaacgaggaggaggaggagcgccgctactaccgccgcaagcgcctgggcgtgctcaagaacgtgctggctgccagcgccgggggcatgctcacctacggcgtctacctgggcctcctgcagatgcagctgatcctgcactacgacgagacctaccgcgaggtgaagtatggcaacatggggctgcccgacatcgacagcaaaatgctgatgggcatcaacgtgactcccatcgccgccctgctctacacacctgtgctcatcaggttttttggaacgaatggatgatgttcctcgctgtgggcatctacgccctctttgtctccaccaactactgggagcgctactacacgcttgtgccctcggctgtggccctgggcatggccatcgtgcctctttgggcttccatgggcaactacatcaccaggatggcgcagaagtaccatgagtactcccactacaaggagcaggatgggcaggggatgaagcagcggcctccgcggggctcccacgcgccctatctcctggtcttccaagccatcttctacagcttcttccatctgagcttcgcctgcgcccagctgcccatgatttatttcctgaaccactacctgtatgacctgaaccacacgctgtacaatgtgcagagctgcggcaccaacagccacgggatcctcagcggcttcaacaagacggttctgcggacgctcccgcggagcggaaacctcattgtggtggagagcgtgctcatggcagtggccttcctggccatgctgctggtgctgggtttgtgcggaccgcttaccggcccacggaggagatcgatctgcgcagcgtgggctggggcaacatcttccagctgcccttcaagcacgtgcgtgactaccgcctgcgccacctcgtgcctttctttatctacagcggcttcgaggtgctctttgcctgcactggtatcgccttgggctatggcgtgtgctcggtggggctggagcggctggcttacctcctcgtggcttacagcctgggcgcctcagccgcctcactcctgggcctgctgggcctgtggctgccacgcccggtgcccctggtggccggagcaggggtgcacctgctgctcaccttcatcctctttttctgggcccctgtgcctcgggtcctgcaacacagctggatcctctatgtggcagctgccctttggggtgtgggcagtgccctgaacaagactggactcagcacactcctgggaatcttgtacgaagacaaggagagacaggacttcatcttcaccatctaccactggtggcaggctgtggccatcttcaccgtgtacctgggctcgagcctgcacatgaaggctaagctggcggtgctkctggt

SEQ ID NO: 602 - DNA, 1581 bp, Homo sapiens
  SITE (466): n equals a,t,g, or c
ggccgggcggtcgcagggactccggggcgaccgccgcgagtccgcagtagttcgggccatggaggcggagccgccgctctacccgatggcgggggctgcggggccgcagggcgacgaggacctgctcggggtcccggacgggcccgaggccccgctggacgagctggtgggcgcgtaccccaactacaacgaggaggaggaggagcgccgctactaccgccgcaagcgcctgggcgtgctcaagaacgtgctggctgccagcgccgggggcatgctcacctacggcgtctacctgggcctcctgcagatgcagctgatcctgcactacgacgagacctaccgcgaggtgaagtatggcaacatggggctgcccgacatcgacagcaaaatgctgatgggcatcaacgtgactcccatcgccgccctgctctacacacctgtgctcatcaggttttttggaacgaantggatgatgttcctcgctgtgggcatctacgccctctttgtctccaccaactactgggagcgctactacacgcttgtgccctcggctgtggccctgggcatggccatcgtgcctctttgggcttccatgggcaactacatcaccaggatggcgcagaagtaccatgagtactcccactacaaggagcaggatgggcaggggatgaagcagcggcctccgcggggctcccacgcgccctatctcctggtcttccaagccatcttctacagcttcttccatctgagcttcgcctgcgcccagctgcccatgatttatttcctgaaccactacctgtatgacctgaaccacacgctgtacaatgtgcagagctgcggcaccaacagccacgggatcctcagcggcttcaacaagacggttctgcggacgctcccgcggagcggaaacctcattgtggtggagagcgtgctcatggcagtggccttcctggccatgctgctggtgctgggtttgtgcggagccgcttaccggcccacggaggagatcgatctgcgcagcgtgggctggggcaacatcttccagctgcccttcaagcacgtgcgtgactaccgcctgcgccacctcgtgcctttctttatctacagcggcttcgaggtgctctttgcctgcactggtatcgccttgggctatggcgtgtgctcggtggggctggagcggctggcttacctcctcgtggcttacagcctgggcgcctcagccgcctcactcctgggcctgctgggcctgtggctgccacgcccggtgcccctggtggccggagcaggggtgcacctgctgctcaccttcatcctctttttctgggcccctgtgcctcgggtcctgcaacacagctggatcctctatgtggcagctgccctttggggtgtgggcagtgccctgaacaagactggactcagcacactcctgggaatcttgtacgaagacaaggagagacaggacttcatcttcaccatctaccactggtggcaggctgtggccatcttcaccgtgtacctgggctcgagcctgcacatgaaggctaagctggcggtgctgctggtgacgctggtggcggmcgc

SEQ ID NO: 603 - DNA, 1960 bp, Homo sapiens
  SITE (256): n equals a,t,g, or c
gggtcgacccacgcgtccgaaaaaaactttttggggagatatgctttcatttctcttgggtaaatacctatcagtgaacttgctgggtggtatgtatggtaagtgtatgtttttattttataagagactatttttggtggcttttaacatatactttttttgctttaatgctacagttcctagtaatgttgactaagtgtggattttcttttttaaaatcctgtttgggatttattgtatttggattctgtgagtngttttctcataagatttggaaaaactctgcgttctcttcttcagttactgcgttttgtttttgccctccctcttttgcaattctaattgaacgtagacctttttactccctttcatgtcttttaacctcttttttctgttttccttttctttgcctctctgtgctgccttcagattatttcattagaactatctgtcagtttcctaattctctttttggctttgtctcatctgtcattagaaatatctactaggggccaggtgcggtggctcaagcctgtaatcccagcactttgggaggccaagaggggggatcacaaagtcaggagatcgagaccatggccaatatgatgaaaccccgtctctactaaaaatacaaaaagtagctgggtgtggtggtgcgtgcctgtaatcctagctactcgggaagctaaggcagagagaattgcttgaaccagggagttggagcttgcagtgagctgagattgcgccactgcactccagcctggagacagagcgagactccctctcaaaaaaaaaaaaaaaaataaagaaaccttacaaaatgcatttaatcagtctttcttgttttctatattttatttctttgaacatattaaatatggtcatttcttagtctgagattctggtaggtctttttcaatatctaatgtttcttttggttctttttccttctaccttgttgaattgtatgtttaggtttcttttcttctttataagtttgtatgtggaaattatgtggaaactccaggagctgttgcttttgagagtcaccattatagattgaatcctcaagggcttttggaccaccaaaatgacatgaattcaggctgcgaatccatgtgatttgatggctggtttttaataccagtttgtgagtggtgctacttttcaccatcttagagctaaggtttaaaatttaagacagttggcttttctttttacgtgttttttttttttcttttgtggtgggagtgtttctaggacctatatactgaagatgtagtactggagtttcatctttttgagagggaaatcaccttaatgccagttcaaggtttttctcctgtccttcatcgcctttgagatgggaaaatctgtacccaaggtcacctggtttagcaaatgttttcaaagtgaaaggtagcttcagtctttagcttatcacatagggatcccttcttcatttgatactttgccttaaccttgctttcttaacccttaatgaccaacttaaaatatttaaatatatgtaacaattgtaaatatttaatatatgtaaaagttgtaaatagttctgtggggtggatacttagcctaccatgtttcctacaaaatgtgttttttaatgcaaacttactacccctttaacccttttaaggtagatctacctatttcctccttattgcttccactgtcttcttggcttagctgtagtacaggggatcctgtgaatcatctttgaatccttgctttgtatacagtggacattcaaggaataaatcacaatggaagattcttaatttggactccataatgtatataaggaaattaacccagattaaaagatcaattgcaaatccagaaaaatattttcaaaaaatgggttaactggtggattcatgtatgtatgtgtatacaaattttttaacatgaaaatttataccgtaaaaaaaaaaaaaaa

SEQ ID NO: 604 - DNA, 1077 bp, Homo sapiens
cagctgtgggcccgggccgtcgtgggctccggcttgcgtgcggagatgagcgggtccctcggccgagctgcggcgrctctgctccgctgggggcgcggcgcggrcggcggtggcctttggggtccgggcgtgcgggcggcgggctcgggcgcgggcggcggcggctcggcggacagttggacgcgctggtgaagaaggacaaggtggtggtcttcctcaaggggacgccggagcagccccagtgcggcttcagcaacgccgtggtgcagatcctgcggctgcacggcgtccgcgattacgcggcytacaacgtgctggacgacccggagctccgacaaggcattaaagactattccaactggcccaccatcccgcaagtgtacctcaatggcgagtttgtagggggctgtgacattcttctgcagatgcaccagaatggggacttggtggaagaactgaaaaagctggggatccactccgcccttttagatgaaaagaaagaccaagactccaagtgagggcggccaagtcctcgctgagcagagagggagccgttcatgtcagagactcactgccagaaaagccttacccattttggttttcactattgagaccgcaactgcttgcactgatcattttggttcgtgagcagttggtgattttagttggtctggtgttcgggctaagaatattttattgtggacttaattacaaccactgcactgtaatgattcaatgctgtattatgatattgctgtaaacaaaattcattcttatattgtcacttattctttgcctgattcagaagttaaataggagctttggaatcattattcatgacccctctgcaaatgtgtcagtctccaaagagagtatctccccccaaattttgtgtagcttcttttgttatggaaaatggtggacaaaaaaagaaactgtgataactggggcgttgttttttaaaataaactccagcacagggatgctgtgcatgcctgagttgattccgaagtgaaaaaaaaaaaraaaaaaaaaaaaaaaaaaaaaaaaaaaaaaaaaaaaaaaaaaaaaaaaaaa

SEQ ID NO: 605 - DNA, 2054 bp, Homo sapiens
gtacgcctgcaggtaccggtccggaattcccgggtcgacccacgcgtccgcccacgcgtccgcccacgcgtccggctccgaacaggaagaggacgaaaaaaataaccgtccgcgacgccgagacaaaccggacccgcaaccaccatgaacagcaaaggtcaatatccaacacagccaacctaccctgtgcagcctcctgggaatccagtataccctcagaccttgcatcttcctcaggctccaccctataccgatgctccacctgcctactcagagctctatcgtccgagctttgtgcacccaggggctgccacagtccccaccatgtcagccgcatttcctggagcctctctgtatcttcccatggcccagtctgtggctgttgggcctttaggttccacaatccccatggcttattatccagtcggtcccatctatccacctggctccacagtgctggtggaaggagggtatgatgcaggtgccagatttggagctggggctactgctggcaacattcctcctccacctcctggatgccctcccaatgctgctcagcttgcagtcatgcagggagccaacgtcctcgtaactcagcggaaggggaacttcttcatgggtggttcagatggtggctacaccatctggtgaggaaccaaggccacctttgtgccgggaaagacatcacataccttcagcacttctcacaatgtaactgctttagtcatattaacctgaagttgcagtttagacacatgttgttggggtgtctttctggtgcccaaactttcaggcacttttcaaatttaataaggaaccatgtaatggtagcagtacctccctaaagcattttgaggtaggggaggtatccattcataaaatgaatgtgggtgaagccgccctaaggattttcctttaatttctctggagtaatactgtaccatactggtctttgcttttagtaataaaacatcaaattaggtttggagggaactttgatcttcctaagaattaaagttgccaaattattctgattggtctttaatctcctttaagtctttgatatatattacttgttataaatggaacgcattagttgtctgccttttcctttccatcccttgccccacccatcccatctccaaccctagtcttccatttcctcccgccagtctccattgaatcaatggtgcaggacagaaagccagtcagactaatttccttctttcctcgcacttctccccactcgtcatcttttaactagtgtttcacaaggatcctctgaaaccctctctgtgccccaagtacagatcccattacttctgctttcgtatctcctcaggcaaaagtggagggtgccttatgggccctcctcataggttgtctctgcatacacgaacctaacccaaatttgctttggtgccagaaaaactgagctatgtttgaacaaagatgtcgtgcaaactgtactgtgaacaacagttggtttaaaatatgaggggcaaggaggaggatgcatttcaaaagcttgattgatgtgttcagagctaaattaagaggagttttcagatcaaaaactggttaccattttttgtcagagtgtctgatgcggccactcattcggctccccagaattcctagactgggttaatagggtcatattgtgaatgtctcactacaaaatgacttgagtccagtgaaatctcattagggtttaagaatatttcagggatccttaatgttttgatttttgttttctgaaattggattttattttattttatcttataatttcagttcatctaaattgtgtgttctgtacatgtgatgtttgactgtaccattgactgttatggaagttcagcgttgtatgtctctctctacactgtggtgcacttaacttgtggaatttttatactaaaaatgtagaataaagactattttgaagatttgaataaagtgatgaagttgcattacaaaaaaaaaaaaaaaaaaaaaaaaaaaaaaaaaaaaaaaaaaaaaaaaaaaaaaaaaaaaaaaaaaaaaaaaaaaaa

SEQ ID NO: 606 - DNA, 788 bp, Homo sapiens
ttttttttttttttttttttttttttttttgcttcctacttttcaggtttaaatttatcttttttcttctaaaagtatgtttttatcttctaatttccctatcttctctattcttttcttcgccttcccgtacttctgtcttccagttttccacttcaaacttctatcttctccaaattgtttcatcctaccactcccaattaatctttccattttcgtctgcgtttagtaaatgcgttaactaggctttaaatgacgcaattctccctgcgtcatggatttcaaggtcttttaatcaccttcggtttaatctctttttaaaagatcgccttcaaattattttaatcacctacaacttttaaactaaactttaagcagttaaagtcaccttcattttatctaaagcatgcccttctattggtattaattcgggctctgtagtctttctctcaattttcttttaaatacattttttactccatgaagaagcttcatctcaacctccgtcatgttttagaaaccttttatcttttccttcctcatgctactcttctaagtcttcatattttctcttaaaatcttaagctattaaaattacgttaaaaacttaacgctaagcaatatcttagtaacctattgactatattttttaagtagttgtattaatctctatctttcaaagagaaaaaaacttatctgcggtttcctcaagtccgcctgccccctcagcagaagcccctgcgctggctgcctcaatgcctccccttctgtcgtttctcgcagccgta

SEQ ID NO: 607 - DNA, 782 bp, Homo sapiens
tttttttttttttttttttttttttttttttctggtttaaatttatcttttttcttctaaaagtatgtttttaccttctaatttccctatcttctctattcttttcttcgccttcccgtacttctgtcttccagttttccacttcaaacttctatcttctccaaattgtttcatcctaccactcccaattaatctttccattttcgtctgcgtttagtaaatgcgttaactaggctttaaatgacgcaattctccctgcgtcatggatttcaaggtcttttaatcacttcggtttaatctctttttaaaagatcgccttcaaattattttaatcacctacaacttttaaactaaactttaagctgtttaagtcaccttcattttaatctaaaagcattgcccttctattggtattaattcggggctctgtagtcctttctctcaattttcttttaaatacattttttactccatgaagaagcttcatctcaacctccgtcatgttttagaaaccttttatcttttccttcctcatgctactcttctaagtcttcatattttctcttaaaatcttaagctattaaaattacgttaaaaacttaacgctaagcaatatcttagtaacctattgactatattttttaagtagttgtattaatctctatctttcaaagagaaaaaaacttatctgcggtttcctcaagtccgcctgccccctcagcagaagcccctgcgctggctgcctcaatgcctccccttctgtcgtcttctcgcagccgtag

SEQ ID NO: 608 - DNA, 1387 bp, Homo sapiens
ggcacgaggaatggccaagatacatgtgatgtcaataaatctttatttcctatcccctgctctgctctctatggcaatgggcctgacccctgaaggctgtaagtcctagactctcacatcacctggcttctgcttttgagcaacgagaagtgcttatgagaggtggcatgtggggctgcaggaggaagggagcacacaggatagctttctgctttgtgtgacttctccagcagaggctgcatctcccctgtggctcggcttccggtggatgggcatgccgccctgccggctactgtcgggtgacctggctctgggctctggcaacaccactactttcttttttctctctctgctgttgttaatctctgggttgcctccctatctcctgttccgcttccaactcttccatcacctatgtaactaattccctgcattgattcctgtctccgcctccccacattttaaaaaatagactgttttctttgttattccctgactgttaatgagtagacagatgggagaaaaatcaagcacatttaaatacttttcaaataataaaagcagtgaacatttgttgctagattaccttggaaataagtcagctcatttaatgtaaacatttggaggcatttataattagaccttttctgtttgaacaattcacaatagttttaaaaattgaaaggcaagaaaaatgtagtagatgtatgatgtgggaataaaaggccttccagcattcctcttgacgctgtttgacagaattcctgccagctcagctccttcctcctcttgctaaccatggagaacaggagcaggaacatgggttcacataggcaaagggttctggaactgctagagttcttttgttcctataccccaaggcctgcatgagtgaaacaggttcatctgcgccaggaaaatgatatgttgtagtaaccagttccctcttcttatttcttgattccatcaagccctcagtatgttggagtctgaggttttggtaaaaatgcagaaaacatactttctaatattatctgtaatttttcagaggacattcccaaaaccaaaggacaactgaggagactgcccagcacataatgaataaataagaaaatgagtgaggagttattaacatcatttggaaaaaagatttcccattcacttgatattgtttgttcactcatttagtcattaaaagtgagattaataaaatctgaaaatgttatataataactttaaaaagccaggtaattaataatctgcactgatattacatccacagtaccacagtatttatgtgtatgaattaaggattaaaagataatgtggataaataaactattgatctatgtctgtgtagaaaaaaaaaaaaaaaaaaaaaaaaaaa

SEQ ID NO: 609 - DNA, 545 bp, Homo sapiens
ggcacgagccgggagatgccagccttggatttggcatgagggtgagtgtctctcaaggggcggactgggtggctgggagaccaggacctgggaatggcctggccacagcctggggtcctgcagctcctcccagaggccacttataagcagccctgccatgtggccacacagcactggtcatgccatacccatgcacagtcatacatgtccacacacacatgcacacgtgtgcccaaacatgcatgcacatatatggccgtacttatacatgtgtgcacacatacacatgcatctatgcacatacatgcccatacacacgcacacacatacacacgcacacacacatcaaccccagagtcattcgttctgtggagggacaagtggactcagggcagcgccaggctgaccacagcacagccaacacgcacctgcctcaggactgcgacgaaaccggtggggctggttctgtaattgtgtgtgatgtgaagccaattcagacaggcaaataaaagtgaccttttacactgaaaaaaaaaaaaaaaaaa

SEQ ID NO: 610 - DNA, 924 bp, Homo sapiens
agggaaatattaaacagagattgtgtctctttttcttttggttccataagaaacgaaaagaactgagagattgtatctttaatacgaatacagtactagttcatgatgttttaragatttggttgattcttgcttaattaaaaaatatttacagttgcagttttatttaacagctctgcattctcttctgggtgtgcaagtgctgatacaaacagatcaattagaatggccccaataatgaggcttttggaagccatctttatgacagctattgttcccagtgttttgcaactatgaacttatataaccctcatcacaaccctatgaggtagatactctaaatattttacccacttcagatggagaaactgaagcagaaagaggttaataggtactacatggcagaactgagggattcacatccccgcaaatgactccagtgcccacttaactaccaagctatactggctttctcattagtttgataggttttttaaatggttactttatatacaagcttcattaaatagaaatttcattaaatagaaacctgtaattccagtgtacctagaatgtaccctgcagggtttatcaaggaagttggttaaaaaaataatcatttaggccgggtgcagtggcttacacctgtaatcccagcactttgggaggctgaggtgggcggatcacaaagtcaggagatcgagaccatcctggctaacatggtgaaaccctgtctctactaaaaatacaaaaattagctgggcgttgtggtgggcgcctgcagtcccagctactcaggaggctgaggcaggagaatggcatgagcccaggaggcaaagcttgcagtgagccaagatcacgccactgcactccagcctgggcaacagagcgagactccttctaaaaaaaaaaaaaaaaactcga

SEQ ID NO: 611 - DNA, 1433 bp, Homo sapiens
ggcacgaggttcaatgactttactaatggttaccaaatgtataccaagcaggacaggtgataactaaatattaaagtcaaaagggaatttattgcccagggccctagaattcattcttcctcaagacttaaaatcaaatgaactgcttgtttcctccaggcaagagtattaagaaataaccaggctagtattttgataaaccacaatcacttaccttgtaaacttgtgttttttctctcagacaagttttggtattgtcggctttcgccaaatcacaaagtcctgcattacggagacttagaagagagtcctcagggagaagtgccccacgattccttgcaggacaaacgtaagtagctctccttggcagaggcctgagtggtggtcggttggttgtttcctagtcacaatatatcacgcaacagaactatcagcctaagtaagccctttgaacacatctcatctagttgtaagtcgtcgcctgagccatctcatcaagtacaagacctggatggacttggggtttggaactgaataggggagaatgtaaaatggatgcaaaggtatcttaattgaaagacgtaaactgggggttcaaatgtccactttttacattatttatccaggtgctgtgtcaaggagcaaaaacaatacaaacctgattctgtcagctgtctttttctgaaaacccaaaataatttcttattttcgtaacttatatgcctgacccctacaacatttattccttacaatttagtgtatcccatagttatgacacagagttaatggcagagccaaatatagctagtttacctcaaagacactttgaaaatgatgatccgttacctctactgtttgctaaatatttctcttgtatattttttggctttttctatatgttgtctgttttaacatacatgcttttgaagagacagtaatgtgcaggattcttttagccccacagggaaccaggtgccaggttgacagtgttaacaatacaaattaaacaaatttgcccacagaaccctctaaatccccttgtaaatttaactgttagtccaaagaggaacagctctttggacactaggaaaaaaccttgtagagagagtaaaaaatttaacacccatagtaggcctaaaagcagccaccaattaagaaagcgttcaagctcaacacccactacctaaaaaatcccaaacatataactgaactcctcacacccaattggaccaatctatcaccctatagaagaactaatgttagtataagtaacatgaaaacattctcctccgcataagcctgcgtcagattaaaacactgaactgacaattaacagcccaatatctacaatcaaccaacaagtcattattaccctcactgtcaacccaacacaggcatgctcataaggaaaggttaaaaaaaaaaaaaaaaaa

SEQ ID NO: 612 - DNA, 477 bp, Homo sapiens
ggcacgaggttttacttaataccttcattgtcctttaagtattcggaatgagaattacagtgcttcattcagcataagacttttgttcatgctgtttctttggcctgaaatatctatcccttcccaattgcctaattaattcctatttgtctttcagatcttagctagttcatcacttcctcagggaaacattccctaatttctgtcacagagtaagacccgttgttatacgtctcacctgaccatgtacctctacttagcatttaacacgtgtaattttgtatgtattggtttgattaatgtcagaaccactagattgtaaactccatgaggaccggaattttgtttctgtcattgtcattgttcaactttgtattttttatgcctcatacagtgcctggcacatagtaggtgctcaattaactttattgaaagaataaaatgaatggatgaggtataaaaaaaaaaaaaaaaaaa

SEQ ID NO: 613 - DNA, 1857 bp, Homo sapiens
  SITE (1808): n equals a,t,g, or c
  SITE (1822): n equals a,t,g, or c
  SITE (1855): n equals a,t,g, or c
aatgttcaaaataagttatataatgggtaataatttttagatttcttagataagttacacatycccaggatgaggtgaactttcaaatatcaattttaaggctattgattatattgggaaaaatgaacaatgacttggatgttaatgtgtgtgttttccttttttaagggtatgcctttttctgtgtatgggaatgcaatgattcctccagtagcacctatccctgatggtgctggaggacccatatttaatggccctcatgctgcagacccttcttggaactcactgataaagatggtttccagctccacggaaaataatggccctcaaacggtgtggactggaccctgggcacctcacatgaacagtgtgcatatgaaccagcttggctgatgaggatcagcttgttagcctgcagattccttttcatttggaggaaatcacaagtggccgaaaaaaaaaattatgctcccaaatcattctactgatgtgcttgactgaagtgtgtaggctttttgcagaagatcttactaactgacctattttctgtgaacatttgtgactgcccattccccatcatcatccgttttaccttagttagcatttttcttatcatttttctttttttctttccctcttcccctttggacataactttctgttgaagctgttctttggctggttggttttagtactgtaaactgcttctgagcaaacacggaaatttagcaaaattatgtaaacttgatcctgaagttttagaatggcaaataaatgtacaattgtttacataacagaaaaggctaagcagaaagtaaatttcaatatgtcagtatagaggctctactttatgtagacttaaattaatgtgagatatgtaccttcatattcagaaatctggatgtttccttcatacattaaactattaataagcataacttttctactggtgtaatttaagtataaagtaaaataatgggcattatcattggatgtttccccacattggcttttaaaatacccatcttgctttctttttggtttatttgtagcaaggcacatatagaagaagaaatttctggcttttccatgttgttttattaccttttctcacttttaaaactaatacagacttatctcctcactcctttttctctccttacctttaccactaataccagtaaaattatctttctgatagtgaaaaggttctgtcaagattttcactgtaatggctgctacagagatggaccatcttcatcatcaccagtggtttcttctaattataaaatgtttaaactttctgagaatttaaaaagccaccactgttcccagtcagcatatacaagctcttaatattctgtttattaaataattcaatgtactattttatattggatgatattgattcttaacattggcttttcagtcatcaacagtcaacataaaaatttcaattttcagtaatttagtggaaaatatcttatttcttttttcaattttaaaggcttcctgcttttttacccttgtatattatcagtgaaaaggatcaacagttaatttgagccaagtaataaaagaaattctgcatttgtcacgaagacaatttatggtagacagataaatacacagattacagtgtaaagtctccatttaacctgtttataaaagatacaaggccacactaaactactcagtgggatttatatattccatccacttgaaacaataaacagtaatgtatccaagaagattatgtgtcctaccctgtctcatggaaaaattaattatatggttgaaatgtaaangaaagtgaagcatnaaaaatcgggtgatgtattatgatccatttgtntt

SEQ ID NO: 614 - DNA, 1267 bp, Homo sapiens
ccacgcgtccgctgtttactgatatctcatgcaatagaagccctgattttggatccagaatcagcaagtttccaggaatatggatctactggaacagcccatgctgatagtgaatatgaaagaagaatgatgtctgtatataatcatgtcttggaggaggtagaatcactcaatcggaaatatacccctgtttcttatatgcacacagcatgcctctgtaatgccatcattgctttgctgaaagttcccctttctttccagagatatttttttccagaaactacagtctaccagcatcaagcttgctctgtcaccatcgccccggaatcctgcagagcccattgctgtccagaataaccagcagctggcgctaaaggtagagggagtggttcagcacggatctaaaccaggactcttccgcaaaattcagtctgtctgtctgaatgtttcttccacactgcagagtaaatctggacaagactacaagatacccattgacaacatgaccaatgagatggagcaaagggttgaacctcataatgattacttcagtactcaatttctgttgaactttgctatccttggaacacacaacattacagtggaatcttctgtgaaagatgccaatggtatagtatggaagactggtcccagaactaccatatttgtaaaatccctggaagacccttattcccagcaaattcgcttacaacagcagcaagcccagcagccattacagcagcagcagcaacgcaatgcctacacacggttttaaccatggaatgaatgcactgcagactctcaagagatcaatcaaattgccagaaacagtttggtttttcatatggaataagtattaaagttacagtgtagttcatttattcattgatttttgtaatgtaatattctggaaaaaattttgttttcttaaaaattttgtctgacagctgggcgtggttgctcacgcctgtaatcccagcactttgggaggctgaggtgggcggctcacgaggagatcaagaccatcctggctaacacagtgaaaccccgtctccactaaaaaatacaaaaaaattagccgagcatggtggcaggcgcctgtagtcccagctacttgggaggctgaggcaggagaatggtgtgaacctgggaggcggagcttgcagtgagccgagactgtgctccagcctgggcgacagagcgagactccgtctcaaaaaaataaataaatacattttgtctgaaaaaaaaaaaaaaaaaaaaaaaa

SEQ ID NO: 615 - DNA, 915 bp, Homo sapiens
gaaagatcagagagaagtccagagccttgcctgcttgtgatcctggtggagaaggtggagtatggtgagctgcttgctaaggacagccaggcaacactgtgtttgtgaagatgtgctccaccttctcctctgtgcatcccagctcctcctgctgaaacagctgagcttgctttttggatttcttagactcctggcctctgagagacacctctaaggacaaactgaccttgcattgggaactttattatccagatcctcataggctttgtctactctggattgcttgttgcaacagttcttaggaagcaagattgtctcctgcaccagcatctgcctgtgtttgcttttacctactttgagcaagacccagtgaggccctagctctgttggtcctgaaaagcctgaaccctgaggctgtttctcctgcctccaaaatgcaattataggaaataagaagcacagaaacagtggaaacaaccaggaggagaaacaagaaaacctaaaattttcaatattcaaaaatacctgtcgtggtggttgatgcagaaaacactgagttcatcaaagagctttgtaattgttggaccagagaacccctttgctacaggaactgatatgttttgtctttctggcctagtcaagggaggataagtaagtatctggggcatggaaggaatgcactcttgggctgttttgcttgtatctgactcacccctgactctccagtgaagcagaaaggaagaaacctcacaccacccaggtgtggccagactttggccattattgtgaatccccaagagttaccacaggcccttcccaaatatatatttaatcttgtggttaaaaaaaaaaaaaaaaaaaaaaaaaaaaaaaaaaaaaaaaaaaaaaaaaaaaaaaaaaaaaaaaaaaaaaaaa

SEQ ID NO: 616 - DNA, 1358 bp, Homo sapiens
gcccacgcgtccggagggggtgtccggtcctgcccatccgatactctggtggaaatgtggctctttgcagcatgtacgtttctccctgattttkgttgatgcatatttccccgtttaagtagccgttagggcgcagtatcggcagcttgacacccaccaagcaaaagtttcagcctggaaaaaaaatgggggggaagggtggatgaaaaggagggagagaaggtggaaatggtttttttttttttttttctattttctttctttttttttttttttttttttggtcaacagccgtttttctagttccaagttttaaatacatggaaggaagtccgggagaaccatatgaaggagcaggaggagaggaagaaactttttttccttcttttccaggagtagctggaaattaagatcgggttccttttctgccagcttggaagggcaaccccatgactgattgcgattctgaggatgtctatgcaaagttggattcttgttacagtgtatccaatctgaagtattgcacatctgaactgggactgttaacactgatgccaatacagtgtggggtgccagaaagtgtctgctgatatttgtggaaaaaaaatctattttgtttacctactgtatcaaaggggagtctgggggagaatggtagtattttttttttttatcagctgtgaaaaaaatgttacagatctgcacattttcgtgtgtactatggtgtgtgtgtgtatgtgtgtggtgtgtgtgtgttttaagtttagccttttgtttttgttttttggttggcagtaaccgattttaatgactagcttttaaaaatacagtacaaagactttgtaaatgtgattcagggcccccagcacccctgtgtctgcagagtgccttcaaaactcagctgttccagccggtgccaacctgtgaacttcccaccatatcccagaatctgctattccccaaaccacttcccagtttcctttcagtaatctttctgaaggagccaggacaatagggcctgttgtttagtgaatttctttattattttcagcctttaaaatgtaatttccatctcttgcaatgaatttgtttcccttttttttgcttcattttgtttaaattttcaggtatttagctcccctttcatattatttttaaattttttaattacctgttgtagggtgttcctccagaagcaaagagcaaaattttactgttgtgatgtaccaattctaactaattgtaatttttaatttcatgcgtttaatcattgtctcttcattttaagacttttaatacaaatgtcatttttaaagaaacaaaaaaaaaaaaaaaaaaaaaaaaaaaagggcggccgc

SEQ ID NO: 617 - DNA, 1335 bp, Homo sapiens
ccacgcgtccgcgacccacgcgtccggtcaaggacaagtgccttctaaggcatggataagggctttcttcttatgaaaaagtctagactgtcttactgtgaagatggccagggaggatagcaagcaatggcattcttgaacagtctaaggcaggtttctcagtgtggtcctgagaacagaagcatctgcatcacctgggaatgtattagaaatgcaagttcccagccccatcccagacctactgaatcagaaactctgggggcgagggctgaaacctgctttcataagcccttcaggcgatactgatgtaaactaaagcttaaaaaccaccgttttactgtgacttcatgaagaatataattgcaatatcacctaaatttttatcctggctgggatggggcagattcttactatggacaatttctggaacttacagtatgaagagcagatgaggagtttgagacaaagaaaaaattgtacagggagtttagtgaattttccatcaggttggccattactttctttctctaaagtctcaggatgtctggaagcaaggaaagacaaaagacttgaagcaccgggtgcatgctgtgtgtcacaagtgaggtggagagttggctgtggaaagtacagcaattcctctggaattaaatgaccgaccaacacagtaccaagaggatgaagagaagatgttttgcgttgctacatgaatcatggatgactcatatttcacttgcatatgaaatataaggcagttaacatcttgtttgtggcttaagcaaggacattaatcctactagatgaaggggaagttggttctgttgtcttaagggatgcccccttgtgattttggtcaactgaatgaaaaagaaaagatagccttggacctttttttcatgggaggtttggaggtcaagcatgtagaaggaaaaggctgtagtcatgaatatagaactgtctgctctccaccttttcctcactctacatttagtcatcacactgaacaggatgtggcctgctgacagtgagtagctgaagtgcctgtttggtaagtaggttagcattcatcatgaactctgaaagccatttcagagtttggctgctgctctgaccctgctgtggtacaaaaaacatggattttttgtttttttaactggagtaataccaaattccctttagaagcttgaagtttgatactattgctttccccattataaggattatacagtattaattaattataaggcccaaagtttgttttggcaaataaagtattattctctatcatcaaaaaaaaaaaaaaaaaaaaaaaaaaaaaaaaaaaaaaaaaaaaaa

SEQ ID NO: 618 - DNA, 932 bp, Homo sapiens
  SITE (20): n equals a,t,g, or c
  SITE (28): n equals a,t,g, or c
tcgacccacgcgtccgcggnacggtggncttggttgtcaatgaagacaacctggtacctgcaggatgctggcagtgccttgtccctgggggtgagttgtgacaaatgctgtgttctctattgttactttttctccttctgtttgtcattccgaagtcgccctggcagcatacaagtggctggtttgctacctgctccgagagacttatcaaaaattaaaccaagagaaaagatcaggaagcagtgactttgaagcaaggaacaaatgccaggtgtcccacggccgtccgttggcgctggccttcgtggagctcacggtggtccagaggttccacgagcacgtgcaccagccttccgtgccgccctcgctgcgggccgtgctggggcggctcagtgctctgtacgccctgtggtccctgagccgccacgcggccctgctctaccgaggaggatacttctccggtgagcaggcgggagaagtgttggagagcgccgtcctggctttgtgttcccagctgaaagacgatgcagttgccctggtagacgtgatcgctcctcctgactttgttctggactcaccgattggcagagccgacggcgagaacacaccggagattgctgctgctttctgagcccgcacctgtgcgcctaaactgctgattggcctcaactgcccaggcggacgggagggaggcacccggccggctggactaatctgggatcgcggtgatttgcagcgtggaaaagaaatgcagatgatcatgtctacctgatgcgctgtgggttttttgataattagaatttcgcacattcagttttcagggttcagctcctttctctaaagtaaacagcccattgtcagggatcttctggtcagaaaaaaaaaaaaaaaaaaaaaaaaaaaaaaaaaaaaaaaaaaaaaaaaaaaaaaaa

SEQ ID NO: 619 - DNA, 697 bp, Homo sapiens
aaacttgctggctatatatccagcctgctcaccctggcaggctttgctacagctatggctgctgttgtcctctgcgtgaatagcttcatctggcaaactgaaccctttttatacatcgacactgtgtgtgatcgctcagaccctgtcttccctaccactgggtacagatggatgcggcgaagtcaagagaaccaatggcagaaggaggagtgtagagcttacatgcagatgctgaggaagttgttcacagcaatccgtgccctgttcctggctgtctgtgtcttgaaggtcattgtgtccttggtttccttgggagtaggtcttcgaaacttgtgtggccagagctcccagcccctgaatgaggaaggatcagagaagaggctactgggggagaattcagtgcccccttcgccctctagggagcagacctccactgccattgtcctgtgagctgccaaagaccccacggggtgcccgcatgtccctgtctagggcagcccagggcccccactcctggctcctcacacttgcctcccctatggccgctctccagaccctcctcctttcttctccccacatccgcacctgctgttcccactctggggttctcaagtccatgaacagatattgttgcattttccacaatgctgattaaacataataaacaatccagaaaagcaaaaaaaaaaaaaaaaaa

SEQ ID NO: 620 - DNA, 611 bp, Homo sapiens
  SITE (22): n equals a,t,g, or c
  SITE (33): n equals a,t,g, or c
  SITE (48): n equals a,t,g, or c
  SITE (80): n equals a,t,g, or c
attaggcttttgcaaaaagctntttgggtgccncttttagaaggtacnccttgaaggtaccggttccggaattcccgggntcgacccaagcgtccggcgtgggaaagatctgacagtagagatctgagaggctgtctgtgtgaaggctgaatttcatgaactatctcattgttgggatggttccctttcagcctcgtgcgaacaagatgaattagataattgtataattccttggagctctgaaattctactgcacaaatagatgcctcgtgatcgctgttgagatgaggtcttccagagcctgtgatcccagatgtgattgatcatcttgccagagctttagccaccttctcacctgttagacaattcctgcccctgtgtctctactgtatcgcctttcacagctcatatgctgcacctatgcagtcttcttcagggtgtcctggggaagtgtcgctacgtttactatgggaaaaactcagagggcaacaggtttatccgagatgaccagctctgaagccaacttctgtataccttcacccatttcatgaaaataaaatcaaaagggaaatcaaaaataaagaaaacgctaaagaaaaaaaaaaaaaaaa

SEQ ID NO: 621 - DNA, 676 bp, Homo sapiens
cccacgcgtccgattctggggccttgggcacaccaggggctgcaggctccaaggagtcctccagggtccccatgccctgagagaatttctagggaagtcatctcacttggccttctgaaggtcctccctaagagtctcctgacaaaagttacttattgaacacctctatgtgccaggctctgtgttgggtactttgatcaatgcccctgtttcagtctcatctgtactcacggcagccctgtggagtacggtgtactggcccagcttacagatgcagaaagcgagacgttctgccatcagataaagtcacgtggctctttagtaacacggacaaggctcctcgccaaggaactcgtggcagaagagggcagcagttggcagtagctgccgatgtctgtccccagctccaccattcctccctgtggctgtgccatgctcgtggtttcagtgtccgtgtgtccatgtgtctgcccttcaggagctcgcagctggtgtgcttggcggtcccaggcctgtgtagtgtctctcccctgctgcgggcgcccccaccccgattcctctccccagaagcggtgggatgggcccccatgaactgcagcagcatgctgaggtgtccatgttgtctgcctttgtataaagaaacagcctctgacctgcaaaaaaaaaaaaaaaaaaa

SEQ ID NO: 622 - DNA, 572 bp, Homo sapiens
ccacgcgtccggaaatacatgcatagctgcagaaaccatgataggtagaggacttttcttttggttttgttttgttttgttttgttttgtttttggttttacagagaagagatttttattacaaagaaaaaaattccagtgaattgtgcagaaatgctggtttttacaccatcctaaagaaaaactttacaagggtgttttggagtagaaaaaaggttataaagttggaatcttaaattgtaaaattaaccattgagtgtcaaagttctaaaagcagaactcattttgtgcaatgaacataaggaaagactactgtataggttttttttttttttttctccttttaaatgaagaaaagctttgcttaagggttgcatacttttattggagtaaatctgaatgatcctactcctttggagtaaaactagtgcttaccagtttccaattgtatttagcttctggttggaatttgaaaaaaaaagaaaaaaagaaaaagaaaacctaaataaaataggtgaaagttccctgactattcaggtgatacacaaaaaaaaaaaaaaaaaaaaaaaaaa

SEQ ID NO: 623 - DNA, 2235 bp, Homo sapiens
ccacgcgtccgcgctgaaaatggactcactgtcatcttccttcagttctcctaatgatccagatggacagaatgatatcttttgggatcagaattctccattgacaaagcagttaggtaaaggaagaaaaaaacagatttacaccacagatagtgatgagatttcacatattgttaatcgtattgctcctcaggatgaaaaaccaacaacaaattctatgctggacatgtggattggtgaaactgctattccttgtactcccagtgtagcaaaaggaaaatcaagagcaaaaatcagctgcacaaagttaaaaacacaaagtcaagaagaagaacttatgaaactggctaaacaatttgataaaaatatggaagagctagatgtgattcaagagcaaaacaagaggaattatgattttacccagatgatttcagaaacagagattttaagtaattataaagataatatacagatgtggtcattacataatatagttcccgaaatagataatgctacaaaaaagccaatcaaaggaaacaccaagatatctgtggcaaataatcaaaatagcagtcagaagccatttgaccaaattgctgaagcagcctttaatgctatttttgatggttctactcagaaatgtagcggacagttaagccaagaactgccagaggctttttggagcaccagtaatactacctttgtaaagacaaatgctttgaaagaggagaaaatcattactaatgaaactctggtcattgaaaaactgtcaaataaaaccccacgatcactttcttctcaagtagatacacccataatgacaaaatcatgtgtgacttcctgtactaaggagccagaaacttctaataagtacattgatgcatttactacaagtgattttgaggatgattgggaaaacttactaggtaatgaaccttttgctatgcaaaatatcgacatgcctgaactctttccttctaaaacagcccatgttactgatcaaaaggaaatttgtacctttaatagtaaaactgttaaaaatacgtcaagagcaaatacaagtccagatgccaggttaggagattcaaaagtattacaagatctttcttcaaagacatatgacagagaattaatagatgcagaatatagattttcacccaaattcaaataaaatcwcaacaaattatccactggaaaatraaratgaaaatttgaggaactgtwtccaaataaaactaagrtattcarggacraaaattyaaawatgtatakctamgatctmaawctgtcagataaataatmtgsatgwgtmttcwtactaacwctrmtggatkcywatrcaagtgaatagttccaaattggttctttcaggaagttcaagtttgaatgtaacttcagatcatatgaatacagaaattactacttataagaagaaattgagtactaatcagccatgccataagactgtaacagatgaagctcagagcaaccttaacacaacagttggattttcaaagtttacatttacaaggatgaaaaattctcagattctttctcagtttaatcaaaattgtataactggaagtatgtctgataccaaaattacacagggtgtggagaaaaagaaaggtgtcaacccattactggaggaagctgttggacagcaatctttggtgaaactttctgaatctttgaaacaatcttcaaaagaggaagaagagaaaaatagaaagtgttctcctgaagaaattcagagaaaaagacaagaagcactggttcggagaatggctaaagcacgagcctcatctgtaaatgcagctcccacttcatttctttaatgaaatattagttggaagacttcacaaagactgctgataactatctgtgattgataggaaattttttttcttgatttctctgtgagaaatgtaatgctgacttttataaagcctggacttctactttatttaataaatcaatgtttgcaatggtaaatgaaccatttccttggacatgtatttgaaagtcattaaatacaaaagttttggaaattcaggaaagttagcaattatgtacggatattatacagaggaaagtagttatatttttaaatgctattattgcagaggatcatcaaaaaagaggtaatctacgttatttcctattctaatgtcttttcctaataaaaaacttcaactttctaagttaaaaaaaaaaaaaaaaaaaaaaaaaagg

SEQ ID NO: 624 - DNA, 1476 bp, Homo sapiens
  SITE (1417): n equals a,t,g, or c
  SITE (1438): n equals a,t,g, or c
gcccacgcgtccgcccacgcgtccggcagtggcacgatcatagctcactacagcctcgaactcctgggcttaagcgatcctcccacctcaccctgctgagtagctgggaccacaggcgcacgccacgacacttgacaattttatttttagtaaagacagggtcttggtatttctggtctcaaactctggcttcaagcaatcctcctgcctcggcctcccaaactgctgggattacaggcatgagccaccatgcgcggccttttttttttttctctccttgataaggtactggcgarttgcaactgtttgctttcctatagcacagctgaaatgaaacagtcttttcmatgtacagattagcatcattacctcaccaatcaaaaatccctaccttgarttggtctttatatttttctgggarctttggcccttgggatcctgcaacgccacaaagtatattaacaaggaattattattctaattttaatgaacggaatctaagaagttcagcgaggttcaagggtaaaagccaaggaaagtttcctttgtgtttccttaatatcttgagttcactgctttttaaactcctgccacagtgcacaggggctagtgcacttcgtctttctagataaactgtacgttcccgggagagcagagactgactttccttccgcacccccggggcttaggtgcccagtaaaaacagactgaaggcaacgtgggaccaggcccggaatccagagtttgtgtctcctagtctaagggcctcacgttgtcctccacctgccctattcaccagcatcacattggggcatttctaattcagccactgaggttattaatattttgtttgcaggagagaaagagtccacttaattatagccttcagtaaaagaaaaacttttacaccgggaagatggcaagctggtggtgttagacagatttaagactcaggaaaagggaagtgtggttttttccaggcatgcctgcttgggattggcccgtttacctttcctgcgtttgctctgggtgttgggatgkttcagcattacatggtgaaacccatacgagggttacatggtgctgtctgggagctctgkgcccatctycataaatgaaggcctttcatctccctactctgyccctgcatcccccaccccaaacagacacagctggccaatctctcgatcaatcctatcagaacttgagttttttctctccctgttcagtgatataacctcagctgggcatgcttatttaatagtttatttaataattgagtaagaaaaatggaaatattagggttcatcaacccatgaaatgggggctagcctgcarcatcaagtatttaaattacttgtaatttaagaatttcctttaaccaacctctggcaacccgtctcccctccccttcccncaaatatgtatattattatgngtcaattaaaaataataaaaacccaaaaatttcctccc

SEQ ID NO: 625 - DNA, 596 bp, Homo sapiens
ccacgcgtccgcgatcacaaatgcagttctaatgtagcacttaatggcatcaatatttacacctaccgcgttttcacaaaattacactatccacctggtacctaagtcttgtcatggacttacaggtttgcatgggttccaaatactggtttatggtactgtttttggaactacttgtgggactatattttggtgtggtgtttgggtagtgaagttagtttgacatgaagttttgcattgaacagaaaaggaaacaggaagaagatgaagaaaacaaacctaaggagaattcggaactaccagaggatgaagatgaagaggagaatgatgaagatgtggagcaagaagttcccatagaacctcctagtgcaaccaccaccactacgattggaatctctgcaacatctgcaacattcacaaatgtgtttgggaaaaaaagggccaatgtggtgacaactcccagcaccaatcggaaaaataagaatgaaaacaaaaaaaaaaaaaaaaaaaaaaaaaaaaaaaaaaaaaaaaaaaaaaaaaaaaaaaaaaaaaaaaaaaaaaaaaaaaaaaaaaaaaaaaaaaaaaaaaaaaaaaaa

SEQ ID NO: 626 - DNA, 1735 bp, Homo sapiens
acgatgggaagaggggaaagcccaggggtacaggaggcctctgggtgaaggcagaggctaacatggggttcggagcgaccttggccgttggcctgaccatctttgtgctgtctgtcgtcactatcatcatctgcttcacctgctcctgctgctgcctttacaagacgtgccgccgaccacgtccctccaagtgtgccgcccagctaccctggaccaagctaccagggctaccacaccatgccgcctcagccagggatgccagcagcaccctacccaatgcagtacccaccaccttacccagcccagcccatgggcccaccggcctaccacgagaccctggctggaggagcagccgcgccctaccccgccagccagcctccttacaacccggcctacatggatgccccgaagcggccctctgagcattccctggcctctctggctgccacttggttatgttgtgtgtgtgcgtgagtggtgtgcaggcgcggttccttacgccccatgtgtgctgtgtgtgtccaggcacggttccttacgccccatgtgtgctgtgtgtgtcctgcctgtatatgtggcttcctctgatgctgacaaggtggggaacaatccttgccagagtgggctgggaccagactttgttctcttcctcacctgaaattatgcttcctaaaatctcaagccaaactcaaagaatggggtggtggggggcaccctgtgaggtggcccctgagaggtgggggcctctccagggcacatctggagttcttctccagcttaccctagggtgaccaagtagggcctgtcacaccagggtggcgcagctttctgtgtgatgcagatgtgtcctggtttcggcagcgtagccagctgctgcttgaggccatggctcgtccccggagttgggggtacccgttgcagagccagggacatgatgcaggcgaagcttgggatctggccaagttggactttgatcctttgggcagatgtcccattgctccctggagcctgtcatgcctgttggggatcaggcagcctcctgatgccagaacacctcaggcagagccctactcagctgtacctgtctgcctggactgtcccctgtccccgcatctcccctgggaccagctggagggccacatgcacacacagcctagctgcccccagggagctctgctgcccttgctggccctgcccttcccacaggtgagcagggctcctgtccaccagcacactcagttctcttccctgcagtgttttcattttattttagccaaacattttgcctgttttctgtttcaaacatgatagttgatatgagactgaaacccctgggttgtggagggaaattggctcagagatggacaacctggcaactgtgagtccctgcttcccgacaccagcctcatggaatatgcaacaactcctgtaccccagtccacggtgttctggcagcagggacacctgggccaatgggccatctggaccaaaggtggggtgtggggccctggatggcagctctggcccagacatgaatacctcgtgttcctcctccctctattactgtttcaccagagctgtcttagctcaaatctgttgtgtttctgagtctagggtctgtacacttgtttataataaatgcaatcgtttggaaaaaaaaaaaaaaaaaaaaaaaaaaaaaaaaaaaaaaaaaaaaaaaaaaaaaaaaaaaaaaaaaaaaaaaaaaaaaaaaaaa

SEQ ID NO: 627 - DNA, 1388 bp, Homo sapiens
gtcgacccacgcgtccgcatggctgaccccgacccccggtaccctcgctcctcgatcgaggacgacttcaactatggcagcagcgtggcctccgccaccgtgcacatccgaatggcctttctgagaaaagtctacagcattctttctctgcaggttctcttaactacagtgacttcaacagtttttttatactttgagtctgtacggacatttgtacatgagagtcctgccttaattttgctgtttgccctcggatctctgggtttgatttttgcgttgattttaaacagacataagtatccccttaacctgtacctactttttggatttacgctgttggaagctctgactgtggcagttgttgttactttctatgatgtatatattattctgcaagctttcatactgactactacagtattttttggtttgactgtgtatactctacaatctaagaaggatttcagcaaatttggagcagggctgtttgctcttttgtggatattgtgcctgtcaggattcttgaagttttttttttatagtgagataatggagttggtcttagccgctgcaggagcccttcttttctgtggattcatcatctatgacacacactcactgatgcataaactgtcacctgaagagtacgtattagctgccatcagcctctacttggatatcatcaatctattcctgcacctgttacggtttctggaagcagttaataaaaagtaattaaaagtatctcagctcaactgaagaacaacaaaaaaaatttaacgagaaaaaaggattaaagtaattggaagcagtatatagaaactgtttcattaagtaataaagtttgaaacaatgattaaatactgttacaatctttatttgtatcatatgtaattttgagagctttaaaatcttactattctttatgatacctcatttctaaatccttgatttaggatctcagttaagagctatcaaaattctattaaaaatgcttttctggctgggcacagtggctcacgcctgtaatcccaccactttgggagaccgaggcaggtggatcacgaggtcaagaggttgagaccatcctggccaacatggtgaaaccccgtctctactaaaaatacaaaaattagctggatgtggtggcacacacctgtagtcccagctagtcaagaggctgaggccagagaatcgcttgaacctgggaggtggaggttgcattgagccaagatcacgccactgcattccagcctggtgacagagcgagactcagtctcaaaaaaaaaaaaaaaaaaaaaaaaaaaaaaaaaaaaaaaaaaaaaaaaaaaaaaaaaaaaaaaaaaaaaaaaaaaaaaaaaaaaagggcggccgctctagaggatccc

SEQ ID NO: 628 - DNA, 887 bp, Homo sapiens
aattcccgggtcgacccacgcgtccgcccacgcgtccgattttatttcctttgggaagaaggggctgaatttggcataattatacttgactatactgtaaaagaaaccagatctaatataaggacatcaatacttagttattaattcatttgcttatatttatatgtcatttgaaaatgtgtattaacatacacaattaaagggatataaaaatgaacatgccctctccatttctttaaaagaaatcaaggctgaatcaaacaggactactgttctgaaagaatactcagactatgaggtaccttattttccttcttttacacctgtctttcagttggcttcaaaaaatcatggcttttactgtgtttcttttttcctttatgtcttccttttgagggaaatgaaaaattgagaaaggaaattattattttataagtgggtgggtataaaagatggggtctgtaaaatctttctttcttagaaatttatttcctagttctgtagaaatggttgtattagatgttctctatcatttaataatatacttgtggactaaaagatataagtgctgtataaaatcagccaattatgttaaactagcatatctgcctttatgtgtttgtcattagcctgagtagaaaggcctttaaaatttttttagaaagcatttgaatgcattttgtttggtattgtatttattcaataaagtatttaattagtaaaaaaaaaaaaaaaaaaaaaaaaaaaaaaaaaaaaaaaaaaaaaaaaaaaaaaaaaaaaaaaaaaaaaaaaaaaaaaaaaaaaaaaaaaaaaaaaaaaaaaaaaaaaaaaaaaaaaaaaaaaaaaaaaaaaaaaaaaaaaaaaaaaaaaaaaaaaaaaaaaaaaaa

SEQ ID NO: 629 - DNA, 804 bp, Homo sapiens
ggaactgccttgtgagaagtctgtattgtaccccatgtggcctattgccagccttacttatatgggtaagcccttagctctttgttcccctgcctttctgctttgccttgtgcatgcagtgagttcccaacagccttaacattctcaacatcttcatcatccagatgctatgttgcatgtggtggttgaggttgtacacagcaagactccagatggagccatccgcatggtaggtgagtggcatctcccaaggtatgcaaagccatcatgggagccctgcctgtcctgcagacgtgaactgggcatgcgatgcaggagggcctagggtaccgctgctcccggagctctggagcactgatcaggagtgtcgcatgtgtccggttgctttcgaatgcaggaggcgacaagtactagtggctcactcagagacccttggcactttcttcagggaagctatattcatattataaataaacttaaaaaaacattcatatgtatagttagaattgatttgtagggtttttgaacgatgtaacttgggcaaaactgaagttcttatttttgttgttgctaagagacaataaagataaaaataaaataaagattaaagataaaagatttggtatacaaggagtataaatatgaaatgagagggcattttaaaaatgaattaataattttgaaatatatgttaatacttgctgacttccaaagtatcatctgtgataatttatctcattgtattccatttcgttgtaccaaacatcctaattgtttggaaaaaaaaaaaaaaagggcggccgc

SEQ ID NO: 630 - DNA, 3264 bp, Homo sapiens
  SITE (5): n equals a,t,g, or c
  SITE (36): n equals a,t,g, or c
gcccncgcgtttcgcccacgcgtccgcccacgcgtncgggacccgttagggcttcaatgatgctgagtytggaaaaggggaggagacccttgggaggactccaggcagctgtgctcccagggctcatgttctctactggattagggataggcacctctgaaatctccaccctgatgattggaatgaaacggagtgaacatgagcccagctgagagaggagcaggaatgtgtgaaaaacagctgctctccttgtcccagctttgtgattgagccctctgtcttgctctctctgccttccctgtgtctttcttctcttaccagagcatctgtttgcagaggtaacattaccttccccagccacaggtatgtggaatacggtgaggaaaaaaaaaattaaaaaaaaaatgcaagctgtcaggatgcttaagctcttttcagacatctgcagtttcatccctaccttgttcacataccatccaagaggcacataggctacccaagagagccttggattcagtggtacactccttgggcccaagggctttagcagctggatatggggttccttgattttcctctgggcccaaatatagccctcacactcttggaatttccaggtatgggggtagccccaaaaggaggaatctcctatggccaataaggtatcttgactttatcaaagtagaagagagggtcacttcggagtcaaatcatacactaggcctttgatgctttaattcttcttcagttcattaaaagtaactactaaggaaaggttaaaaacttcccctcaaaaaggaatcaaccccaggaagtaattatttacaacgattttcccaaattttgtacaatctgtcctggaaagcaaaccccttttaaaatctaatgtctgggctttgagtattagctcatttagggtggacaaatgcattactgttttcaaactgctcacatttattcagtatttctccaagttgctatctactcagccttatgaatgcccctcgcttttctaaggccatgtgaaaatcacggcactgcccttagccttgtgtcatctgctttttcgttctgcgatatgcccagttcccaaatcaattataggtacctgtttaggagagaggaagattttacctctcaaagggtgagatttgaaatttacactaaaaagacaactttacatttaatgcttcacttaatgagacattcttttttttataagtctatttttctactcagtttcagaacactaatctgattttcactctgatttttaacgtttctttaaatatttataatgtagcttctttcaaaatattttcatgaaaaattacttttattataccattatgtgcatgttattggtagcaggcatagtttattatttagtactgaaacatgctcttttacctaacagtaaacaagtatgttttgatatatatctgttaatatgcttatagtggtaagaaatggacttgaggtcccaggagatttcattttattcaccctggtcagatacaataaaggctatgagtataaatacataacttcctaaccaggtgtagggcatgttcatgaatatcaaatcttttgatgctggacccaagagaggaaaagttgtagctaaatgttgatttacttataactagacgtctatgtgagaaaatatatgtatacatatatatgatatgcagaagtcactttttttatcaggctttattctccttacaaagccacagtttaactgtctgcaacagttggtttatgttaatgatagacaaatacccagtgtttgttactttttccaactaccactgtaatgataatctttctcacgtatatacatgcaacttcttggcttcatttccatgaagctgtttcaatatattcagtatactttgtccttaatgctgcttctgttaacagtgatctctttctttttttcattcttatatcttcattagttcatcataaatctgtccagttgaggcctcaggaccacggcatgatttcatgactccgaagtattttacagaaacattttttaaataagggaaatattttatataccagatggttcacaagtgatggctcatagctagtttttttttttcttctaaaaaatgtcaggtttttaaaatcatttaccttattaaaatgaaaagtgccatacttaacttttaaaggaaagacctgacttgctttttctctatttagactgtttttgtactttactaatctttaaactatcaggaaaaaaaccaaaactttataccaatgatttagtaattttgaggcatagggtagcttacgtagtggaggatgtgccaaatattctcttcaaatgccaccttctcaatttataactaaaatagtgttatctgactaattcctctgaattttgatgtaagatctatataggcccccaaaatgatcgtagtacatgccagtcatttctcagtgaaataaatacaataccagagtacattatgggttttattgctttcttttatggtagacctgttaatggggaaaaaatacatcaaatcaaatagaatcttatatctgtatgttaaaatagagcacttacctgaagtcagtggcctggatcatagccctggatcatttcccagtctgtcctgtgctgtgtgaccttggacaaggcgcttcatctctctgggcctctatttctccatttgtaaaacaagtggctgcagtagatgatggctgagagcccttcctgttcccagatgccttggtccaaagaccccacccctctgctggtcctgccaacgtgttggtgctataagctgcttcagatataaaattggtttatctataatgtttgttcatttaatagcttctaaaaggcctttttgttatacagtgctttttttctagttttatggacttgrttactgtaataatgtcttgtttttagccatgtaactacaaacagatattctcttgatgtcttagtaaatttgcatttgatatatcattgatgagattttgttgttatgtaatattctttgcgtacgcatctgtccagcatcttattaaccataatactgtgatcattatttggaaatatgtcctatggaaagaataaaagcatgtacttcacagctagcatgttcacagatttgaaagaagtttcattaaaagcaccattgctttctgtactgcgtcagtgcctcattgtatcatcctacttgtgttttgctcaataaatgaataaaagaccaaaaaaaaaaaaaaaaa

SEQ ID NO: 631 - DNA, 4417 bp, Homo sapiens
  SITE (4190): n equals a,t,g, or c
gaattcggcacgagggagccggcgcccggaggagcaagaggaggaggaggaggagaggtcggagccgtctccaggagcccttagagaccgagtcccggcggcgacggcggggcagcgcaccggcaggcggattcattccacttaaaacctgaaaacattggaccacacaaagtcttactgatttcaggtaaaaacaataattgaagatgtccagcaaaacagcaagcaccaacaatatagcccaggcaaggagaactgtgcagcagttaagattagaagcctccattgaaagaataaaggtttcgaaggcatcagcggacctcatgtcctactgtgaggaacatgccaggagtgaccctttgctgataggaataccaacttcagaaaaccctttcaaggataaaaaaacttgcatcatcttatagtggaatagagaaacagctcctcgcctcttcccaacaacgcaaattatgagcagctccttgaagagatttaccttcagcttatttggtaaccactgctaataactaaaatgttctcagcttggaataatggactctgaagtctctattttccaagttgtcctttctcttaaaataccctttactgatttaatacagaataacaatcttattttccacttggtaactatggctttatgttgggttactgtttaaggaaagttgatctgggcctttttaaaaacataattatatactttagaaatacaaggsattccgatatgtcaggacctaaatggcctaagcacctgtcaaattaaaattccaaaattcattgaaatcctaaagccttgatattatattctttataaggcgtgtgccagcctgtatagtatataagagagaggggtgtttgtgtgtatatatatatgcctttgtgtatacacttatcaaagctattttcttatgaaaacgtccctctctccataccatcagtttctcagttccagaagttatacctttattttgagctgtgtataggtagaataaaaaattcctttcatatcgttattgtacaaaaagtaaagagtatcctaaagattgtattcattgtaatcaagtaatgcaatcatctctcctctcttgaaatcttgctggacctcttaggctacaataaactgtaccaaactaaactgacagtccttcgataatatgaaacattaatttacaaggacccgttagggcttcaatgatgctgagtctggaaaaggggaggagacccttgggaggactccaggcagctgtgctcccagggctcatgttctctactggattagggatagkcacctctgaaatctccaccctgatgattggaatgaaacggagtgaacatgagcccagctgagagaggagcaggaatgtgtgaaaaacagctgctctccttgtcccagctttgtgattgagccctctgtcttgctctctctgccttccctgtgtctttcttctcttaccagagcatctgtttgcagaggtaacattaccttccccagccacaggtatgtggaatacggtgaggaaaaaaaaaattaaaaaaaaaatgcaagctgtcaggatgcttaagctcttttcagacatctgcagtttcatccctaccttgttcacataccatccaagaggcacataggctacccaagagagccttggattcagtggtacactccttgggcccaagggctttagcagctggatatggggttccttgattttcctctgggcccaaatatagccctcacactcttggaatttccaggtatgggggtagccccaaaaggaggaatctcctatggccaataaggtatcttgactttatcaaagtagaagagagggtcacttcggagtcaaatcatacactaggcctttgatgctttaattcttcttcagttcattaaaagtaactactaaggaaaggttaaaaacttcccctcaaaaaggaatcaaccccaggaagtaattatttacaacgattttcccaaattttgtacaatctgtcctggaaagcaaaccccttttaaaatctaatgtctgggctttgagtattagctcatttagggtggacaaatgcattactgttttcaaactgctcacatttattcagtatttctccaagttgctatctactcagccttatgaatgcccctcgcttttctaaggccatgtgaaaatcacggcactgcccttagccttgtgtcatctgctttttcgttctgcgatatgcccagttcccaaatcaattataggtacctgtttaggagagaggaagattttacctctcaaagggtgagatttgaaatttacactaaaaagacaactttacatttaatgcttcacttaatgagacattcttttttttataagtctatttttctactcagtttcagaacactaatctgattttcactctgatttttaacgtttctttaaatatttataatgtagcttctttcaaaatattttcatgaaaaattacttttattataccattatgtgcatgttattggtagcaggcatagtttattatttagtactgaaacatgctcttttacctaacagtaaacaagtatgttttgatatatatctgttaatatgcttatagtggtaagaaatggacttgaggtcccaggagatttcattttattcaccctggtcagatacaataaaggctatgagtataaatacataacttcctaaccaggtgtagggcatgttcatgaatatcaaatcttttgatgctggacccaagagaggaaaagttgtagctaaatgttgatttacttataactagacgtctatgtgagaaaatatatgtatacatatatatgatatgcagaagtcactttttttatcaggctttattctccttacaaagccacagtttaactgtctgcaacagttggtttatgttaatgatagacaaatacccagtgtttgttactttttccaactaccactgtaatgataatctttctcacgtatatacatgcaacttcttggcttcatttccatgaagctgtttcaatatattcagtatactttgtccttaatgctgcttctgttaacagtgatctctttctttttttcattcttatatcttcattagttcatcataaatctgtccagttgaggcctcaggaccacggcatgatttcatgactccgaagtattttacagaaacattttttaaataagggaaatattttatataccagatggttcacaagtgatggctcatagctagtttttttttttcttctaaaaaatgtcaggtttttaaaatcatttaccttattaaaatgaaaagtgccatacttaacttttaaaggaaagacctgacttgctttttctctatttagactgtttttgtactttactaatctttaaactatcaggaaaaaaaccaaaactttataccaatgatttagtaattttgaggcatagggtagcttacgtagtggaggatgtgccaaatattctcttcaaatgccaccttctcaatttataactaaaatagtgttatctgactaattcctctgaattttgatgtaagatctatataggcccccaaaatgatcgtagtacatgccagtcatttctcagtgaaataaatacaataccagagtacattatgggttttattgctttcttttatggtagacctgttaatggggaaaaaatacatcaaatcaaatagaatcttatatctgtatgttaaaatagagcacttacctgaagtcagtggcctggatcatagccctggatcatttcccagtctgtcctgtgctgtgtgaccttggacaaggcgcttcatctctctgggcctctatttctccatttgtaaaacaagtggctgcagtagatgatggctgagagcccttcctgttcccagatgccttggtccaaagaccccacccctctgctggtcctgccaacgtgttggtgctataagctgcttcagatataaaattggtttatctataatgtttgttcatttaatagcttctaaaaggcctttttgttatacagtgctttttttctagttttatggacttgrttactgtaataatgtcttgtttttagccatgtaactacaaacagatattctcttgatgtcttagtaaatttgcatttgatatatcattgatgagattttgttgttatgtaatattctttggntacgcatctgtccagcatcttattaaccataatactgtgatcattatttggaaatatgtcctatggaaagaataaaagcatgtacttcacagctagcatgttcacagatttgaaagaagtttcattaaaagcaccattgctttctgtactgcgtcagtgcctcattgtatcatcctacttgtgttttgctcaataaatgaataaaagaccaaaaaaaaaaaaaaaaa

SEQ ID NO: 632 - DNA, 324 bp, Homo sapiens
ggcacgagtgtgcatgtatgtggttactgtgtatatgtgtatgagtgttgtatatgcatgtgtgagtgtgtgtctgtatgtgtgtacaactaaagaagctgcagaaactttgtaatactttgtgaaaaggattatattataaaggtttgtactgtctgagtgcacagctactggaataaatttagggaatctcaggaacaagcatataatttgtccaagatttatttcttctcagaagtgtaagtgcagtttttaattctgtatattatttaatattttaccaataaaataaacttctgacataaaaaaaaaaaaaaaaaaaaa

SEQ ID NO: 633 - DNA, 765 bp, Homo sapiens
cttaacctgtgcaattcagattgatactcagaatatgggttgatttgaatatctgaaatatcaatggaaaatcccactcagtttttgatgaacagtttgaacagttttctgtaatcaagcagcttgcatagaaattgtatgatgaaattttacataggttcttggtgctgttttgttctttttttgttttttgttgttttgttatttacttatatacatataaaattttattgaaaataaaaaaaaaaaaaaagtcacgttcacgcatccactggtctagattttcatataatgtattaaagacaaagtagtgaacatcaatgaacatctgatagagataaactgtaatcaggcataagcttgtttgtatgttctggcagtgactaatcagtaaatgatgtcggtttgcccagtatcacttatcttctgtatttttcctctgtcgtgtaaatagtataaccttttcatttatggacaattttttggactagtagccttcaatatacattctgctttgaattaattttttcaaatcaataaattatgtagacatttaaaatcaaatatcagtagaattgaaaaatgtgagttacataagttaaaaacttactttaaatcttaccttctataggtagctctaaataaattcatatggttatatgataaaaaaaaaaaaaaaaaaaaaaaaaaaaaaaaaaaaaaaaaaaaaaaaaaaaaaaaaaaaaaaaaaaaaaaaaaaaaaaaaaaaaaaaaaaaaaaaaaaaa

SEQ ID NO: 634 - DNA, 853 bp, Homo sapiens
  SITE (36): n equals a,t,g, or c
  SITE (49): n equals a,t,g, or c
  SITE (820): n equals a,t,g, or c
  SITE (838): n equals a,t,g, or c
ctcaattaggccccccaggctttacactttatgctnccggcccgtaatnttgtgtggaattgtgagcggataccaatttcccacaggaaacagctatgaccatgattacgccaagttcgaaattaaccctcactaagggaacaaaagctggagctccaccgcggtggcggccgctctagaactagtggatcccccgggctgcaggaattcggcacgaggttctgggtccatacaccagcaatgaaggagatagatttgtgtacttgtgttttttaatcagcattaacatgggcaggcaccctcatttatagatgtcaggaaacattcagtgaaaaacttgtagaatgggatgtgataacgaggttccagtaatctgagcagtctaacgaggcccacctcctccaccacagaacgtggctatgttccaagtgctactctcactcagcctgttgcggatcttcatggcctcaggagacttgtttctccatgggctcttctggactgcacacttccaccatagcttgctgggttgatctagatgtctgtttgttgtatggaaattttgggggaaaaaatccaaaacacaaactgtgggttgaaatattaaccgtctccttggttccttggtattcaccgtgcctgatctgcacatttcatcgtggctgtttctgtatagcctatactgcattagcccaagagattgttgctttgtaactttttgcactattgttttggctggatttgtattacacacagttttaaaaaaaacaattccacactaaaaaaaaaaaraaaaaaaaaaaaactcgaaggggggggncccggtaccccaattggncccttaaaagtggag

SEQ ID NO: 635 - DNA, 1293 bp, Homo sapiens
ttttttttttttttttttttttttttttyaaacttaaaagggatttatttgtgatttcctatatatatttagcttgtaaatacaagactgtaaatgtattaagagacaatttctgttaaagttttcattgtgtttcacttcaagtactgcacaagttaaaatctgataaaggatttacattcggttatctgaaactccccatctcagacttttgttttaatgtggtgggtaacttcatcatttccatagataccaccagcaggaaagtgtctcttttatggcttctaggactttcattagttagtgtgcatacagttttcattttctatatcattgtcattatcattgctatcttcatcactttctaatgggatgccagtggcagctgaagcacctttagtttctcggtcaagaggaaaaaagccagttccactgaaagtgtcttgtctctggtagaagagtacatatgctgctttggacacaatttggtcttcagatgcagtggagacactactgtcatcaaaatagtaccattttccatcatctttattttttgcaaaagcagtatagtgtcctcctcccatccctccatagtggttggaaacagcaatcagattatagcggcaaggacctgcatttggattaattaagaattccgacatatccaagtcattgataggaaaatcaactaaggtatccaacttgtctctcatgtatcgactgtaagaaaatcgcttgagatgtactacaagtactggaggcagggaccataaayccaatttctttgtggcttgctgatgttctttacaattcggacaataccagggatcttcagcacctagcttttcttttgttgtaaaaagttcaatgcaatcttttaatttcacaaagggttttttaggaggtttatactccacactttcatgtttttcaaagtcctcagcagcattttcatcaaaatatctttttttcaaatcaggatcccaatccaaagcaagaaaagatctttcatctagcctaagctgcctatcatcaaatcttatatgcctggtatcatctttgatgtagttgatatcagtattgcctaagttgttgaactggaatgtaaacaatcgttttttgtgtcccgtgagttgaccttkkcaagtatccwcagtacataatccattttcagaatcattatctcctccaactgaatcttcagactgactgttttcattctctgagggaagttcttgatcctggctggattcatcatctggctcatctgtttccatttcacttggtgagccc

SEQ ID NO: 636 - DNA, 1771 bp, Homo sapiens
  SITE (1706): n equals a,t,g, or c
  SITE (1740): n equals a,t,g, or c
  SITE (1770): n equals a,t,g, or c
cgccgtcgcccctcccsccgcgcaacccgccgccgcgatggcccagcagcagatgaccagctcgcagaaggccctgatgctcgagctgaaatccctgcaggaggaaccggtggagggcttccggatcaccctggtggacgagtccgacctctacaactgggaggtggccatcttcggaccccccaacaccctctacgaaggcggctacttcaaggcgcatattaaatttcctattgactacccctattcaccacctaccttcagattcttgaccaaaatgtggcaccccaacatttatgagaatggagatgtatgcatttcgattcttcatccgcctgtagatgacccacagagtggagaactgccttctgaaaggtggaatcctactcagaatgtgaggactatcctattaagtgtaatctcactgcttaatgagcccaacaccttctccccagccaatgtcgatgcttcagttatgttcaggaaatggagagacagtaaaggaaaagacaaagaatatgctgaaattattaggaaacaagtttcagccactaaggccgaagcagaaaaggatggagtgaaggtccccacaaccctggcggaatactgcatcaaaactaaagtgccttccaatgacaacagctcagatttgctttacgacgacttgtatgatgacgacattgatgatgaagatgaggaggaggaagatgccgactgttatgatgatgatgattctgggaatgaggagtcgtgacgtgctccttcagtgcccctgtactgccctgccatctcaggccaaagggaggggagcaagtggggacctggccatggcccctcagcaaaaacctattcacagcgggtggggaaacacacacagctcctgctgactccccttatggatctcagtttgctcctttttatggacctttaatggagagagagtaaccctccacagaatgtctgaattcttgcattctttacccttccatcactatattgattcttttttaaaaaacatgaacccaaactcccgcctcacttcgtctctacagaatgttcacagcaaaacacgtttggtctgtttttagattcttgaagaattcaatagtctttcaagatgtttaatgtgtttaaagctgggaacctgttgggagttcacaagtgctgcatatactgggtagcaaaagaaaatggaaaaaaacccacaaaacaaactttaaaaaaaaaaaaaaaaaacaaatttgccaaggtttagctgctcatttacattagtgtgtgtgcattcgttcagccccatggtggtgaattctgtttctttcctttcctaaggctgggacatggtgggcatcagggactttgtgctaagcctgatgaaatgtgctccttcaatctccatgaaaccatcgtaacatggaggcctcagctgctctgaggagagaaatcagactttgttttttgaaatcgattgggatcgaaagcctgaaataaatattcatactttccatagaactgagcacttggttgctatttattttaaaggcagggttatttccccccagggagtggggcaagcggggaagttgggatgagtgcgtgtgggagcaaagagttaaaaatcactatgctaagtttggttgatgctactggggggaaaaagttgaaactactggtgaccactgttgggagaagaaacatctgttttatanatttagcatggccttcccatcaaaaatacactcntaccatgacgttttgtttttgttttttaant

SEQ ID NO: 637 - DNA, 699 bp, Homo sapiens
  SITE (694): n equals a,t,g, or c
aattcggcagagcccataaggggctttgtccagccaggcagagagtagaagttccacccctacccctgtattaatgtgctcaggctgccatgacagaaaaccacaaaccggctggcttaaacaatagaaattaatttcctcacaattctggatgcttatggtccacgatcaagttgtcagcagggttggtttcttaggccactccttggcttgtagatggccaccttgttgctgtgtcctcacgtggcctttcctttatatgtgcgtgcccctgccacctctatcttaagaggacaccagtcatattggattagggtcccaccccaacaacttcatgttaacatcatctctttaaagaccctgcctccagctgggcacggaagctcacgtctataatcccaccactttgggaggctgaggtgggcagatcacctgaggtcacaagttcgagaccagactggccaacatagtgaaaccctgtctctactaaaaatatgggcacsgtggtgggcacctgtaatccagctactcaggaggctgggacaggaaaatcgcttgaacccaggaggcggaggttgcagtgagctgagatagctccactgcactcaagcctgggtgacagcaagactttctctcaaaaaaaaaaaaaaaaaaactcgagggggggcccggtaaccaattygccctaaagtgngtcgt

SEQ ID NO: 638 - DNA, 1453 bp, Homo sapiens
ggcacgagggaatttgggatttctattaatttgaaacaattagtgtcttaaaatattggagaatatggtatgtctctccatttatccacagatgtttaaattttcttagttttttcatataggatataatgtttgatttgttgtttatttccacttttatattaatctttttagctagcttggatttggaagtgaactactgaatctttttttctttttttataagcttttgttaggagtgataaacccaaactgttcagaggactgcaaatcaagtatgtccgtggttcagaccctgtattaaagcttttggacgacaatgggaacattgctgaagaactgagcattctcaaatggaacacagacagtgtagaagaattcctgagtgaaaagttggaacgcatataaatcttgcttaaattttgtcctatccttttgttaccttatcaaatgaaatattacagcacctagaaaataatttagttttgcttgcttccattgatcagtcttttacttgaggcattaaatatctaattaaatcgtgaaatggcagtatagtccatgatatctaaggagttggcaagcttaacaaaacccattttttataaatgtccatcctcctgcatttgttgataccactaacaaaatgctttgtaacagacttgcggttaattatgcaaatgatagtttgtgataattggtccagttttacgaacaacagatttctaaattagagaggttaacaagacagatgattactatgcctcatgtgctgtgtgctctttgaaaggaatgacagcagactacaaagcaaataagatatactgagcctcaacagattgcctgctcctcagagtctctcctatttttgtattacccagctttctttttaatacaaatgttatttatagtttacaatgaatgcactgcataaaaactttgtagcttcattattgtaaaacatattcaagatcctacagtaagagtgaaacattcacaaagatttgcgttaatgaagactacacagaaaacctttctagggatttgtgtggatcagatacatacttggcaaatttttgagttttacattcttacagaaaagtccatttaaaagtgatcatttgtaagaccaaaatataaataaaaagtttcaaaaatctatctgaatttggaattcttctggtttgttctttcatgtttaaaaatgatgtttttcaatgcatttttttcatgtaagccctttttttagccaaaatgtaaaaatggctgtaatatttaaaacttataacatcttattgttggtaatagtgctttatatttgtctgattttatttttcaaagttttttcatttatgaacacattttcattggtatattatttaaggaatatctcttgatatagaatttttatattaaaaatgatttttctttgcttaaaaaaaaaaaaaaaaaa

SEQ ID NO: 639 - DNA, 1140 bp, Homo sapiens
ggcacgaggtaaattggttgaagaaattagatcccaaagattcttggtgaattttgaagtcttcatcagtatatccatattaaaacgagatgacagaagccaaagtaattatggcaagtaatggtttttatcttaactataagttatttgctcaagggtgtaatggtcattaccaaggcttttagaatgcagtttctcatttgctgtggacatgaccataaaaaaatttcccagtaggttttctatctgctactttgctagcaatcagcttattgggaacagttgattaactgtaatagaaatgcaatacaaataaaatgtgaaccacatgtgatttttctttaaaatcagtgagatttgaaaattctcctagatctcttgaatcatgcaaatttgctttgcctttatattgtaacccttgtgggttgctaataaccaagcagtttgtagtagagttaactcaggctcgttctagggactcattcatgttcactcactgtacactcatctctggaaatgtaaaatttacttttatactattgttatgtaggctgacaggacaactggatcagtttcattaaaaaggtatgtatgcattagaaaagacatttgtatgggtcatttcaaagaaggcttatgaagctgtgaaacccagagctcttaacgctgtgaccaaagatggaagttctctataggaagccctatagcactcctaatgtttggtgctatgttttcctgaggagatataaaacgtaataatccatgattgttgccatgtgagagttttaaaggttaatcaaaatttctcttcttcagggcaaacttgaagataaatcttttgactccagctctttagaggatctaaagtgaccttgatggacagtggaagaaatcacaacatggaattcctcgaataacaatttattgactttaaataattttgtctaatgctacatatacacaattaaaaaacctttacactatttctagaaagtcagcatgtatttttggctcgaagtttctctagtgttttctgtggaaggaataaaaatttgagtttcagttgtgtaaaaaaaaaaaaaaaaaaaaaaaaaaaaaaaaaaaaaaaaaaaaaaaaaaaaaaaaaaaaaaaaaaaaaaa

SEQ ID NO: 640 - DNA, 1397 bp, Homo sapiens
  SITE (579): n equals a,t,g, or c
ggcacgagctgaatctgtaaattgctttgggcagtatggccctttcaacaatattgttttttcctatccatgagcatggaatgtttttctatttgttatgtcatctctgatttctttgtgcagtgttttgtgactttcatcgtagagatcctttacctccctggttagctgtattcctagtattgtattctttttgtggctattgtgaatggaattgcattcttgatttggctgtcaccttggatgttgttggtgtataggaatactactgatttttgtacattgattttgtatcctgaaactttgccaaagttgcttatcagatcaaggagcttttgggcagagactggaattttctaggaatagaatcataacatctgaaaacaggaatagtttgacttcctctcttcctatttggatgccttttctttttttttgtctgattgctgtgtccaggacttccagtaatatgttgaattggagtggtgagagaaggcgttcttttcttgctccagttttcaaggggaaggcttccagctttgctcattcagtatgatgttggctgtgggtttgtcatanatggttcatattattttgagttatgttccttcagtgcctactttcttgagggtttttaacctgaagagatgttgaattttatggacagccttttctgcatccattgagctaatcatgtggtttttgtttttagttctgtttatgtgatgaactcacatgtatttatttgtgtatgttgaaccaatcttgcatcccagggataaagcctgcttgatcatggtggagtagctttttgatgtgctgctggattcagtttgctagtattttgttgaggaccttggcatctatattttattaaggatattggccttaagtttttttgttggttgtgtctctgccaggttttggtatcagaatgattctggcctcacagaatgagttagggaggagtccctccttctcaattttttggaatagagtggtaccggctcttctttatacatctggtagaattcagctctgtcaatttctgtcaattgcctgtgttgaaatccaatgactacctcaaactatttctaatctcttttacatttttacccaaccaatttaatttcttggattcccacatttggccctcaggccgtactttgctgactcctggtatctggacaagattgctgggtttcgagctgaggtttcacatggggcttgagacccatataatcacagagtggtctcaaatgggtctcatacttttgtatgtatttgtaaagttcacggtaatagcacttgccatgccttccttagaaagttacatgggataatttaatttttaatttttgttaacattctatagacttaaaaaaaaaaaaaaaaaa

SEQ ID NO: 641 - DNA, 1883 bp, Homo sapiens
ggcacgagtggaaagcccactctcttggaaccacgaccacacctgtttaaagaacctaagcaccatttaaagccactggaaatttgttgtctagtggttgtgggtgaataaaggagggcagaatggatgatttcatctccattagcctgctgtctctggctatgttggtgggatgttacgtggccggaatcattcccttggctgttaatttctcagaggaacgactgaagctggtgactgttttgggtgctggccttctctgtggactgctctggcagtcatcgtgcctgaaggagtacatgccctttatgaagatattcttgagggaaaacaccaccaagcaagtgaaacacataatgtgattgcatcagacaaagcagcagaaaaatcagttgtccatgaacatgagcacaggccttcttgactggaggaagagcttgctggcatggtggcagtattccaggagaggccatgtccgtgtcacttcttggcacatttcagttccgttttcctcttgtttaaaactgcctctttagatgtggatgccttaatgctgtaacacatttgaaaacattggcaatacttaagttgctgccatgattacagatggaattattggctaccaaagagacgcaattgatgatgagaagcatgattcttgcttccatataaccaaagttaatcttaattgcaatttgactccgtttccttggtagggatagactttcttcagattccaagtgctctcttaaatggcaaattaagttaaagaatactactgctccattcccctcacttattctccagttaattgcttgtcagttccatttcaagaaagcagtgatgttccaggtttgattcagttttcctgtgcacactattgccaaatttttttttagcaaagattctgcactggaacgtagacagttggaaacagtactacctacctagaggttatgtgttttctctttctccccgctttcacctctttctttcccaattcaaaacagccaagtgagccctgttctggtattttgaatcattagagaaaagaaagggagtggctgttttgagttgtccttctttgcagaaaggagaaaatgtgattgtgttttttttttaccagcctacttctaagtgtcactgcctggtttttctctttttcaaggattagaactaagaggacacaccagcatcggagtgtattaagcccctgaaacacatggtagctagggactgaacacaggaaccgtatgacagcagcacaaacccccaaaggatgttcctgccttgtgggcccctgagccccttgggagactgagaatcatgaccagattcatccagaactgctgcagtgttaagtgaaaatcctctgtagttgttctgcagaggaaccttccttccattagaaaatttctgctcaatacagaatggtccacatcacccaaagtgcactgttggagatgctgtgaaattaaaacctctttgtacctgagacatctagattcacctcaggaggcctgaaggaaatgtgtaacttgtgggaaagaactagacaaccatttaggaattctctagatatactcagcctaacccagtggcttaacacaaggagattggctttgatctttttttcttgtggcatcttccagcaagttagaagtctcatgggataagactgcagttcccctggttcaatagctggaacagtgattttaaatgtccctttttctggatcccttgtaaacatgaaatcattccatggatggctgccttataattttgtctctttccactttaattgtgaatggttaaaaaaatgctgttttctgatattaaatttttattagtgcataccttaaaaaaaaaaaaaaaaaaaaaaa

SEQ ID NO: 642 - DNA, 2220 bp, Homo sapiens
ccccaaggtgtttgaacgggtaaaaaatcggggctttcgggattcgccaaggtttgcctaatcattatccccggcccgaattttttcggatccaccttaaatatttaggaaaacaaggtttaatccttatgtgtcctatarggaataaaatggtcttcattkgacacttactttcccatgaacacttgcagttgctaagggactttattttgtaacatatcaattataaatattgtatttatctttgaaattttgtacattgcttttcccaccttttcctttttcttctttcttgtctgtattggtttttgatcacggcctggtgttgtgatactgggaagagcattagccaagaacttgtctctttgatctgtttcgttaagctgaaccagtgtctttacatttcatttgtacttcaaaaatatatgctattgtttagactttccatccttttttttttttattttgaggaaaagtcaaattcattgtttatttttatattatttttaagttatctgaacaaatacttttgaaaaaaaagtttgttgtatagtcaaaacaaatcggtgccacccggccgtgacaaatcctagtagattctgtgcatgtggagcggccgcgaagaggtgacaccgtttggggctgtgtccttattttattttatttttttgtagaatgtaaaaagtcattttagatgccacccattgactttgccacatagctgaactgtgtttactggaaaaattcagaggcctaaagtttaaaataaaatttacttctgatgttttaattaaaatgtttgccacattaacttttctgatgccttaaaagtgaacttctttaaagaacctttgtgctattttatcacaggcttacactacaattgttaataaatacttcatttggagatgtatggtgtaaaacacacaaacacacacaaaaaagcacaagcccgctgcatgacccgtctctcctttctgggactatttctgctgcgtcctgcaccctcctgggcccacctccgattcacagaggtttcagggggacccaaatcactgctggttttcaatttttttttaacaatacatttttgtggtcagttccaacagcactgtccgtacttttaaaactggaatgacctccttcagatatcgtgcctcttagtgccaaacccacagtgagaccaaaagtgtcaggtgtttttttttttttttctttctcctttgcactaagtgctttgcagacacggcacagcaaacattttgcaaactgcagcagaaatcgaatttaaaacaaaaaggagggactttaaaataccttcttgacaaaaatcaacaatgcacaacttacaaagtgttcattcctagggacaaaattaaataaacagaatgtcccccaggagtcagcaggtcacagtctggctttgtgatggttgacaaggtctagctacatgggaaagcctgagaagtcactttggaactaaattgcctccattttattttgtacgagtaagggtttgatctacaaaagagctcacatggacgcactgagaacgcctgccagcttccccatgccctcacttggtttgtgttttaggttaagtagtcartgcccacatcacttcactgtctcaagactgagcacttcactaaatggtagattttactgttaaagaccctacaataagattgttttatctgtacattttttcagatatttaactgtataaaaatgttcattttacacaatatttaattaaagtatttcttgtctgtgaatttcacttttggtaattttctctgtttttgattattaaaatgactaaacactaacataaaagttacatcaggggtttcatttgcacagaccgggttctgaagctgcaacttggccaagataaaaatgttccacagaggaactttccacaaagttatccagcctccgtcctctaacctgcatagaaagagaggttcagcaaattgtcacttacgtggtcctgacccccagaggtgccatctgtattcatgctgcactctggctgatgtttctgtgtcacagatgttctgtgggccacagcagcactggggtgacacaatcactgttccagcacttgtctttgagaactcaaacaatcccaaggctcactgaggggcttcataacccactccctccagaccttctgccccagcccctctgcttctgaatagcgcactgggcagc

SEQ ID NO: 643 - DNA, 432 bp, Homo sapiens
ggcacgagctagttttgaagatttacttcaagtttgaatcttctagaatgcttgtaagtccagttttaatttttagagtcaatttgtagttacatgtagtttaacttttgggaaacgtcttaacattgttctgagaataaacttgctaatgaggtcaggtcatggtacagactgatgcagtcaacatgatttcattgcagagtttattagtatcagcaagtttttgctttgctaaataaaagtactcaatgaacacaattctacataaattttgacataccatctaatttataaaaatcaataaaaaaggttttggtaaaactttttcatgccagatgctgtttacaacaatgaacatgccaataaaacatttgttcattcaaaaaaaaaaaaaaaaaaaaaaaaaaaaaaaaaaaaaaaaaaaaaaaaaaa

SEQ ID NO: 644 - DNA, 1799 bp, Homo sapiens
  SITE (1355): n equals a,t,g, or c
  SITE (1356): n equals a,t,g, or c
  SITE (1589): n equals a,t,g, or c
aattcggcagagctagaatttactatttgttagttacatacaaaaattataatttatatacataaagttatactatgctgtcatttttaatatccgtacaacattgcatagtaccataatttagtctattgatgtacattaggttatttctaatattttgctatttatatgcacattgcagtgaacactccctttacatatgtccttgtagtgttgtctcctaagatatattccttttatatcttacatggtgacaacattaaatatctgaactctgtgacatcttggggacatacatttacctctgataatttgctatttgtatgacccttgaattgagtaaatgcaccctaggcatggtagaccagagaactaaccagaaaagtggcactgtgtttagtcatcctagattctttaagatttttaaaggtaacttaagtagtagtttttgtctagtccatacatgcatgtggtgtaaaattcaaaagatatagaaaggtaaagtaaatctttctcccactctgaaacctcttctacccagtttctgctcctgggaaactactatgagtttattcatccttctgcacatattttatacatatatgtatactttctgcacatatatgtgcatatatatgtatatattttaagttttttgtaaatgatagcatactatgctgttctacagttcactttttctcacttaactataataatatctaacacttacgtagtgctttgttctaggccctgttctaacaagtgtttttgtattgattactaatcttcatcacaaacgtgagaagtaggtaaatattattcccttaccacagaggaagaaactgaggcacagaaactttaaatgacatgctagtaggttgtcagctggaaggtgaactccagcatccagcagtttggctacagagtcttttatattagcccatttgctatactaactcaattgttgcctcattctttttattaactacataatattcccttgaaaaaacttcagtttatctaactaggtcctagttggtggacatttaggtgtttccatatactgctgttatagatgatgctagtgtgaatatcctggtgcttataaatgcctgtgtcattttgaatatgtaaatctctttcattttcatccattcaaatttgggagttaggggagtcttgtgttcatatagttacattctattttgagatctaatatgagacttttttttcaatgaatgtatttagctaatttatatttattatatcattatggttatagcctcatcttttatagctaatggactaagagataagtcaaggtatgttaacaattgaaatatacttaaagatgnnaagcagtacagwataaagatattagcatycctcagtctatttactctctcacgttttgttggttatataaaaacattatcaggaattgtaacaattacattatattctatagccatagccatagttttagaccaatagttaagtggattcaaatgctcaaagtttgttattttcgatagttttttaaaaatcttttagatggctgaactttatcatcaagtattttcttaaantttatgaaaactattccttagggttttgcatatttaatgatgttttatgctgggggtaaattcttgagtactctagatattgcttcactgatttttttttttttttttttgagtcggagtttcgctattgcactccaacccggatgacagtgtgagactctgtctcaaaaaaaaaaaaaaaaaagaaaaaaaaaaaaaaaaaaactcgag

SEQ ID NO: 645 - DNA, 1521 bp, Homo sapiens
ggcacgaggtaaattaaaagcatgatcattttgttgataatcagcctttggagaattaaacagcctgcttactgccagtgctagttcagtaaatatgtttctcattttctatttggcaaaattagataacctaagcctaggaaaaataaaaaattagaaaaaaaaaagtagatttggggatatttaactcaaattgcccttactggtggaaactcgaggcagttacttagattatttccaaatggctttttttaaatgtatttctatattgtatacaacagtctcagtcttcatctctcctgttcagctatccatacatcccttaaaattagatatttttaatgtttagtaaaccttcagtttgggtttatagacaacatttaaccttctcatgaaagggtcagaatactccagttgcaggcacaaacaggccatagtttagttgaaggagaaactgcgaactcaaaggagcactgcttctctgcaggaaagatcccgtcagtggacctgcggggcacagctgccaccagtgtcatgtagctattcagtgtcggaaaactagaaatcacaagtgaagagaaattgtaaattacctcaaattctatgcccagaagcaaccactatggaaatccttctagacattgtcccgtataaatatatttccctaaaaaaaattataccccatactctgccacttcaaaaaaatcaagactgtttttccatgtcaataaatatctatatcatttaatgaatacataatactcccttgtttgaatgtacaatattctgtattgttgcacatttgttgtttccaatttaacaattacagtactccaatgaagcaatcatcttaaaatacatgtataacatattatgatgttccatcctttaaggttagaaacgacgtcccatacctgtctcccgtcactctgagaacagtgcggtaacaggatcagcgattctcaaccatgggcaatttagccccctatggcacatttgacaacgtctggagacatttttggttgtcacaactagggggtaggggatgctactggcatctagtggtggaggataggaagctgctaaacatcacgcaacgcatgggaccgtcctccatgacaaaggacccgtgcaaaatgtcaatagtgccactgttgagaaacccggattaagatcatgttgtaactacatttcagtgggataagactttgaaagtttccaccgggcacagtggctcatgcctgtaatcccaacactttgggaggccaaggcaggcagatcactggaggtcaggagttcaacaccagcctggccaacatggtgaaagccagtctctactaaaaatacaaaaactagttgagcatggtggtgcgcacctgtaatcccagctactcaggaggctgaggcaggagaatggcttgaactcgggtgggggaggttgcaatgagccgagatcgcgccgctgcactccagcctgggcgacagagcgagactctgtctctgaaaaaaaaaaaaaaaaaa

SEQ ID NO: 646 - DNA, 1185 bp, Homo sapiens
cgattatgcagtgtatctactaacagtgttataccatgagtcttggaatactgaagaatgggaaaaaagtaagactgaagcagacatggaagagtatatatgggaaaatagctcatcagaaagaaatatcctggaaacgcttctccagatgaaagctgctgagaaaaatatggaaataaataaagaagagctccttggtactaaagaaattgaagagtacaaaaagtctgttgttagtcttaaaaatgaggaggaaaatgaaaattccatttctcagtacaaagaatccgtgaagagactattaaatgtgacatgaattatggagtagaaaaatctgcttgatttattaattttatgatatatgtgatcagtatctaatttgatataaaattgaaaatgttaaaaaatcattttttttcctcagagttaaaattatttccctcatactaatgcttaatggcaatgattactccagagttttttaatttttacactggggcaatagactaggaggtctctgatttcttcttggtctaaagtgttttgattttatttctacataatagctttggtattcatgtatatacatgcatttaattgtgattttatcacctttcccatttctttccccacaagctggcatttcagtagttgcttttgaataatggttttggttacctgggaaggcaggcccagaacccatttccttgacttgcagttccgggctgtgttcacatgactgctgtctagctgatgcatttttcacatttgtcaactctggttagaaacaggtcctcaggagtattctctaacctgatattttctaaaaagatatgttgattcaactttgtttagcatcctactttctagattgtggggctcattttgccagggccaagctaccagaaaagtagaagtggagattacctggtatgtatctctctgggtgccccagttagagctgccacagctcaggaaaaagatgaggcataacgaccttgaatgtaattggagtaagtgacaaaataagaactaccctgggaaaccctgcattcaatgtagctgtcaattcagtatttttaagtacacctgtcagctgtttcttaccacttcgatggttgtgattaatttaaaatcaaaataaaggaattactgagtttaaaaaaaaaaaaaaaaaaactcgag

SEQ ID NO: 647 - DNA, 1649 bp, Homo sapiens
gcaacagtcagttacctctgattgtaaaaggtcgctcctcctgagtcttagtgtttactagaatttgcttcaatgttttatttttgtgttaccagttttaggttgactgtataatgaaattctgtattttgaatcacatttccctgctgatatcagcccagcttataacaagtaatgcttgccttaaacatattttttctttctctcacttctgccatcaattcaacaataggattgcagatacagtttactttggggctgaattaagcagtagcagaggggtgtttgtaaactaactgatgttatcaataggcagggacacagcatggcttaggatcatggtcttccagcttgatgacctgctttgcaatctgtttgcttcatccacatcaatgaggagccagaccttctggtccttcatttactcatagactctcttaagagctttgtacattcaattctgaacttattggtgccataaaatattattactgtgcaaaagaataaaagtgctagtgtgttcttattagtagccatgaatttcatttctcttttccctcttcccacctgagattcatctttgaggggaagccagataccttgggcttcttattttcccatcctgcccttattcttggaaggtcctcaggtttgttgacatggtttttgttctctgggacttttctagtgtgttgtttgcatgtcagccagctcaacttaatgcatgtcagctcagtgccacttgtgctccatgtgacttcagttagcaccagtgtaaatcttgtggctgttaatagaggtggagtcccagctctgacggcagtagtgggagaagaagaggaaattgtcagggcccaaacatttcatatctcatttaaatggatctgaccacttcatagaaaagaaaatttgaatcattgtgctcaaaggtttcccctttgagatacatattttgacctttataaactatagagcatttgtgttttcatggatggttatgtttagttttataaggaccaactctgctatacttcggattttcaggttcctaaagagaaagatgaaatggtagagcaagagtttaaccggttgctagaagctacatcttaccttagtcatcaactagacttcaatgtcctcaataataagcctgtgtcccttggccaggcattggaagttgtcattcagttacaagagaagcatgtcaaagatgagcagattgaacattggaagaagatagtgaaaactcaggaagaattgaaagaacttcttaataaggtgaaattctgtattttcttcatagctgaagaagctttaataggagaaaaagtctttagaaattttaaaagcatttccgagattttttcctccatggaagagaaagtctgcacagctgggactcattcttaagaaaataatgactaacgaaagagactgttttatctgtcagtctttcagtgtggcattattgataaatggttgccagaggaaatagatctttcctctttgtctggttccctttggctcaggggtgtccagtcttttggcctccctcagtcacattggaagaagaagaattgtcttgggcaacacataaaatacactaacactaatgatagctaatgagcttaaaaaaaaaaaaaaaaaaa

SEQ ID NO: 648 - DNA, 3484 bp, Homo sapiens
aaggtagacaacacttcagtttttcttgagggggaaaaaatgtacccgctaaccttttttcacccatgatttgagccctaaaacaacagcctttatgttttcagtgcaggatttcttggaatttcttgcttgtatcaatcctgatgatagccatcctgaacagatgcttctggtctgttttcctggaatagcagacatccttttgaacactaatgatgccaggaagagagtaaggctagaggaggagactcattttaaccccagtccagtggcttgtccgacaacaggccatttccctttacattcctccacagacagaaatggctattaaaaatgttttaacctcatgtatgaactgaatttaaaaaaccactaaagtgatactttatacttctgttttactccctagtgggttttctttaatttggatttttgttgggatgtagcttttcctagactgtatttctgtagctctttttctctggtgtattcatggaaagcatctactgccgcacgacactagtactgtgccttctttcactgccctctgctctgcagctctcacccagcttggctgcttcaagtctgtgcagttgacttggctgtactgaaaagtgaacagcatggattaactcatcctgctgctgagggcagtgcaaacaggtgcttattagaggtagtgacttgcttaattagtgacactcctaatttctactatggataatttcaaagtagaatcactctatgcttagagttttggcaccaatgctgtagggcagcagaatctattctcagtaaaataacttatggtttattagatattctgtattggattttaccagcttgacttttactgctcagatgctttctttcccccccttagacgctgtaattctcttgggaagagtaactattcttaaggtttttacagatacccaccttagttgtaaattggatagtttatatttctgggactttttaaatgaaaatgtggaatgttaagttacaaaagacttttcatcagaaaatttcaaacaaagtaaacatggcgttttatagtcctctaaaatctaggtgctcccacccaccaaaggcatatcctgcaaagggctgtgaactatcttggtgaactgtcttgggtcccctttccatgtatgttttcttgtcactgaaaacaaacaacgctgagtttatcaagaaaatttaaattgggggatcataataattccaaccaagtgacaactctgacatcaaggttattaggagctgtacatccaattcaagttttatttgctgctattctgggagaataaacttgtatatggagaataaactaataaacttgtatcgaggaaatccataaagttataaattagcctgaaaaatatttcaggtaatggtgtggattggcctgctttgactctcagccaccaacagaaatctttgtcacctttgttcctcagctaaaagtaattttgttataaacacaaagtgactttaaacaggtaaaaaacccattcctatttttgtacattaccaaaagtttttcatatacctacagagctaactaattacaactgatttaatccactcaagtttagaccagttaaacccataggatcctgtatggttatcaatgtgatgccttgcttttcataaaataggtataattgggtcatacacttgacgagagggtgactgtttctaggggaagaaaaccctttagattgcaggtaactttcacttttttttttttaatatacactttacatttgtataaattatgcagggtactcctaaccctgtagaaatgtatgacctctcacaaagttgagatttgatccaaagagaaatgcaagtataaaagaattagatacttattatcttttaaggttttttttttttttggtagagatgggggtctcactgtgttgcccaggctggtctcaaactcctggccacaagtgatcttcctgcctcagcctcccaaaatgctgagattacaggcatgagccactgtacccagcctttccttataaaattcaaagagaaaatttctacacctttatccctcaaataaaacaagtgctcagttcttaccgtgcccttgcaaggtctatatgtaaaagaaatctgaaatttagctgtagaataaaacttgataaataaaaagaaaaaacatacatttctccagttggtttgctctttgcttgttgaagtaataaaccgttttaaagagaaaatacttgctgtaaacccccagtgccttcaactcttttggcagaatatttttaaagaaatccagcaagcaaactttgaggtgctaatgaaagtaaaggaaggtggtatttctagttttggcagaaatgaaaagtgtctcacaagagacatcactacccacgtggggtctggctgctttctaccaaagacatttagagaagtgaattgagtcagggtgatggtgaacactacatattttatagatggttaagttgagaattaattatgtttatcatggatggctactaataccaagctcatgattgttgcagcctcaacgtcttaggcagtaaaacttgtctgcagcactaaagggggagaaacccttatattttgcaaactgtccattcgttaaatttattgtaacctaataccaaaaactgccgtttttcatattatttccccacctcctactttttttttttttttgctacttgtaaaataaccccttctagaaaataagcattaactggaatgtttcaaacaattttgcttcattttactatcagccactagtgaactcttacagagatgtacatttaagataaaattagcttgtgctaagtgttttaaaaacattgtttactgttaaaggggaattgcacattatatttaactgggattgctccctccctcagttctttaaaaaacaagagtcaaggctcacaccaacttgtaggctgtgggagctttgccataggtagatacaatgtagaagtatacttttttaaagcatgaagaagacaaggaacttcattataatgtaccaggtagaggacattattattcaaaggattatgcacagctcagtgaagatgaagttacaatttttctcgcagctttgttgctattattttcttctgcataaatgtatgctcatttcattatgtgccttgctccctgattgtgcaaagctatatatatatatatatatagatagatagatagatagatatatgagagagatatattcagtactactgaggatgtttttctgaggatgtttttgttctgctggattaagttattttccaagttactcttgccagttatgtcagtaaactattgtaatggcttagcacactagtcgtacagtcagtgtaaatgtttttcatttacatgttttcattatatcagcttatcaaatccttaataaaaaaaattcatagatttcatttaaaaaaaaaaaaaaaaaatgaccctc

SEQ ID NO: 649 - DNA, 1593 bp, Homo sapiens
ggcacgagccccagataaatcagttgacccacattttcattttaggtgttaggtccaaattagcataatgtcttgcattattattaggttcagtgtgaaactttacagtgctgcatttgaagtttagtaactggttattattaatcatttgggaaaaatgaaaatgtgttgggactttctatgactaggcatttgttgattatttttcatgattgctttttgttttctcattgtgtaggatttgtgaacttgtatattacaggaaacaagatactttgtaaaatttactggggaaaatccatttggagtgcatgacatttgccaggataagaaagcagtaatatgtttgtattataaaattacaccctgccagaaaactttctttcctagtaaggtaaatgtagaagggacttttacagcatagtaagttgattaggagccaaaattttattccagtttttttttgaactaagaatgttttaaattctgtaatgaacttttatgtttacccattactcatgcattctttcacaatatgtttaatagcctgaggaaataggaaagctgtgaagctactaccattctttacttttaataagaataataggaaagaaaagtcaggtcagtaatccaaatccaaatatgtatactgcaaatgctcaagaagtcacattttttgataaattgtattgagtacagaagaacttatatgaatttattatctgttaataacttagttttgacaacagaataacatttggaaattgtgagaataatcaagctgtttttccattaacagtgtaaattcataacatgtccttcaaaaggtgatattctaagctgtcttaattgtctacggttgataacttttaaataaagtacaggactttctgaaagtgtttggcatgttatgctgccaaaaacaatctgtgttttgaaataccaattaatcagttaatttctgaagactttgtataggacttgatatatgagtcagaatctgtctgtactcattctgtacattgtaactttgaacacttatgaaaaactgtatctgttggtgtgttttgattagttagtgtagatttgtttgcgtatttgaattccgattttagtttaggaagactaaaagtagccatttttgtaaagttcatatgctattttttaatgtcatttttgtttttaatatttatacaatagtgatgttactagtaaaaaatgtttatagataacacgtagagctattaactgttcaaaagcctacatgataggcatattttgtatttcgtgttgcactcgttctgtttcatattggactttttacatcccttttttagcaaaaaaaagagacacatttgaattctctttagcataaagctgtgcattggaaactatgtgactgtatccatacggttagcaaaatactctttgccaccaaaggtaaatgaaactgtaaaatacctctggatatttgtgccaatgaacttttcttagcatattaggattaaagcaaaaataatcttttcagtatgtttcatctaggacttacaataaatgtttaaaccatgaaaacttaaaaaaaaaaaaaaaaaa

SEQ ID NO: 650 - DNA, 933 bp, Homo sapiens
ggcacgaggtaaaactgattactatgcttggaaacgcttagtgatacaggataaaaataaatacaaaacacacaaatacaggatgataatttgtgtaacagagatatcatttgtcagattgcttatgcccttatagagggggatatgatagtctgtgcggcatatggcatatgaactgccaaaatatggtttgaaggttggcctgacaaattatgctgcagcgcattgtactggcctgctgctggcccgcagcttctcaataggtttggcatggacaagatctgtgaatgccaagtggaggtgactggtggtaaatacaatgtggaaggcaatcttggtcagccacgtgcctttacctgctatttggatgcagaccttgccagaactaccactggcaataaagttttgggtaccctgaagggcgctgtggatggaggcttgtctgtccctcacagtaccaaacgattccctggttatgattctgaaagcaaggaatttaatgcagaagtacaccggaagcacatcatgggccagaaagttgcagattacatgcactacttaatgaaagaagatgaagatgcttacaagaaacagttctctcaatacataaagaacagcgtaactccagacatgatggaggagatgtataagaaagctcatgctgctatacgagagaatccagtctatgaaaagaagcccaagaaacaaaaaagaagaggtggaaccatcccaaaatatcccttgctcagaagaaagatcaggtaactcaaaagaaggcaaactccctcagagctcaggagcaggctgctgagagctaaaccaaacaattttctatgaggatttttcagataaagacaataaactgatggatagcaacaacaacaacaaaaaacagaaaaaaaaaaaaaaaaaaaaaaaaaaaaaaaaaaaaaa

SEQ ID NO: 651 - DNA, 1685 bp, Homo sapiens
aggattctagcagcatattgttattaatggccgttgtgaatattgtccgcatctgtgtttcgtatggcatacagtgaacaatacaaataatttcaagaagtttgattttgactactatggactttcattttctagttgttttctttttttcttatcattttcctttcctttttcttcatgttggaaatctttcttctgctgccttcctctgtcaattaaaaggaaaatcccacctaaacgcccaccaagaaaacacattgtggagcgctatacagagttttatcatgtacccactcacagtgatgccagcaagaagagactgattgaggatactgaagactggcgtccaaggactggaacaactcagtctcgctctttccgaatccttgcccagatcactgggactgaacatttgaaagaatctgaagccgataatacaaagaaggcaaaggaaaagataccccttcacgtctttagtcccaaatacacaaaattacgtgactggcaccatgaagtttcagcacgtgctcttaacgtacagtgatttatgagccttgccccccaagcagccagcacataccttttcatttactttttttttttcaacttcatagcaaaatctgtattaaatttgccttatgaaaaaatagaactttttctatacttttctaacaatttcctattgttgtgagaaaaggaagatgaacatgttttgtgctagttggtagctcacaaatgtaaaaccaaaaaaaaaaaaaaatagaaaattaagggactagatctatttgtggatttgtatctgtttttgttgtgattagggtagtaatcttggaaaacgaattattttcataagttgaatttggttagttggttggttgaagcagaggataatgagcaaataaagtccttgtctaatttggaaaattctttatattattaacatctcccaagattactttttaagttcattattatgttacattcaaagttgattgtaaattattctaaataagtaaatataaggaggcaagaataaacaaagactttattaaagaagagtgygtgcattgtagatttaggtatcttttaaagtaggtactattcaggatggctctatgaagaggaggaggtccagatttggctcctgaaaaaggaaagaagagaattttacccctatttgcaatggagaaatacagtattctttggtttggttggatttgcaaatcctatttcctatcaaaggaaatatctctagtggatatttttagaatatagacaatttctaggtattaactaataagatatggaaaagatagctttgctttttttaatcagaagaacataaaataaattacaatatgaatgattgtgagacatcagagaaatattttacttagtgacgtaaactactgtgcactgctgctattcctaggaagctgtgttttgggcaatacatggaagctaaatatatgaccagaaatgctttctgccttgtaatatagtgtattatatattagagctaaatttagtaataaatgcattttgaagtttggaaaagtattgtaataaagttgcctttaacttagctttgtacttgttctgtttccttgaggctagacacagtgccatccaggacttattacagtataactgggtaaaataaacaattctctgacaaaaaaaaa

SEQ ID NO: 652 - DNA, 526 bp, Homo sapiens
  SITE (12): n equals a,t,g, or c
  SITE (13): n equals a,t,g, or c
  SITE (57): n equals a,t,g, or c
ttgggaaagctnntacgcctgcaggtaccggtccggaattcccgggtcgacccacgnttccggaaaaagaaatttacacttyggcacragaggaaatgaaaaaaatgtcccagagaagtggaaccctgtggctggcattgttattgcactctgttgtcaccacaggtgtgattggagacattatgtgggcaaagaatatttcagggctctaggccttggagcagtggaattccattatttccagcgaatgagtagttgggcaacttgtgggatgcggaaaacatctttggaaacctcaaatagtaccacaaagaggcaagataatcagaatgatgatagtgaagagcatgatgatggaggatacagaatcacagatgatggcgctgattgtttgcctgggtaagagactacttttgtaatgcatgwtactaaaggrgaatattatattgtactgtactttagatgactattatcamcattctgaaatgtattttataatctaattttagaataagctaaaatatac

SEQ ID NO: 653 - DNA, 1582 bp, Homo sapiens
ggcacgaggataccactttcggtagagctaggaataacagcaggagtaggaatgagagttagcagccttgcagtttccctatcctattaccaatgcttgtccaaggattttatggaaagcttaggtgacattgcccaaaagtatcatcaccttacaaaatcagatagagtctttggcagtggtggctttgtaaaatagaaggggactggatctcctaaatgctgaagaaggtggcttatgtctttttcctagaggaagaatgctgtttttatgtcaaccaaacaggattagtaagggatgccacccaaaaactagccgattggtaccataagatatgacaacagctgtctgagtcatggggcgcctagtcaaaatgctaatttggggctcacatctccttcctctgggccagtccactattaaattattatacttgccttggcttttggatcatgtttgttaaatcttttaaccagatttatttcttcttgcctagagaccattatgataatgcagcagggccaccagtcagtttcagataatgatgtcaaccccggccaccaagaagtaaccttttctccactagacagagcagggcgagagttctgtaatccccagtaggtagggactgtgccccaagtcagcatgaagtagttatggaagaaagaccatgggtccctctgcctcccagaaagatttatggggatcacatctctcaggggaaaatgaggcaggagaatagggtctggagacagggaacctaaggctgatttgtgctgagtttctaggattgaatgaaaaggaaaaccccacctctccacacccaagtaacaaaaggatcagaggctactccctttgcactgcattgcagataaaaaatggaaagtacctcagattggtcccctcccacaaccaatcatactgggccatgggctactccttcgtttacatagggtgttaaccaagttaaccaatggggaaacctctagcgggtttgttaaacccccaaaaaattctgttaaccagtgctcttgaaactgcttggttggaacctactcccccttgttgaaattttctttcatttcaataaatttgtgctttcatgcttcattcctcgttgctttgtgtgttttgtccaattctttgttcaaaacaccagaacctggatgactcatagtcaagatcctctaccagtaacacttgaactttctggtttgtcctgaacatccctctttcttaaacaaccagtcgttttattctaggccaaaattttaccatacaagaatatttctcatatacaattatcttccttctaacttttcttgccagaaataccttttataactttctttacattgcttttatttaacgattacttttaccttgtttcataagttttaaatagccttgaattagataaaaaattattttcctttaaataagaacacatttctttttttagaaaaatatttttctgtaattttttttttttcttgagacagagtcttgctctgtcacccactgcacttcagcctgggtgaaaagtgagaatctgtctcaaaaaaaaaaaaaaaaaaaaaaa

SEQ ID NO: 654 - DNA, 268 bp, Homo sapiens
ggcacgagattttctaggaagggacagcaagaatattctgctctgtagttaaaatactggctggcttttgatgtcttcatgcttaattgtgatcactttcttgcactgtgatgtttttacgtgaatatgttgaagtagaagtctaccatattattttataaaatgttttctgtatggcaataaactgaaaacatggatcaacccttcttttgaaaataaactgagtcaatttagccttttaaaaaaaaaaaaaaaaaaaaaaaaaaaa

SEQ ID NO: 655 - DNA, 755 bp, Homo sapiens
aagctcgaaattaaccctcactaaagggaacaaaagctggagctccaccgcggtggcggccgctctagaactagtggatcccccgggctgcaggaattcggcacgaggagaactgcaggcagatttctgagggcacaccaagccgctgtgaaaatggggataaacacccgggagctgtttctcaacttcactattgtcttgattacggttattcttatgtggctccttgtgaggtcctatcagtactgagaggccatgccatggtcctgggattgactgagatgctccggagctgcctgctctatgccctgagaccccactgctgtcattgtcacaggatgccattctccatccgagggcacctgtgacctgcactcacaatatctgctatgctgtagtgctaggattgattatgtgttctccaaagatgctgctcccaagggctgccaagtgtttgccagggaacggtagatttattccccaactcttaactgaaaatgtgttagacaagccacaaagttaaaattaaactggattcatgatgatgtaggattgttacaagcccctgatctgtctcaccacacatcccttcaacccacacggtctgcaaccaaactctaattcaacctgccagaagaatgttagaggaagtctttgtcagcccttatagctatcatgtgaataaagttaagtcaacttcaaaaacaaaaaaaaaaaaaaaaaaaaaaaaaaaaaaaaaaaaaaaaaaaaaaaaa

SEQ ID NO: 656 - DNA, 1875 bp, Homo sapiens
ggcacgagtgctaattgaaattatttctacattaaacagacttgtagaatttacttatacatgcttgactttttaattatcttttttctccttttcttaaagatgatacttgttgatgccactgttatcatcctcctagcagaagatagtcctactgagaaaatgagcactttgatcattcagtctttgaactttaacctttgactggaagtgacctataggcaatgaagactacttccttttactgcatttttactcgtgtgcattctgggcgcatgttgatcgctggttcagtccaggcaactgacatgcttttattagtcatacagtattaatgcaggtgtcaggaaatgtcaaatataattccattttttatttttatttttttaagcttttggaaaagctccaggtcctcatgtattgtgcaataacaatgacttccttggcggttttggtacgttcattgccggcaatgggcgttgtaacaggaaaagttttcattaactcctgccattcaatgattaatgcatgatagggcctatgaaatgaacttactggttatagtgggaatataaataaagtgagggatccaacattactttaaaagtcaccccaactgtttatatttggattctatgcactgtgatcctaaggttaacagcatgaattaacatgcgtctttaaaggactgtaatgaaagatcattgcatatttattgaattgtttatatctactgtcaagttgttttgacatggaagattttcaagtaacattggcagagaggtacagtatgttatccctatggtgaaaataaattaatttgttgtatatagttcctcaatctctgaagtaaaggtatgagtaatatagggtatgaatggtttaatcaaggctttattttggaagtaagaaaaatggcagtgatgattaaattgctgcagtccataatttgggcttgttatttgtacattaaagattttttccaagtaagttacactctgttaacttcctgctagccatcagcatgagccctactgcctaaacactatttcatttatttatgtttggaaaccccgtaaacatttttgtttgcaatcttgtttcttttgttataagtcaagtttgaatgttacaatacttttattgaaacttttgttaagttttttcttgtaaattttctttacttgtgagtatcatcttgtcctttaatcctgtaccctaaaataagaaatacatttttgacagaggcttaatgttttaacaaaagagtgtggacatttttattttaaaatttaggcaaaagtcactatcaaatggttgcttatttgtctcatacagccatatagtttttcctggagggttttgttttgttgttgttgaaaagactttgcttacagctagatgaaactttctatagaaaaaaaaattgttgaaaggtccagttctcagtaccatgtgagttaatgatactacaactaagttctttttaaaaagtgattaatgtattttataaattaccttttcacatatgcaaaatctgtttctactacaatgttatttttactaatgccttattgttgcactctttttgaaatatcctgcagtgaatatatgaatcaatttgggcttaaaactgaaagccagttggctgaaaggtttgaaatacgtaccccagtaaaaccattcaatcaataattggtaaataatattttaaaattgtttttaatctgtatagatgacattttgtagctttgtacatgttgttaattaagggcatataattttacactcaaagtataattgctgaactcaggggtgggtagacttcaaaaatatgtctgctatagaaataacttgaaaaaaaaaaaaaaaaaa

SEQ ID NO: 657 - DNA, 1222 bp, Homo sapiens
ggcacgaggtgaagcagctcgttcagaaatccaagtattagagcacttaaatagtactgatcccaatagtgtcttccgatgtgtccagatgctagaatggtttgatcatcatggtcatgtttgtattgtgtttgaactactgggacttagtacttacgatttcattaaagaaaacagctttctgccatttcaaattgaccacatcaggcagatggcgtatcagatctgccagtcaataaattttttacatcataataaattaacccatacagatctgaagcctgaaaatattttgtttgtgaagtctgactatgtagtcaaatataattctaaaatgaaacgtgatgaacgcacactgaaaaacacagatatcaaagttgttgactttggaagtgcaacgtatgatgatgaacatcacagtactttggtgtctacccggcactacagagctcccgaggtcattttggctttaggttggtctcagccttgtgatgtttggagcataggttgcattcttattgaatattaccttggtttcacagtctttcagactcatgatagtaaagagcacctggcaatgatggaacgaatattaggacccataccacaacacatgattcagaaaacaagaaaacgcaagtattttcaccataaccagctagattgggatgaacacagttctgctggtagatatgttaggagacgctgcaaaccgttgaaggaatttatgctttgtcatgatgaagaacatgagaaactgtttgacctggttcgaagaatgttagaatatgatccaactcaaagaattaccttggatgaagcattgcagcatcctttctttgacttattaaaaaagaaatgaaatgggaatcagtggtcttactatatacttctctagaagagattacttaagactgtgtcagtcaactaaacattctaatatttttgtaaacattaaattattttgtacagttaagtgtaaatattgtatgttttgtatcaatagcataattaacttgttaagcaagtatggtcttgataatgcattagaaaaattaaaattaatttttctttttgaaattaccatttttaaatacctttgaaatatacctttgtgtccagtgataaatgtgattgatcttgccttttgtacatggaggtcacctctgaagtgattttttttgagtaaaaggaaatcttgactaaaaaaaaaaaaaaaaaa

SEQ ID NO: 658 - DNA, 2048 bp, Homo sapiens
ggcacgagtgcatatctctcttcctttttatatttaatttgaccatttgccatgcccactatttgagtgggtgtggacggggaggttgggaataaggaagagatggaagaggagactaatagaagatgtgcttttcattcagatttgtttctcttttccttcattcattccagaaacttttattaactctactgtgtgcaagatactgtaccaggctagctgggaagacaaaacaccttaggcatgcccttaccctcctggggtccttgcactgtctggggaggcaggattctggttgtctaatgtctaatgtggtaagcgctgtgaatgtatgcaggttatgggaagggaggatttgtctggggaagggcaggagggcatcctttggtctaaaggggaagttggaatgaattattcaagtggagaggccagggtagtagtgttagaggcaaatgaaagagcatgcttgaccagagaggatagagcctgtgtgcttagagctgtcagcgttttggccattgtgccaagatcagtggaaagacattgcagattttaaaaatcaatgaaatattttatacattataaaatacatgtaagatgtaaaatggtatattgaacacacatattcaccatctagcttaagaaatgaaacattacctataccattagcgtcccctgcttaccctttctagtcttatcgttcttctctctgcttttttttcttcctcgcttcttcccaggagtaaccactagcctgaattttctatttatatattttttgcttttctttctatttttactacatatgtatgcatccctaagtcatgcatagttttgcatgattttgacctttgggtagtaagaatcagcatggatgaatctcacataatgttgagcgaagatgctaagttggagctacatatagtgtgaaaccactgaaaggctttgcacaggggagtgacatttaatttgtattttctaaagattactttttatgcagtgtggataatggattggaggtaaacaaaaatggatggggagagcagttagaaggatgttataatctaagtggtaacttatggttgatggttgtaacctcttaagagaaatcatagacaaattcttagccatagccctttaggatcttatccctcccagctattcaaccttgctcttccctgaatctggcaagcttgttccctgttaaggtctttccctgttctctgtaacctgagcctttcatctcgggtctgcagagttcagtctttaactgcactcaagtctctgcacagagaggtctttcctggccattttgttgagaagtgaccccctgcccttgtcattattttctgttctccttactctgctttttcttgtagtttttaaaaaaattgcaacttgaaattatacatttatttatagcatgtttgctgctgctaaaatataagatccatgggggctggtcttatctaaaattgtaacctcctttccccccgtgcgtagtacatagtaggtgctcaataaatatttgttgaatagatgagtgaattgattgaagttgggataatggaattcattcttcccttttcagctgtttctcaaacatctctctggctgtgaacttttttcagagcttgaggttaatgcccaaaccctgtcttgctgtcacctcaaactcagtatatataaaattacattattttccttcctccagtctttcacttttgttaatgctgccatcactgacagtcctcaggcacaaaaccttggtgttatcttgcagtgttcactacccccgatccctagggtgctgtatattcccatttatgtgtttgaggaagttttctggttactgtttcacctctgctttttgcctattgacattttagccagccctcagggccctgcctcagtctttctcttctgagcacgaagctgaatttccatccaagcaccccttttgtacttatgtttatagtttgttttgttttgtttttgagaccctgtccccaaaaaaattaaaattgagaaaaaaaaaaaaaaaaaaa

SEQ ID NO: 659 - DNA, 1746 bp, Homo sapiens
ggcatcagtaaggtctgtatttaaatgtggatgtagacatcataattaccaagacaagaaattgttttgagaaattctctgatgtttttcttcttcaggtttcacgtgccacgatcatggtgccacggtactgcagtatgcacccaaacagcaactcctaatctcggggggtaggaaaagacacgtctgcatttttgacatcargcaaaggcagctcattcacacgttccaggcccatgactcagctattaaggctctggccttggatccctatgaggaatattttaccacaggttcagcagaaggtaacataaaggtttggagattgacaggccatggcctaattcattcatttaaaagtgaacatgctaagcagtccatatttcgaaacattggggctggagtcatgcagattgacatcatccagggcaatcggctcttctcctgtggtgcagatggcacgctgaaaaccagggttttgcccaatgcttttaacatccctaacagaattcttgacattctataaagattggggttttatttttatatacatttcagttaaaaggcacactacagtcatcactaggcaattctgctttctaagcagttgtattgaaaacagagaatctctgtgtagaatttgaatatgacccaagctgagtattatctaaacaggttggtggaatgaatgcgcatgtaccttattatgctgacatactaaaaaaaataaaacctagtattgtatgaaggatagctattctttacagcatttagcaaacctgattcagaaaacatttgagattagcaaattagtaacttgaaataatgaaaaggacgtttataccaaattaaggaagaaaatgttgctgatttgggtttttcttcctgttcttaccactgactgaagcatgcctgcagtctcctcctctgttgaatgaaggataatcataaggtgtttgttaggagcgctagaccacctggaaaactttcttagctgtggagcagtgcgcagtgaccagttctctgctgtgagaggccgtttccattctttcctgctgaatatttttcctgttagtgtttatactgagctagtactgtaacttgcaaatgagtgcaaatttaaatgcaatgttttactcacaatttgcacattcacattttttggactgctagtttttctatttaaatatttgccttcatgttaggaatgtactatgtgaacatgacatatttgtagttaaccaaacacaccttcttagtccagtttagtactttttcttttcgtgtattcaaggttaaacacccaaacatttaaggatatgttgaaactacaccaatagagcatttcatatcataattaaaatgaatgttaggcttcttgtggccagttaatagttgatgagattggtgacattatttattgccacagcctattgtataaactatgcagagttaaatatttgcttgtaaaatattagccaatgttgtcattattttgatgtatttccttggttatgaccaaaaatatgttgagatactgaaactaatgtctgtgtgtttaaatgtttaccagcaaattgtcttatcatgttaatgagaatgttcaatgcctgtgtggtaaatagtaaatacaatggcataaaagtaactttctctgaagatgtgatgttcaggctgtgaaatatatatgtaaaagaaaaataaatgttatttgttagaaaaaaaaaaaaaaaaaaaaaactcgta

SEQ ID NO: 660 - DNA, 516 bp, Homo sapiens
  SITE (426): n equals a,t,g, or c
  SITE (443): n equals a,t,g, or c
acgaggtttcaccctgttggccaggctggtctcaaactcctgacctcaggtgatctgcctgcctcggcctcccagagtgctgggattacggtcatgagccatggcgcatggcctatacagtattcttattggcttaggtcttttaactgggttattactgcttcataattggtctccctgcttccagtttcttccatccatatcttccaacctgaccccaaaagtaattctttcctctttaaaaaaaaaaaaaaaaaactcgagggggggcccggtacccaattcgccctatagtgagtcgtattacaattcactggccgtcgttttacaacgtcgtgactgggaaaaccctggcgttacccaacttaatcgccttgcagcacatccccctttcgccagctggcgtaatagcgaagaggcccgcancgatcgcccttcccaanagttgcgcacctgaatggcgaatggcaaattgtaagcgttaatattttgttaaaattcgcgttaaatttttgt

SEQ ID NO: 661 - DNA, 1671 bp, Homo sapiens
ttttttttttttttttttttttttttaaatgataataattgatttattttcatcttattccttgagaattttcacagcttattttttccagatcaagttgtgatacctatttgtatgcacaaatcaaacaaaaatccataccaacttcccagtgaggtctttcagatgctataggattaattttctttcttacctcaccacataaatatgctcaaaacatctctctgttttcatgaaatatcgtcatcatcatcttagttccattacaaattatggtgctgcattagccacaaagctattcatggggtattggttgtgattctaacttcttttcaaagaactatatactatacatattgtatggtgcttttgagaattcacgattttggtgtttcacatctagtggtgttattacatttttcccctggtaattccacccacctaaatggaatatattttgccactctgtgtatacctagtatgtaacttgttcagtaagttcagatatatgcacttaactgggggattctaagctacttccccaataaaaaccaatattttctttccctctcctttatgagttataaaacactttccctccccttcttcttttatttagtttatatgccagagatttttctgctctagggatgaaaatggaagaccagggaagaaagttgatgaaatagagatgattcaaagatcggaaatattttatcctcactcgatataaagtaaattattttttctcttttccaataaccatcatttcccttgatcttggaatcattcaaaacctagccactgagtcctgtacaaactaatgtgctgtctcaagatgagaagaaacatgaaatattggtagctgtacagattgtactagtctgattatatttacagttatgagataccgcaaatttaagaatgccaattttttctcatcactgagtatttattatatataacaaatacatgggacaggaaaaactatattgtgtgatataaatagtttatttacattacagaaaaaacatcaagacaatgtatactatttcaaatatatccatacataatcaaatatagctgtagtacatgttttcattggtgtagattaccacaaatgcaaggcaacatgtgtagatctcttgtcttattcttttgtctataatactgtattgtgtagtccaagctctcggtagtccagcccactgtgaaacatgctccctttagaattaacctcgtggacgctcttgttgtattgtctgaactgtagtgccctgtattttgcttctgtctgtgaattctgttgcttctggggcatttccttgtgatgcagaggaccaccacacagatgacagcaatctgaattgttccaatcacagctgcgattaagacatactgaaatcgtacaggaccgggaacaacgtatagaacactgtagtcctttttttcacagtgttgtccagtataaccagcatcacacctgcaagatggctcctgcatattgatagaatgctcacccttcccatgcatgcagaagccattgtaatgttccggacaaggtatgtggtgttctctggcactttcttctaatttgttagcattctctgcataatctgttcttgcataatgcccatcttcagacttagtagttgtagttgtgctcgtgcc

SEQ ID NO: 662 - DNA, 1356 bp, Homo sapiens
  SITE (682): n equals a,t,g, or c
tttcaagctgaaaatcatggcacaacccacaaaacaactaacctttttctccactagaaggcactgttgtttcatgcaatgtgagaacacagccaggggagaaacatcaatgcaatctttatttttttatttttattttttttgagacagagtgagaccctgtctcaaacaaaaacaaaaacaaaactacaagagttatatatacatacatatttacacatagacacacatacatgtatacatgcatatgcacacagacgtacatgtgtatatctaaaatgatcttcaggaatgcacagcagaccattagggtagccacctcttgtgggaagaggggtggcagatcttcatatttttattctagattttcataatcatgtacaaatttaaaattaattttttgttgacaaaaccaggcagtaaggagaggcctacatagggttgcatttggtaggcttctcttcacatactcttctttctcattccctgtgtatctgacacatcctttcagaggggcctgactgtggagtgatgtttcttcactgcctgctcatctcctgtgactttcttgcgttcccttctgagccttaccaccttcgtgggatgggtgtccctggctgaaggtgtacctctgccatgttcccctcctccagtaccttggaaagtcccggtgtgtcctgancagcatgtctccgaggggactgtctggaactctcatccccacaataggaagggtttttcagtcatgggggaacactgcgttcctgtctgacctcctggggttcctcatttacgtggtcagtgagctgttgagaggcttcaggaagtcaggagtgaggaggcctgcctagctctgtgaatgcagctttcctaagtttctctggccgtggaaccactttcccagaatgcctgttgacatcttcgtgctccaccaagatgttgggaagtgcggctctttccctggttcccacttggactttctccttaaatctttgcagccctgggatttccagctggttccatgcccatccatagcccacatagcctctcagtctgccttggccccttctcctacctcggccctcaacccattcaaacaacagacctggtcacctctgaaatttggtgttaactccagggattgattgctcactggggagcaggggctagatccagcccacagtggtgcttgacggggtcacccatgtttaaaaacacaacttgagccaatattgggctcttggaagatacttagagatctggtttcttattccataatccatgtgcctgtgaaaatgggaaaaagaaactttgacagggatagccatatgtttcaggaaaaaaaaaaaaaaaaaa

SEQ ID NO: 663 - DNA, 880 bp, Homo sapiens
gtttcaacagaagtaaaaatgatcctcctgatcatcccatcctttcgtctctctccattctcttcttctaccatcaaggaaccattgtgaaagggtcatttttaatctctgtggtggggattccgagaatcattgtcatgtacatgcaaaacgcactgaaagaacagcatggtgcattgtccaggtacctgttccgatgctgctactgctgtttctggtgtcttgacaaatacctgctccatctcaaccagaatgcatatactacaactgctattaatgggacagatttctgtacatcagcaaaagatgcattcaaaatcttgtccaagaactcaagtcactttacatctattaactgctttggagacttcataatttttctaggaaaggtgttagtggtgtgtttcactgtttttggaggactcatggcttttaactacaatcgggcattccaggtgtgggcagtccctctgttattggtagctttttttgcctacttagtagcccatagttttttatctgtgtttgaaactgtgctggatgcacttttcctgtgttttgctgttgatctggaaacaaatgatggatcgtcagaaaagccctactttatggatcaagaatttctgagtttcgtaaaaaggagcaacaaattaaacaatgcaagggcacagcaggacaagcactcattaaggaatgaggagggaacagaactccaggccattgtgagatagatacccatttaggtatctgtacctggaaaacatttccttctaagagccatttacagaatagaagatgagaccactagagaaaagttagtgaatttttttttaaaagacctaataaaccctattcttcctcaaaaaaaaaaaaaaaaaaa

SEQ ID NO: 664 - DNA, 1003 bp, Homo sapiens
ggcacgagaaaaacacccagaatactatcagtttccttggtcttgtgaatgttttgatcagcagcaaaatgtcattctgtttccagctgttgctaggtgttgcaatgtctcagcctcagtctctgatttctccggtttccataactaactgcctacacttaaaagcgtttctttacctactcattttccctcaggcctttccatttttatcttgtatttttccactcttttggcagacctgcatgggcaaggacgtaacccttcacgtctcagcaagcaaccccgctatgctactgtaccagaagtttggattcaagactgaagaatatgtattagatttctatgataaatattacccattggagagtacagagtgtaaacacgcattctttctgaggctccggcgctgatgcgaatacagctcacagagaaacgcatgtgctattggagaacaggtctttgtggagatctaaaggcagtgattgatttcacagggagctctaatctctgtgattacatggtccttcaaactcccaaccaaagtgagaaaagcggcatgcagtgaaatgagcagtgagcagccctttagcaaaatcgccctccagtccttcctggagatgccttcagccagcatcccagactccacagttatttatgaatgatgtcgtgattctccctccacctgacagtttgtaagagtgaaagagcatctaacctgatgctcttggagagagataacctgtctgtcataacttaaaggatgagaaaatgtggtgtagctattaaagattcatgcagtcccaaaaggcactgtcctgggatgatgagagattataaggtgatttcataaaaggaatccaaccctgtgcccggccattgatgtgttgtcattgaatccaggaggatttctagggcactgaagttttgttgtttcttttgctgactttggttacagtcagaaaaaataaactagatgtttgtgtctaaaaaaaaaaaaaaaaaa

SEQ ID NO: 665 - DNA, 1061 bp, Homo sapiens
  SITE (1056): n equals a,t,g, or c
ccagatttgtagaaaattgtaattttctcagtatctaaaactattttgctttccattaagtttctatttgctattttctcagaattttacaattaaagataaatcacaaactgtttgtttttcttaaagttctttgagaaaatgtctaattatacaatccttggacaatactgtgtttttttggtgctgtgttttttaagaagtcctacttactggaattttgactatttggatatttttgtttttaaaaggggaggggaatttgcttaatacttctaaagatgtgaattgataattgatattaaaatagaattactctcaactcaccagaattaaattttatatctgcatatttaacactattagctcatataaattataagaaaaattttcaaaggatctggttttaattttttggatatgaaatgaatttgccttttctgccttttcttaagtactattttgtaactatattgcactaactatatccaaaacacattctgagcatcactgtgagtaacagccttccagtttgtacccttttgattcacagcatggccctatagttaattaagaggtggataacttaagctcacaactgcctttaatttgatttcacatccacagttataaactttgcatttaaaaggaaaatgagacatttaaataggttcctgttgtttcacatataattggtaaaaacatattcccttgtaggatcctattatcagagcatcaaataccaaagtcagcaacttgggttgscaaataaattaggctcattaattattttgaaaagggctgctgtttccatgtaaatgataattttctttttcatggacaaggttatggtacttatctactaaaagaaacatgcataaacatagtttttatctttaacttcagtattaaaatatgcagttttttgcaaagaggaaaaacatctggtcaattacgctgaactctgactacatgtgggccagtaataatatgaattggacttaagaataaaccttgkgkttaatctctttttttccttaaaattttaatgggagntttct

SEQ ID NO: 666 - DNA, 1080 bp, Homo sapiens
ggcacgagcttttattgagaaaaggggaagtaggatttagtctactgcgtatttccctgctctctacagataccttatcgctcccgtgaagtgctggcttcatgcattcctatcacaaggcaatcactcagggtaaacgatgatgctgcatgtcttttgtgccacctctacatttctctaaaccatattaaaattgaaaccaaaagcacagataaaagcaatgaaaatatgaattcacttttccatgtgctggtctcacctagtgcttctacttaaatttttaatttatgggaaatatacttcaatctataatttttttgtaattttgaaatgagcgatatgaatttttattgcattattgaatggcccttgtttacctatcctttataccttatttataaagtgcatcctttataaaggatgaagtgtatatagtgcataaaagatatactttataaaatatatcctttatgcactatatgcctccatagtatcaggtatatatttcattaggagatgcatacatatttatatactgcaatccaggccattatactgatataggagagaagaggtcatctatgtcagaattgttttcctaacattctctaaatttccctagcttataaattacttccttgcatttcaaaaaagatgcttttggtttttgtagataatatgggtcacaccagttctgctgagccccagttgcatttacttctctaagacctagattatatggtttaccatagtgatatttttcattgactcaaaaatataagagattatttactcctaaatatatcgtaagatgttagcttcaatttagaaaactttatttgcttatatccttattgttccaccttattacttggccaaaactatggaaatcagtcatatctcattcccaagattaaaaattttaggaaacctgactgggcaccgtggctcatgcctgtaattccaccactttgggaggccgaggcaggcagattgcttgaggccaggagtttgagaccagcctggataacatggtgaaaccctgtgtctacaaaaaataccaaaaaaaaaaaaaaaaaa

SEQ ID NO: 667 - DNA, 464 bp, Homo sapiens
cggcacggaggcaattcttgggcaaggactgactctccaagggtttgttcttggctttggacacctgagaaccccctctcccctcccccaatacaaggtttttgacatgagtgtactcctgcttagttcctcttgtggggctgcatttgcggtgctttgccctccccactgtgagtgaggggccaagggatctcctcaatcctgtctccccagcggctctgtttcctccttctttccttggcctctgtcctttgctgacttcctcttccttacccagcagaactcaccctggggtcggggcagtggggaggggcctatccactgctcttcctagtccttggcagctggcctaggtgggcagactataggagggactggttaggagtctgcattgctttgacttccctctccttggttaataaacacaaatgcttgtttctcaaaaaaaaaaaaaaaaaaaaaaa

SEQ ID NO: 668 - DNA, 1708 bp, Homo sapiens
ggcacgagctattccatccaagggaagcagaactgccaaagactcaagtcttttcatatttatttcccatcctgcgtggctttcccatcagaagcgatgagccagcctgcagagccaagcctgatgccagcatggtaggaggccacccctgaccacggctcagtacttgccacctgctggcctgtctgaccctcagggtgaagcaggactgaggagtggccagctctggatagctggctgtggagaggaagcctccatgggctgctttggtctgtgggctccttcattcccttggtgataatttccctttattctgtgggatttttggtggggttttccccccttttttatggagttggccaataggattgagttggggctccagtagagaaggcagggttggtggtgggtgggggcagcctgtatcagacaaaggtaaatcagccagccaggcacccacagcctcagctcctgtgcagttcctgggcagcacagtggaagtgggagcctggtccttcccctgcccatggagagctctttaagggatcccagcctgcccctccacttctctcccaagccaggtcccggcatgggtgggttatgctcatgctggcaatacttgaaacgggtttattaatgctgggtattttgcacaattttatagacctcttttctacatagtcttttttaaatggaaggagaaaatgtcagccacattactgtctgtgtagtgccaggtgaagggttatcagaaggctggttggttttaataagtttattccaagagaccttctggctggaatgagtgagagtgtgtgtgcatgtgtgtgtgtgttcatgtgtgccctgtatgaatgtggctggctcccatatcccctgggctgccccctgccccatcccctttgagtgtcagaagcactctgagccaaggggacagggggcacgtgcactggtcacgagaaaaccctgggctccactggggctcagcccagcctcctatctttccttcttctatggacttcagacagccagtgtctggggactctgccactctacccccagccctacccaccagcccccaggtgaggcttccagctgggacctgcccagacaggctgagcctgggcgtggtgggtggggtgatggctctggggagcggctgccatcctacaagccacaccccctcctctgagctctgaatatgggacccagtgccaggagctggaagacaaggtgtttctgccaaacggggacctccatccagagaaaaggaagaaggtgcagggtgggccaagaggcaagtgaaggttggcctgagtctgggccggaaactcagaggatgtttctcctctgctgggagctgtagtttcttatcaaaatagatattgttccaccatccccctccttggcccttcaagtgggctgaagcccttggaaagtgacataggaagtccccagatcttgcccttctcactccagaggctagtggtcacagacagctgggaatggcagccacagagggtcccctctgggagaaacagcttcaccccagcctcagggccctgggccatcactgcagtggccctgggaggtgaggaagaagctggctagaggagggggctcccacctaccttttatttaagccagtattctttgttcctgcttgtaataaaacttcagtttataagaaaaaaaaaaaaaaaaaaaa

SEQ ID NO: 669 - DNA, 603 bp, Homo sapiens
ggcacgagaacaaccagaatggatggtgtgtatttgttatatttagaatgttgatgcttcttaccctcttctcttccttgggaatgtttgggactggtggtttagggggaagagtattctgtccccacacccacactgattcagaatatctcattcatgttgtggacagtcccataacagtgcagtgggggaggggccccaggttttttcccttcctttccccatttatctcctgtggccagaggctccagccaacaatagcactcagggttcccagttctgcattctccaaatatggcctcacatagcccccggcctcctacaggcaaagaaagggaggttctatgcagccaaagacattgagtcacttaaagaggtttccctagaaggcctacacttcctctttctgccccctccccattttgctcagtctggatctgggaacaccggctatctgctaggccctaatatagttaaccttttccatgggtcactgttgaatacttggcagaataatgatctcacccactgatagatgagtttcccccattcttctggcctccgccacatgatcaggaagctggacttgctcttatccaacca

SEQ ID NO: 670 - DNA, 1415 bp, Homo sapiens
  SITE (1085): n equals a,t,g, or c
  SITE (1196): n equals a,t,g, or c
  SITE (1337): n equals a,t,g, or c
gctcgtgccgcatgtattttcaggctttttctgtgcttcattttggacggtttctatggctttgtcttcaagtttattaatctttaattccggcatttctgatatattcttagttctactcatatttttcctcttcatttatttttcatccgtcatgagatgaaaattttgatttatgtttgtttattgtccacatctckatttaatatattcaggcattcttctacttcttgaacatatagtttacagttgcaataactattttaatatctttgcttactaattccatcatctgtatcatttcctggcttgtttctattgctacatttttttcctcataatgggtcacattgttctgtttattacatgcctagtttttttcactggattccaggcatggtggattttaccttgtgttctggatatcattgtatttttagaaatattcttgagctttattctgggacacttaagttatttggagatagtgtaatcctttcaagtctttttatgcttagttgggtgggaacagaacaaacttaactagggctaatgttgcccatctactgagtcaataatcttatgattattctactcgatgtcttgtgaagtatgtttccttcttagatgaaacataagttattcctgctactgtgtgagcccttgggattgttccctctgcccattttagttacttatttttctgctttaggtacattcctcacaaagcacgtgctgatactttcagtaaaaccttgagggaaccctctgcagatctactcctgtctgtctctttgcagttctcttctcccggtattctactaggcaaattctaacaagcatggccttcaactttgtttcctcaactcagggagattgccagcttccacctgggtttcttatccctctgctccgtggaagctgttaagtggggagctattgaagaaggacttacaatgkttgkttcccgtctctcarggattactgkcctatgctggccaatgtctaatgtgtaaagaccattgatttacatgcttttctgkttattaattatttcargcagtgggtaaatgkattcctattanttcaccttgctcaaaaccctgsctactcgkttttaaagkttaagctcaagcattaaatcctytccaaagkgkttcatattccattttctattcaggaakgattkgtttgcnaagaccacaagctctttcaaaaaagctgtaattggccaggtgtggtgctcacgcctgtaatcccattcagcactttgggaggccggggcaggaagattgcttgaggcaagattgcttgaggagtctctaactcctcaagcnggagttagagaccaggctgggcaacataccaagacctcatctttgttaaaaattgaaaaaaaaaaaaaaaaactcgag

SEQ ID NO: 671 - DNA, 780 bp, Homo sapiens
tatacacatgggggtggaaaggccaggcctgcccccatctcgttggtgtggctctgcgtatactacacactcattctcctgctcctcttttcccttagtcagtgtcctttcatcctgattcagctctgccttgcatcaccctcagcctaagggagtgggaaggaaatggggtgttttcttgctgacctgaggctatagggtcacttgccatttcctaccttctctgggggatttgagggtagaggcaggggaagatctgttgttgcagttgcttctgcccccttgatccaaatgaccatcatctctgatggagatgggttgggtacctggccttcatggcaccttcactgctagggatgctcaaggggcaggcctggggcccttccctcctgtctcttctcggtctttcctctctgagcagcctcctacctcccctgcctgagccctcactccacagccctcccaggtacctagcagaggctgtcagtccttggctcacctggaacagggctggggctgggttggaacaggtgtgtgcccccaccacagctctatgactctgttctccctccctgccattgtggactcttgtatttgagggacctcaagagagtgaggaccctaccatccactgtccatattcagtcccagccccagtgcgcttcctctgttccctccctcagccatccaattcttgagttttctcactgattggttttctttctttttccttggattaaatgtgaaagcaaaaaaaaaaaaaaaaaaaaaaaaaaaaaa

SEQ ID NO: 672 - DNA, 3334 bp, Homo sapiens
ggcacgagcacacacgcccacacgtgcttacacacacaccttaactttttttgcacagaagttgtgttgttcctggtcagtgtataacattttttgcaactttttgagtcactctggaagacatattcacattcatgtggcttaaacttactccttgaaagtcttggaggaaaatgcttaaaataaaacaaatttgagtttgcgacatgggccccttatttaactgcggaacaaatggttgttattttaattaccttttgtttcattgtattttaactcatgaaatgcaagtgttactgctactggtaggctttttccagatggaactaagcctatttattcttaaaaacatgaaaatttagagccatgtggccctctgataggtatgaccaatttatcatgtaaatttctttaaaacatattaaagttaagtggatacttagaagcaaggtttaattttaactctgtagtttctggggaagcttgaggaatctgcttacattatatatttgaacacagtggataaggtctgaaaaataagacttcctagaaatgttttagcaaggcttacataactaatacaatataaatttagaattgaaatattttgtgtatgatatcaactgaatttaatcatgtgtctctttagggttctattggagcacctggaattccagggatgaatgggcaaaaggtgagttctatagaatattgtattttaaaaataatttggtgagcattgaaatcacaaaattattctagtccataatgttagtaataagcttatatgcttataaaaacactatgttttgaaatacaggaaaattgtgctacaaattaccaaattagtttaatttttaaagatgcattaaatagtcaggaatcttgaagatttccatttcaagtattttggatgtgttgcttttcataaattatgttgtgatacactatatcctcccataaataatatgaattgggaaaatttatgtttaacattgatagtgataaacaaaatgcactttagtttattctggtcatggtaaaactaatatgtattaataattggctaacaaaagttattctcatagaaggaactagtcaaactttctgaatccagaaggtagctcttttcactgttaatcaaaagtagaagttaaatagatttgtcccgctttggtattacatacacttttattgtactgttaataatgagaggaaaaagtaaagtgaaagaaacaacacagtctacatacacatatctatgtgttgtgtacatttactcctgcaacatacttactagttgaacaaagcatagctcctcaacatccctgaccggccctttagtctggaaccttcacagaaaccaggaaagccactgtggcagctgacaaagcccattgctgagccggtttgtcaggagccaggaagctgagcgagggactttcctgtcttccccagagttcttggcctggcccttttatactctgcgacccattatcttgccttcccagagtattttaaatccatgcaccctggaccaaattctgaaatcatacgtaactcaaccctttcaggtgcaataaatactccttgtgtccttttccattgagtccatcttttctttctatcaataagacataaacaaccacaattttaaacctagtaagttgctaagagcatgagtcttccactcagaggctgtgtgaattttggcaaagtccttggaattctctggcctcagtttctcatctgtaaagggagacaatggcagtgcctacctaatagagtcaatgagagttaagggagtaaatagatgtaaagcccttagacagtatttgatattaccattaaacttttccttcacttcagttaagtgaaattccaaaaattcagttaatctatgtttttaagaggctctgtgttcccagaagtactcaattaccccatgaaattaatgttctcagccaaagcttatggtgtcctttagtccataaaccaaacaccgcacactcgccagcagttaaccgcccatgtcgcagctacattttccacttagtaaaatgcatatccatttgcttcacaaatcctggcaaagacagaatatttagaatattctgtttagaatattgcagatcatggagggaaacctaagcaaaaatttaaaagtgtattcattctcagatggatttgaaaattatataactcaagataacatttagaaagaacaaaatacagatatggcataaatgttgtttttgacattggtgagaaacaaaacttgtatgcctaagattaataatgttttcctttttcgtctttgtttcttttcatttttcagctttgacacaatcatgaaatttatagaaacttttaacatgaaacaaaacaactttaaaactgtcacatacactctttcaaagactgcatattctttatttttgcaaaggaaatatgcaatttccttagcaagagaaaggaatgtgacattttcttgtcctagtcaccaagtttaaattatatttcaaggaaatagttaatatttgcagttttatgtctcgttatacatctttgtggcattttagaagtgttttctgtaaaacccagggaaacgaaatgatttcacacttttatgaaggtatcagcaaaatgtaatttaaatttgttttccctccttcagagaattgaacctaaagctttgtgtatggaacttctgttaggtctagtaattacttaacatttgtaatatttgctatatcatttttaggaaaagaaagtgtaaaaaacacgagtctccttcactgaaacagcaggtcacttagagagtaaaaacaaagttggcaatagagtaataattttacatacttagagcacatgaaatgaactctagaatttgtttttaaacaaatttcttgaactctagactttgtttttctggaatcttgaactctagaatttgtttttctaagaaaggagcttacaatgacataataattttgttttagtaagagcacctcaatatccttaaactgtcttgagaaaacattttcttctccattacaattttgctttttccaaaagattacttttgatgcttagaaaagttttcagacagtggttaggggaggatataatttctaagccatcagaaatatggcaaataatatccagctacttggggtgggggcgctcaggcagaaggattgcttgagtccagcttgggcaccatagtgagatcctatcctatctcttaaaaagaaaaaagtaagaaatatggcaaataaaaactagggaataaaaaattattttcttatgtttgaaaaaaaaaaaaaaaaaa

SEQ ID NO: 673 - DNA, 918 bp, Homo sapiens
  SITE (4): n equals a,t,g, or c
  SITE (886): n equals a,t,g, or c
cggnacgagaagacattttagtctttgaggttcatcccattctgttttaattttttcgagacaaaaaatgaccaatctcttatttgcgtattcaagcattcttaataagtcactaaaactctgatttttcataactctccttttattaaaaaccttggggaagagaacaaaacattccacattgaccttagtgagttgttcctaggtaggcatgatgaaaatgcaaaactgaaccccaaatctagccaactgaaagacattgatttttctagaacagcaccttccaaacaccagtctgtggaccagtcactgcttgcccaagacaaagttctcaccagcgtgaggtaaaatgaggaaaataacagcaatgtgtctaaattcattcaacctaaagacttcctttcattctttattgttgtccttcctatttctttgattatttgaacatctttacttctataaaaggaagttgccagcagatggtagttgttctctttaaacgtttctacttagtgaagttaacatttaacacacacctatgttggtcctcccacacccactttatttttttctcatccgtgaaaactagatatctagaaactactgctaggctaagggatagcttctgctatccaagacccccagattttccaaggttcctggccttggagcctttatattttataaaggaaatattttttaatcacattcacatctttaacttttgttttgaacatgtgaaatacaaccttttctggataactctatcatgatcaataatcaatggcattggattagaatacagtgaatctgctggagggcaaatatcatagggcagttttccagaaccagaatcgcccccgggccaccattcttttagcaattngattctgtctccttaaaaaaaaaaaaaaaaaa

SEQ ID NO: 674 - DNA, 3193 bp, Homo sapiens
ttggcacgagaaatgtcctttccccatagttgtcctatgcctttgggctttagtctatcccaggactaactgtggagaaatcattggtttgagagtcaagagagcattggtttgggagctttaatcctctttctgcttcacactaagtgtgtcatcttggctaaatcacttggtctttctgcattttgttttcttatttataggatgaggaaattagattaaatggttttgaggtcctttcttgttctgatatgtccagtactcactggaaaattggatctataactgatgggtttagtaatctgctcatttcttgctctgaaaattgtagtcagcaaaagagatcatggaagaaatcactgtaatggtagtaatagtaacacatgcsatttgtattgtgccttaggtttaccaggtgtttccaaatacattagcatatttsatatgtgcaggactagataccttgggacctgccacactccactttcaagatatgtattagcttcattagaattaaagggacttgaactcaggacctgcagcctattctttatccacatgtctctggtagggctacatccagatcacaccatgacttcttatagagcaagagaaaataatattattatatcttcctttgcctaaaatctctccacttattcttttttatgattctgcaccagttcactgggttattctatgattccatatttttttttaaaaaaatcatatttaaaatgaacttacaatgtctgaattttcctggccttgagtcacagaagtaatatgtttcagatggctgcccaatatgtattatcatgtaatacatatctgtgtccttttctgggatgaggaaggcttcaacttctggcactgagaactttgtattacagacacaggtttagtttctagcttagtcatgcctttagagtttagtagcacaaatccatgcaacccaacagaatacatggtgagggcctagtatgtagaatttgaaagtagttcaaatttgaattagaagaatgaagctaggacttatttggaaaaggagatagaaaaaaaatgatcagaaactgtggggccttattacctttgcagtaagttatcttcttcatgatatatgtgaattattttatgtgcagattgtgttttgggattgtcagatctaaacttatattcttgctggctaatgtgctgatagccaggtctgaaacttgatgtgctatccagacacatatgatcagaaaagatctagagtgcaaagaggtgtctgaggagcaaaatgtggttttaatgttgtggaaagatcacttgcaagtatataagactgtataaagaagaggactgtgtgcaagtggggtgaaaaaaaaggatacgcgaatgtgcatatgactgaatagggaggaaggtcagggctagaaaggaggctacataaaaaggggcaatggagagtgcacaggaaagacacaggggaaggtcaagtcgagcaaggtagaaacaggagtagctagagccattgggaatccattttgaaacaagaaggagttttgaaagggaataggaaagtaagtgtcttgaagtaaaagataaatatggatggagaaagaagaaattctggatgatagagatgataaaaatatttattaagaaatgaagtcaggttcagtgtatgaaatggaaaggaatttttcagaattttaagaaaggggaagttcctcttggaaaagatatagcaaccattggggaatgaccttttcatttcagaagtggatgaggaaggtggtgtgagcatcaggtatattctggaccatttcaagtgctggtgagaagaaaggaactctttgcctgaactgggcttggttttccaagtgctgctttggaaatgaagacccagagatgcagagcttatggtagttcataaatcttcatgttctattatctttcatctgccaataaagttcattttcaataatgtccaccattgctgtgcccagaataaccacaggcaaacatcaaaacaatacgcataagttagacaagattaaatcttgtctgatatctgcacaaacagatatgcaccatgttggaaacatgtgttttcctagtcccatccaggcttcccacaagaaagccatgatgtgggtctaaaccatatgttttgagtaaaggagaatagaagaaggggagtgtccgcaaaatggaaagagatgaagatgttccaaggaaatatgctgaaacagaacagtgaatgttttgcccaaaactacaaaaataaaagaaaaaaagaaaattgcaatacatggctactaagtctttgatcataagtcgaatttatagacctggaatttgccatcctagtctttcctttttagtaagacttctgtcctctggcagtgcatatggtaggtctctaatgtttctgcatctccaggaagatgcagatccttatttttgctgggaaatccttctaaatagaaatgtaacatttttataaaaacagattaatgtgtttttcacttagtaaatgttttcaagagctgaattgagaaggaaagagactggagtggttaatggtgatttgatttctggcattctgagttttctgctacaattagctgcattacttggtgccaaagagcagtggggaattgttgagttgctgtatcctttaaaaaaaaacaaaaaacttgttattttgaaagaacttaaggctcacaagatgttacaaaaatagtagagtggccttaccctagatccagttttccccatttataacatttcacttagtccattttcggaaccagaaaattaacattggcataatgctattaactaaactacagaccttttttcaatttcgccagtttttccacacatattcatttagttgctggatacttttaattcttgctgatttgtaaactggccttgcttggatacaacaggaaagatactatctggataaagttctacagttttagagagactattaacacattaatgtgttcctttgtcatgagcaataccctgcctacactgcttctaaattttctgatttgtttggctgtttggcatctgaaacaatccaagacaaacttagaaagattaggcaacacaaaacacagtaagacctgttcatagcttgttgcctaggaaaaccmggtwgscrggatawtcctaggatggcttcctg

SEQ ID NO: 675 - DNA, 1859 bp, Homo sapiens
  SITE (917): n equals a,t,g, or c
  SITE (981): n equals a,t,g, or c
ggcacgaggctttctgaatgtgacctcgggatgctgcagcggcgcaatgctgctactgctgaatgagtagctctcctgccaccgcaggcgactgcggtgggcacagcagggcgcacagaggagggggtaatctgcccacccaggctaaggatttgagggttctgacaaaaaagagctggttgaggatgacacagttgtgaactaacctggctcctactaccccacagggcagccaggtcccagtagtcttgggtaccactgcccccaccataccaccattgtaaagtatggactcctgcttagccaacgtgcagctctaggcaggatctctgaaggatgctctggcacacagatggtgcaggtatgactttacctgcacacaagcttacatgtgccctgtcatatatggctacacgtttccccatttccccacagtcttcctatttaactggtcttcaatcctcctttctagggctttccgcctgcacacagtcatttggagaaaatcaagtgagtgcacttctccccacagaggattctgtatgttatgtaacacactcacactgggattcctcaagttaccattttgccccaactcagccagcacttggttttctggcgggggtgtcaggatgatgcaaatggaggtggaagcttcattccctgggggcttttattcccctccttgaagccccagttcaaggcccaggaacaaaggggaaaggtaactgatctctcttttggtctttctctcccctcacttccaccccttcacctgcaggccctcctctttgataaatagaggaaagcccgtgggatcaggtacatatgtaaatactgctgacctcggccgcccctcctcaccgaaaagcagaaagcccgtttcaggtgcaggctgctccgtgcctttgagtgtncaccacttctattcccccagactgcttgggactcaaggccactcacttaatacccgtctcttgntaaaaacattcaggacaactattaaatagttattggaagagttaaagaccttctttcaggagtgaaacgtttttaaagctgtgcttggcataagtctttaaggcgtacaaagtagaatcagtagacttgcctgagcgattttgaaatttgaaagatttctccccatgaaatggtaatttaaaatagtttgtagatgttgttttgttctgtgatggctttttcaccattgtcacctaaagattctcaagaccaagctactaagacatttcatttggttagtttctgggtgatactgtgctttctgattagacctatttaatttatttttaactctgcaggagagttttcaaccttggaaatgtaagtgaaacacagactcaccctccttctgagaccttgataggggcagaaaggaacaaatctggctagcccccctcacacctggaagtttccctgtctaaacctgggtacaatgagcgtggtgggttttgtcaccttttattttattgctggctcaaggaaaattctttgaaatgaacatctattctatttcagtgtgcaatgttccagccgacttaatgggcttgccttatgcggagaggcagtcctgcaggacagagctaatgtgtggtctcccaggaagctcatcagaacacctcttgtcccttttctttaaaagaaaaaaaatttaaaaagtttttgcttccatctcaatgtccattccattattttgtagctacaataaagaaacatgggcagcagtaaaaaaaaaaaaaaaaaaaaaaaaaaaaaaaaaaaaaaaaaaaaaaaaaaaaaaaaaaaaaaaaaaaaaaaaaaaaaaaaaaaaaaaaaaaaaaaaaaaaaaaaaaaaaaaaaaa

SEQ ID NO: 676 - DNA, 2867 bp, Homo sapiens
ggcacgagcctgttgacaactccaatgttgactgttctacatgaaacattttctcaacacacattcctcatgaatggtctcattcaaggtgtaaagggcctgctctcttttttgagtgccccactcattggtgccctgtctgatgtgtgggggaggaagccctttctcctcggcactgtattctttacctgcttcccaatcccactgatgaggatcagcccatggtggtattttgcgatgatttctgtgtctggagtcttctcggtcacgttttctgttatatttgcctatgtagctgatgtcactcaggagcacgagcgaagtacagcttatggatgggtctcagccacctttgcggctagtcttgtcagcagcccggccattggagcatatctttctgccagttacggagacagcctcgttgtgctggtggccacagtggtggctcttctggacatctgcttcatcttagtggctgttccagaatctctgcctgagaaaatgagaccggtttcctggggagctcagatttcttggaaacaagcagacccttttgcgtcgttgaagaaagttggaaaagattctactgtcttactaatctgcatcaccgtgtttctttcataccttcctgaagctggacagtattcaagtttttttctctatctcaggcaggtcataggttttggatctgttaaaattgcagcattcatagctatggtaggaattctgtctattgtggctcagacggcctttcttagcatcttgatgagatcattaggaaataagaatactgtcctccttggcttgggcttccagatgctccagttagcctggtacggttttggatcacaggcctggatgatgtgggcagcagggaccgtggctgccatgtccagcatcacgtttccggcaatcagtgccctcgtctctcggaatgcagagtcagatcagcaaggagttgcccaggggatcataactggaataagaggactatgcaatggcctggggccagcactgtatggcttcatattctacatgttccatgtggaactgactgagttgggcccgaaattgaattctaacaacgttcccctgcagggagctgtcatcccaggcccgccgtttttatttggggcatgtatagtccttatgtcttttctggttgccttattcattcctgaatacagtaaagccagtggagttcaaaaacacagtaacagcagcagcggcagcctgaccaacaccccagaacggggcagtgatgaggacattgagccactactgcaagacagcagcatctgggagctctcttcatttgaggagcctgggaatcagtgcactgagctgtaaactcggcagaaagtgggattctgcatacgccatctctgagagccatggagggagccacacccctggtgacttcatggtgctggatgggagacgctagcggcatccttcagggccaagtttgataaataccaccgccatcattctgctcatcctcctcctgtttttttttttctcttacattctttttttttttcctgtttatacattagaacaagataagatttgaaatacttccttgcaaataatgtgcaactcccaaggtgaaactcaaatagaaaaagtcatctctctggtagaaaggatggctttcctgtaatgactatagagtaagagtggcagcaatctttccatgcccttttcagcagaaggcacagaacagtagcgggactgccatctctggcaagatttcaggtaaagaatctcttcttaatttctaccttcctgtttctctgaatcagcccataggtgttgatgagtggccactcttaaagagtcactcagtatcagggatctactgtctttgttcaaaggtcaaataaaaacctagtctccttttattctactttctattcttagctagaatgaaactcagcatatatacacttctggacataataatattgaatagtaattacctttactagatgaaagaaattttcattacaaacttaaatcatgtaaaactcaacaactcagattcctggacctggtgtcctggttgggtccaaggtgattttacagaagaaaaaaacaactcaagcattctggtggcaacatagagattgtaggctgcttctaagaaagttattaacaatttggaaattcctaagtaggatgagagttagtaactggatacgagtgaagtttatatccaagttcagactcaaaggcattattatgatttgcttcttcccatgtcttccatgtcctgcttctcaaagtttttctcatccatcacactcctgccttaactgctctgagtatgcatttgttttcaattcatctttatttcaatctgtttaacttttgaatcgcatgggaatacgcacattaagttcctttctaaaataaggttttatgaagctgagtttcacgataagtgtcttgctattttttgagatgttttatggacaaagaaaactttacagatttatatgtattttgctgcaccagtaaatggaccattaactagggcccacctttaacagagcacccctttgaaagttttataggtatgaaatatatgtagatatttgtaaagggttttaattttttttttttgatggggtgctgtgtaaatcttgtatttataaatgtaatgaaggtattgacagaaaaaaatatatacaacttttataaaggattgtgtactgactgaatacatttaaaagaaaatatattttgaaacctgttctgctatgaacagagataacatatctttttactatgctattggtttttaggttaagcttcctaatgcataataaatttacagtggttaaaaaaaaaaaaaaaaa

SEQ ID NO: 677 - DNA, 1875 bp, Homo sapiens
  SITE (334): n equals a,t,g, or c
  SITE (966): n equals a,t,g, or c
  SITE (1304): n equals a,t,g, or c
  SITE (1319): n equals a,t,g, or c
  SITE (1329): n equals a,t,g, or c
aattcggcacagtcagacgtggtagaaagacagtaagagaggaacaactagaagtggagcccgaagatgtgactgaactgctgcaatctcatgataagacttgaatggatgaagagttacttaagtggtttcatgagatggaatctactgctggtgaagttgctgtgaatattgttgaaatgacagcaaaggatttagratattacataaacttggttgggcagagtttgagaggattgactccaattttgaaagaagttctgctgcgggtaaaatgctgtcacacagcatcacatgctacagagaaatctttcatgaagagtcaatcaatgangacammcttcattgttgtcttatttcaataaattggcacagccactctagccttcagcaaccactgatcactcagttcagcagccatcaacatcaagacaagaccctctaccagcaaaatgattacaacttgctgaagggctcaggtgatcattagcgttttttagcaataaagtatttttagatataatgctattacatgcataatagactagagtacagtatagtgtaaacctaccttttatgtacactggggaaccaaaaaattgtgtaacttgctttattgtgatacttgctttattgtggtagtctggaacagatcctgcagtatccccaaggtatgcctgtatctcagtatagtcgtgatcataggtcttgcttttctttagattcactgttggtgttatcatccatgaatttcaccttcctgtgtacaaacatctcttattacagtaggagaatatgggagtcagaaaaggaagacatttattgtcattatgaactcagaaaatatgtttwctastgacattgaaacaactgagattgatattttccagccacggcagttttggtgattgaaagcaagatctgttttttaaaaattaaatataagtttgcacattcttccagggnaagggcacgggataatttcccttgccattttattttgaaaccagctttgttgtggtggcacgctccatgagatttgctccatgagatttgctccatgttgcaccacacacagtctttgctcctgtgtccttccatagaaaaaaacagtgtggggaargatttggtttgtcttaccctttaatcttctgctcctacagctctctggtctgatagttcactattttggtaataaagtcagatatagttcaaatcctgtctggtctattatttcgtgaaatttttgaacttttccatgctttggcatcctccaagaactttttcctttcwaagtttactgntttaataaatggacncctatgtgancacttttagactggagtctaaaagcscctaataggcttgctatttttagagaaggagaaagttgccttttgttctctctgtgcttttcacctcccacatgttctttagagttttttttcctgttctggtcttagtagtgacagctttctaatyccagaggctttttcctgggtctgtttctggctcattttgtctcatactcaaaatttttaatgtcagaattgggctgggctcttctctttctattatctgtaaacattttgggtttcttttcctctaatttatgaaaattatgaaatgtacacataaaggagtggaaaatatattcacccagtttaaagaagagtaataaaatggacattcgtatatacccaccatccaggttgagaaatagaacattgcttgtgtctcagaagctctctgtgttcctctcagtcacgttcccccaccccaactcctacccaaggtaacctctcatcctgaagcttacatggaagatttgggcatttttattaaaaaaaaaaaaaaaaaaaaaaaaactcgtag

SEQ ID NO: 678 - DNA, 1651 bp, Homo sapiens
gctcgtgccgtacagttaaaatgtataaaagaacctagtgccaattttcttaggtcttgcgaaattaggttacttattgttttggttattaatgaacaattgccaatgtgaatgaaatcttttgttaaattataagggaaagtttcacatgcagcaaaataatacagaaaatgtttttataaatttttataaaacttgaatctttaatgtttgtttttaccatttactgtattgttggtctttttacatttggccatagttctatgaaatgtaaactttttcaggaaagccatgaaaaataatttagatagttatttcttaaacatgtgacttgtgatagttttgatattaaagacctttatcactccacagaacatttttatttaaactttaatacagttgaccagaattgcaatctaattaaatatatcaatttgttgactggctgaaatttaagatcctttcaatgataatcatatcaaaattacttcttttggttcaattatatttaccattacataaaactacaaaacatttggttaatctttccgtgggtatacagtgaaataggtagccagaccaacacctctttattttttattgggttgtttgatgagctgttctacttctaaaagatttaatcttgtttcattctaggtaataatgtttccataaatatagaggtagaccccaggcatcctactatgcttcctgagtgcttctttcttggagctgaccatgtggtaaaacccctgggaattaagctgagcaggaacatacatttgtgggatccagaaaatagtgtgttacaaaatttgaaagatgttttagaaattgattttccagctcgtgctatcctggaaaaatctgattttactatggattgtggaatttgttatgcttatcaacttgacggtaccattcctgatcaagtgtgtgataattcccagtgtggacaacctttccatcaaatatgcttatatgagtggctgagaggactactaactagtagacagagttttaacatcatatttggtgaatgtccatattgtagtaagccaattaccttaaaaatgtctggaaggaaacactgaaataagaatacaacatttcggtgaagagctggaaacttaaaaaattatcaaaaggaattttggtatcatcttcagagaaaaaataaagcaagaaatactaacatcaaaaggacaggtatgatgatgcgataataataaacatctgcgtttgtctcttcactaagagtaaactgggaaattgtaggccaaagtccagttgaactttctaagtctgtgatccccgtgctgactgtggaagtgtatttataccaagatggagatcttgacttcttgaatatatctggactggtaaaatcttgatgaggctcataaaatgagtttgggaattgtgtatagctgattttttgtgggaaactgtttacttcattcaaaggttcttgagactcttgatatttctgtcttctccttgtgctttcctatggaaaaaatacatatatagtttagtttgttagacgtgagttatccaagtatttattttgtgtagtgtgtaagaatgctaaataaaatgttatacaagatcaaaaaaaaaaaaaaaaaaaaaaaaaaaaaaactcgag

SEQ ID NO: 679 - DNA, 2292 bp, Homo sapiens
gagccctccctcatgggttgtatttccctaccttcccatacacttctctccctaaggtcttatctaaccatcattctcttcaagttgccatttccattccctacttcccagctatgcacctttctgttccatttggttgacttttatttttttcttctttccagcacatggctttcagttttcctgcctctgctggagttgtcagggttggagccaggagggctttactttttccttttcttctaccaggttagcccggttggtttatgacatctcctcattttcaactctcctcatctcttttcatgtggctttgttggggttggatggctgaggttggctggactgatggttacaaaagaatatgtgagagtattgagggagtgactaaatccctcagggataagagagggaacaggaccttccagaaggttgtgctcttattgtctcagactttgtatatacatgtttatttctgtaaattgctttctccatttggacaaactacaataaccagagtaaaaagctaccaggaatgagttctgttcaaaattacagagatggacattggagtctcagtgagtttgcttgagagttctcggaataatatgaaaatagctttaaaagggacaacaggagagtatgcagagtggagctgcttcttttttttttgatgccgaaattggtttagatagaatgaaactgtctctcttaagattcgaaaaataaaagccaaaacaacccactcattctcaaatcccggttgagctaaagctacaaatcatattcatttgtaggatacggttgagagatgactctcgagtaatgaaggctcataagcctgggctgtagttagcgtaagaggtaaacaggggccttcttgttttcactcttttggaagctctaattcatttctaattactatctcctggaaaaacaccgtgttgtcattgccttttaaatttctttctcttttcagagaaaacacatattttaggtcattaagaaaaaccttgtcttaatttggatgatgtttttattctacaaaatagaattattatcttgttcgaggcacaatttggtaagaagaagaggctgcatgcattttaatttggcaatgaattaacaataataaagaggatatgacttttccactgttacacagttcaagatctacatgcttatgtaggtcagagaagaagcatccttgctatttgaatttttacagggaattggtcaggaggaaaaaataatggcatgtgaaatatcaaaacctttccttaattttcaactcaataacgtgttttgcaattttaaaagtccatgaagaagaagaaaaagaaaaagaaggctttacaattagtaggtgtgaaaaagaaaaaccaatattgttttgtatagacaaggaagcagaatgtggcaaaaattagcttttgttgtttttcatattatgaaatattccccaacacatatgaaagtgtaagtaggcaaaaatttttttctcactcataagctgaggttatcttggttatttttttgaacaacttagtctgttcttatggtaatttggggaaacgtatgaattgatgggataaacttttccttgagattgtgaatgaaaatgggctcaatggagtgccatggtcttcctcagtgcatagcagattctgaagacatcacatacacaaattgtccaccacttctagttccaagagaaggtgtgggaaaaaggggtgaagggaccagcattgcctggcaagatggttgggggagtaatcagctggggagaccaccttagtctggatacagacgagagaggggaccagagaggtctcagactttgccatggttacttccaaagtatgctagagtgctccaagtgtgaactgtaatgtagagagtcaggaagaaggtaggtcttaaatcttgttaaaaaatggatacattcttaaatgcttcagcttgtagagaagagagaagaaattttgattattccttatgcctctattaaaatacctgggaaaaccatttactcaattgatttttaccagctgcatttttgtatgacataggtaaactatatttgttttaacaagtaaagaccaaaaatgctgatcgcaaaaagaaaaatacattattcacaattctacctctaatagacgggtactgttgtgtgtactcgtatacacacgtataatataaaatattatatttgtgtgtgtgtgtgtatgtgcgtgtgtgtgtgcgtgtgtgtattctttcatttggcaaaccaaaaaaaaaaaaaaaaaa

SEQ ID NO: 680 - DNA, 3560 bp, Homo sapiens
  SITE (380): n equals a,t,g, or c
  SITE (991): n equals a,t,g, or c
  SITE (3560): n equals a,t,g, or c
gcccacgcgtccgctgaggcggccaccgcgactccggctctgcgctcggctgcctgacttcttcctgctgctgcttttcaggggctgcctgataggggctgtaaatctcaaatccagcaatcgaaccccagtggtacaggaatttgaaagtgtggaactgtcttgcatcattacggattcgcagacaagtgaccccaggatcgagtggaagaaaattcaagatgaacaaaccacatatgtgttttttgacaacaaaattcagggagacttggcgggtcgtgcagaaatactggggaagacatccctgaagatctggaatgtgacacggagagactcagccctttatcgctgtgaggtcgttgctcgaaatgaccgcaagnaaattgatgagattgtgatcgagttaactgtgcaagtgaagccagtgacccctgtctgtagagtgccgaaggstgtaccagtaggcaagatggcaacactgcactgccaggagagtgagggccacccccggcctcactacagctggtatcgcaatgatgtaccactgcccacggattccagagccaatcccagatttcgcaattcttctttccacttaaactctgaaacaggcactttggtgttcactgctgttcacaaggacgactctgggcagtactactgcattgcttccaatgacgcaggctcagccaggtgtgaggagcaggagatggaagtctatgacctgaacattggcggaattattgggggggttctggttgtccttgctgtactggccctgatcacgttgggcatctgctgtgcatacagacgtggctacttcatcaacaataaacaggatggagaaagttacaagaacccagggaaaccagatggagttaactacatccgcactgacgaggagggcgacttcagacacaagtcatcgtttgtgatctgagacccgcggtgtggctgagagcgcacagagcgcacgtgcacatacctctgntagaaactcctgtcaaggcagcgagagctgatgcactcggacagagctagacactcattcagaagcttttcgttttggccaaagttgaccactactcttcttactctaacaagccacatgaatagaagaattttcctcaagatggacccggtaaatataaccacaaggaagcgaaactgggtgcgttcactgagttgggttcctaatctgtttctggcctgattcccgcatgagtattagggtgatcttaaagagtttgctcacgtaaacgcccgtgctgggccctgtgaagccagcatgttcaccactggtcgttcagcagccacgacagcaccatgtgagatggcgaggtggctggacagcaccagcagcgcatcccggcgggaacccaggaaaaggcttcttacacagcagccttacttcatcggcccacagacaccaccgcagtttcttcttaaaggctctgctgatcggtgttgcagtgtccattgtggagaagctttttggatcagcattttgtaaaaacaaccaaaatcaggaaggtaaattggttgctggaagagggatcttgcctgaggaaccctgcttgtccaacagggtgtcaggatttaaggaaaaccttcgtcttaggctaagtctgaaatggtactgaaatatgcttttctatgggtcttgtttattttataaaattttacatctaaatttttgctaaggatgtattttgattattgaaaagaaaatttctatttaaactgtaaatatattgtcatacaatgttaaataacctatttttttaaaaaagttcaacttaaggtagaagttccaagctactagtgttaaattggaaaatatcaataattaagagtattttacccaaggaatcctctcatggaagtttactgtgatgttccttttctcacacaagttttagcctttttcacaagggractcatactgtctacacatcagaccatagttgcttaggaaacctttaaaaattccagttaagcaatgttgaaatcagtttgcatctcttcaaaagaaacctctcaggttagctttgaactgcctcttcctgagatgactaggacagtckgtacccagaggccacccagaagccctcagatgtacatacacagatgccagtcagctcctggggttgcgccaggcgsccccgctctagctcactgttgcctcgctgtctgccaggaggccctgccatccttgggccctggcagtggctgtgtcccagtgagctttactcacgtggcccttgcttcatccagcacagctctcaggtgggcactgcagggacactggtgtcttccatgtagcgtcccagctttgggctcctgtaacagacctctttttggttatggatggctcacaaaatagggcccccaatgctatttttttttttaagtttgtttaattatttgttaagattgtctaaggccaaaggcaattgcgaaatcaagtctgtcaagtacaataacatttttaaaagaaaatggatcccactgttcctctttgccacagagaaagcacccagacgccacaggctctgtcgcatttcaaaacaaaccatgatggagtggcggccagtccagccttttaaagaacgtcaggtggagcagccaggtgaaaggcctggcggggaggaaagtgaaacgcctgaatcaaaagcagttttctaattttgactttaaatttttcatccgccggagacactgctcccatttgtggggggacattagcaacatcactcagaagcctgtgttcttcaagagcaggtgttctcagcctcacatgccctgccgtgctggactcaggactgaagtgctgtaaagcaaggagctgctgagaaggagcactccactgtgtgcctggagaatggctctcactactcaccttgtctttcagcttccagtgtcttgggttttttatactttgacagcttttttttaattgcatacatgagactgtgttgactttttttagttatgtgaaacactttgccgcagccgcctggcagaggcaggaaatgctccagcagtggctcagtgctccctggtgtctgctgcatggcatcctggatgcttagcatgcaagttccctccatcattgccaccttggtagagagggatggctccccaccctcagcgttggggattcacgctccagcctccttcttggttgtcatagtgatagggtagccttattgccccctcttcttataccctaaaaccttctacactagtgccatgggaaccaggtctgaaaaagtagagagaagtgaaagtagagtctgggaagtagctgcctataactgagactagacggaaaaggaatactcgtgtattttaagatatgaatgtgactcaagactcgaggccgatacgaggctgtgattctgcctttggatggatgttgctgtacacagatgctacagacttgtactaacacaccgtaatttggcatttgtttaacctcatttataaaagcttcaaaaaaacccaaaaaaaaaaaaaaaaaaaaaaaaaaaaaaaaaaaaaaaaaaaaaaaaaan

SEQ ID NO: 681 - DNA, 1902 bp, Homo sapiens
aattcggcagagcgaatttatattatttttaaaaataaatttcactagtgcatggttttaaaaaggagagagaatgcaacagggtgatacaaagatacaccatgtttattctttaatcatagtctgtgttttggcagacattacaaatggaaatactttctagaagatacttaaaattctctttatgtgacaaataagtataatatattcaatttatttccatgttaaatatacaaatcttatgaagttcaatatgtgcaaatttttcacatctttctccttctctcactttacctcttctccctcttttaaacttttctttctccctgccagagtgaaccttatactaaaaaattacaagttttgatctgatcctctctcataccccatgtttgattcagagctgtagatgcctctgaatttgcgaatttctcaagggaaaattaactttaagagctttctttatttcaagcatgttgaaaaggattttgcaacatgacttgggagtacattaaagtaagtcagcatgtatttgacgaagaagatatttgaacttttgcagtttattgtacagtgcatggtaattttttcacctttaaaattcagtttacaggaaaattctaaaatcatgttgccattgtgatgtccaataaatttgtttttagcaccagcattattcatacaggggttaaagtattatttgtagaaggtcttaggttttgtttgttttttaatcatttaaagcaatttctttagccagtttccatttactatgtgaatagaagcactgctaaaaattgggaaccctgaaacacagggctgtttattaattcatttttctgtagtaaaattcaatttttcacaaattatatttctaaagaaatatagtaaacataaatttgcaacaattttaaagctccagtttttaggtgactcaaagaaagtcattatgcctattaatagttatttgatgccatcaccaaaagtctatgtgaaaatctcctaaagtcaaaacccctgcctttggttttacagacggttattaccattgggtggagctgcaaggtcaaatttctcctaagttcccctatttagaggaaaagtcactggttattgtaataaaccacccatggttctttatgtacattttgataacacattattatagcttgattttaattttttgcattaatttttgaaatccacatacatctcatttgtttaaattaaggccatgcacaaatattttttttagttcagtgctgaccattaaaaactatcatgcttgatacggtgcaaaagttaaaatgagtatcactaaaaatgccttctttttatgtggtgcaatatgaaatacaccaagactgtgtcttgacattctgatggacccaggtaaagttgttaaaagaacgaataaaactttattaaaataatttagacacctgtgtaccagcaacaattgatttaatagacctatagtgtctatactatcccttagaataaaggtttatgattttcctgatactaagatgcagtcacataatcttttgtgcatattcctatacaaattatttctaattttaataagaaggacgtgactacggaatatttgtacatacttgtcattatgcagtatttatttaaaagttggtgtttttttttttaattttcacatctgcacctcgacttgtggtttagtcatgtaactagcactatgccagtgaccgttgttgccctgtacatagtatgtttgaaaagtaaagggaattccagttgggraaaaagggcagattagtcctgtaatgaacaccaactaatgtaaatcaaattcattctggtgatggtatttaacactttaaataaaacattttctttaaaaaaaaaaaaaaaaaaaaactcgag

SEQ ID NO: 682 - DNA, 1538 bp, Homo sapiens
gctcttttgcttattgaaagcaatttgattacacctatgtttcaggttatagtggggagaaaatttggtcagtgccttattakttgaagagcaattttagggcatcaagtatgacaataatcatgtgccctcttgctcctcttatttcaggagtgtgtgctatccctctctccaccagcttaatctttctcaccccaagtctaacaaagtctttacagaaacctctgtaggtgattgttgcagtcttccttggtttttgagtctttttaaacaagctcctaccctgcttctatccttttagagtaggagattaaaaataaacccaccccagtcaacctttagataagcactcttaaaaacaatttgaagagcactcttcagccaagttcmyttttattttgttgttgatgttttgagcatacatttaattgtaaggccttttggaaaagccctaaaagaataagatacaaccagaaatatttgagttttgttaaatgtactgaaatcttgtaatgaaaatccctttggccagaaatgagatttatttccatttatttttacatttaagtaacactcaaaacaaacaagtagtcacttaacctgccagttattattttcttgaaaatatacaagaaagtaaaaatatctctaatatataagttaaaggaaagttaagagactaagctagttttttcagtgaaagcaaagttggaaatattttgcttctctcagattattggaagacctagagctactggatgttaacctgaatcaagatgttcttttcacatttttttaaagggctagtatgttccagagtaggcaagtagtcattcaagccaaatgaaagagttaactggtccttgaggagtgttagcaaaatttaaattttgaccctggccatttgtactacagaagtgattatgggattaaaagaatacataattacagtgttttgggattgggctcttttttttcttaatagaaaagcagaaacttcataaataatagctgtgctttagataccagataacaaatattgtttcccctgaagatatgacctactagaactactcacatatatagtccaataattactgacttaataggtatggtaaaatagctgataataagtcagactctcaagagtttctgtaccttgattattgacaaattcattgttttacatcctactaaagaacatgtgtgtggggagggggtggggaactggttcacaacataatctgaaggagatcaaacatctgtaaggacaggtacccagtgatgataayatatctgaaaacacaagccatttttattctttatcccaattaacttgaggtactctaatgatgaagcactcgattgcactatgacctccttgagtgatgtgcagcttggttcctctctcactttttgtttctttttaatatgcaaatgtgagtgtgcgatcttcagtgtgtctgcataagctaacttaagatgaatttaagtacagttttctgaaatatttctattgaaataaattacttaaaatt

SEQ ID NO: 683 - DNA, 2148 bp, Homo sapiens
  SITE (378): n equals a,t,g, or c
  SITE (381): n equals a,t,g, or c
  SITE (408): n equals a,t,g, or c
ggcacgagtgcacattcatgtgcaagttttgtgtgaacctgtgttttcatttcccttgagtatgtttctaggggtggaattactgactcatatggtaactctgtttaactttttgaggaactgctggactgttttccaaattaacattctcattagtagtgtatgaggagtctaatttgtccaaatcctcaccaacgcttgctgttctctgttcttttgattataaccatcctaatgggtatgaattgattctcattgtggctttggattgcatttccctgatggctaaaggtgtggagtatcttttcatgtgcttattggccatttgtatatcttctttggagacatgtctatgcaggtcctttgcccattttaaanttntattatttatctttttataattgaggngtaagatttctttgtatacagtagtcctcccttatccagaagggaaatgttccaagaccccagtggaagcctgaaaccctggatagtactgaaccctatatatattgtgctttttctcatacatacttacttatgataaagtttataaaccaaaccctgtatatactgttttgtctcatacatacttacctatgatcaagtttataaattaggcataataagagattaacaacaataactaataataataaaggagaacaattataacaatacatcagcattactactcttgcactttgggggcattataaagtaaaataagggttacttgaacatagcactgagatatcacaacagttgatctgataatcagtatggctactgagggcaggtggtgtatacagcatggatgttctggacaaagggatgatttatgattaaggcaggatggaacaggacagtgggagatttcatcatgctattcagaaaagcgcataatttatgaattgtttatttttagacttttttgtgtcatatgtttggattgatacatgatttgcaaatattttctctcaatttgtgggttgtctttttactttcttggtggtgtcttttgaagaacaaaactttttcattttgatgtagtccaatttattattttgtattgttgttgcttgtactttttgtgccatatccaagaaaccattgctttctccaatatcaagaagatatatacctttgtttttttcttagaattttagagctttagctttaatccattttgagttaatttttatatatgatgtgaaatagggaaaaatactattaatttttgtttattgatcatatcctgtaatctagctaacttcacttagtagatctatttaatagtaattttgggtaaattttttttaagtagacagtcatgtcactgcaagtgactgctgtttaatgttttcattgataatctgtgtgtcttctatttttcttgccatgttgcattggctaggacctctactacaatgaatgggagagtagtgagaggatactcttgtcctgttcctgagcttagggggaaagtattcagtctttcatcaagtctgatgtaaggtatagggtgttttgggaaaaatatatttaccttctctttccctctctgtttcctttcccctacactgccccttggcatttctggagcttttatttctttatgtaggtccaagtttcagtctggtattatattcccatcgactgaagaatttactgtaagttcttaaagtgcctgtctaatattggttgattctcttagcttttatttctctgagaaagtatttcacctttgttttcgaaagataattttcaaaggatatagaattctgggtttataatttttttttctagtagtactttacaaatatcattccattggccaggcatggtggctcacacctgtaatcccaacactctgggaggccgaggtggatggatcacctggggtcaggagtttgagactagcctggccaacaaggcaaaacctcatctctactaaaaatacaaaaattagccaggcgtggtggtacacacctgtaatcccagctacttgggaggctgaggcaggagaacagcttaaacctgggaggtggaggttgcagtgagctgagatagtgccactgcactccagcctcggcaacagaataagactctgtctccaaaaaaaaaaaaaaaaaaaaaaaaaaaaaa

SEQ ID NO: 684 - DNA, 2608 bp, Homo sapiens
  SITE (2598): n equals a,t,g, or c
  SITE (2608): n equals a,t,g, or c
gaaattcggcacgagatttactgtaaaagtattcccagtatgtgtgcagcatgaagaaagtattagtgcttctcagtgttctcagtgtaaattctatttatatacagcatattcacatactactttccttatattttatatagttctatgactgttgaaacatcaaggagttaaaaaaatcttaatatttcatgattaactctaagtactattaattaatagcttgcgaaatattagcaattttcccattatggactattctctctaaagcaagagagactagcattcccagacatcattctagggtctttaagctcattttgggtckgctaaagtttggggggaaatgttacgcaaagtgatactgtgtatgttgccattttgctttattcttctgttgaagcaaaattgtggggtttkattatgtgtgtgtgctttwcctagatgtcccagttagctgtgctgagatatacctgtactatttatggtttaagttttgatycttaggtattttctccagctctgacattgttttccaaagacacactaaactgcattgcacagttcaaaatttgattacttaagggatcaatctaggtggtgttcttggtcttaaatttaacagcaaacacagcacatatctattatcactatattaattttcaaaggtttttctktgacgtttaaaactgtgacaacagatattcacatttgattatagaaacttaatgtctattaataattttagtacaaaatttcataaaccgtgtttttcaaaataagtttatgtcaaatccagcttcccagaaacactaataattaagtacatcaatgtactaaataaatcattcagttgcacccatggggaagattgtgttactgcccttcacagtgaaaaaaagaaaaatctttcatttttaaaattaggagatgttacgtaacttggcactttagtagtgtatacactagcattagtttatacaccacttttgccgctggggaattcaagttgaaatgtccctcaatcatataggtctggaatacatctttcattcataatttctgctcagataattgaatagtttgccatcgagattattttcatttatactataaaacaaaagcaaactagtccagtttaattttttgtacttagaatattgcacattttctatatatgagttattcagattagtatctatgtaggttcagtcagatccaaccatggattcgaggtattatactgtataaccctacaaaatacatagaagtattatttgccttcataatagaacccaagagtctgtttcaatttatgaattcagtatttgcaccgagattttgattcccaaagtttggaaaaaaatgacaaaacaacgagggaagaaggaaccagaccttagtgccacatatttttctcttggggttgtaaggtagtctcctgctttccagaacactttattatatttcacttatagacctgattttctgtgtcaaagtataattctcatgctgaagctgtagcctaaaaagccaaaagaaagttgtcttcattgtacaaacatattcatcactttaacaataagggaacaaaatttagtattcaagctgagtgagaatactgtttcaatgagcatgtccctaagataaaccagaattggcagttaatttaggcgtctagaaaatctcagttcccaccagtaaaattatcctgagtagctaatgcaccttgagaaaaatctggcatactgaataaataacattaacttgggagccaagagctgggtaagccttacctttagactactctgtgactacagaaataaagccagcacttttggaactaataagccttcacttgtcagtatcataaagagtattgcccaactgaactttgctcccactggtttaatagttacttatttctgcctaagcactcaccttccgattttacccaagtatatatataggatagaaaaaaatgcattatatttgagagctacttcgcccaaattacaaaatgagtgtttttagattcaagtgacagtaaaaggatttgttcccttcagtgacttgagtgttttagttatgcataagtatttctagcaaaggaagggtagaaaggaattgaaaattaatttacactagttgctacttgggaataaagggctttttgaggggggtatggatattaaatgttttcgttatatacttatccctattaaaacaggcagttgtttctttgaatatgcctaaataacagtattcttaaaatctgacagacaagtaacatgtcaattacttgatattccttgtctccagtaccacaggccactcttgacatcccatgtttgcctggataaagttcctcatttcaaacagtatacatacttctttgcagttcattatagtaaggcttaacctgtaaacagtatctgatggcccacctataaataaaattcagcattctatttttaataatttgtatgccaccaatttgtattatttgtctcaataaatacttagtcatcaaaaaaaaaaaaaaaaaaaaaaaaaaaaaaaaaaaaaaaaaaaaaaaaaaaaaaaaaaaaaaaaaanaaaaaaaaan

SEQ ID NO: 685 - DNA, 1642 bp, Homo sapiens
agtgattcctccacttttttttcctgaacagtcaaggtgaggcaattgattgagtatatttcccttcttatttcagtaatactctattttttttcatgaaaatgtcaacatggttcttctgaatctatcacagtgaaaagttctaacttgtttttgagaagtcagtacagcaggggaaaacatatgtgatgcaattaacatctgcataatttcacttaaaattattatgcaaaaatgaatgttttttcaaaaaatgtgaaatgtatttattttctttatttgtattcttgtttcattttttaatatgttgtgaacatgctacagatttgatagtacttttgactaaatgttgggagtggtcgtattaacttcttgcccaaagaagtaagcatattggtgttttctcaattagtcactgagaaaattaacactttaggcagtggctatttaaagtaggaattgcatcttaaaaacctttcctaagagatttggtatgtgaggatactttcagtaccactcctaccattcatttttctaaattccttagtacatatacttggatcatgtyaaattaacaagaaagatgaataactgcgctgaattgcctttacctataaataatttaatattttaccttcgggttttatcaactgtcaatataaaaggcagtactccacagaatgatgttgaaaaacttcttcgaagaacaccttctattaaacttgttatctcttgtaaattattgtgtgtgtccttttgataatattcacaggtgtttcaaaggtaaggaataggttgtctcttggattaagtcatatgcctccagccattatatgagaactgtgaaaccaatatggttttctttatgtmwwggctgcttgaaaattaaaaaaaaaaaaggtttgttcaatattgccgttacatttattagcctgtaatttctaaattggagattctctacatttcacttgcagtttcctgttctcctcattgcctgccttccattcatattacacttatttttctattttttgtattacctttttaaaaatatataccagttcaagtccttttaggaagaagaaaatacctaatttatgtaaaatttaaataattacttttttataatatgattcacttatgccacagattcaacattagaatatgttttatctctackgtcagttttattaccttatatacaaatcttcattttcatacatagtacaatgtaatatataactttgttaacacttttgttagctctttgaccwtaaaataatgacaataagctgtttctatgtatttgtttatctacaaattacaggtttatccatttgcaaatattttcaaatggaaatcactgtttatattgattataaacataagacatgctcattgtaaaaaatgtacacaaggcagaaggaagtaaaatttccacagttcagaaataccacaattaatattttcaatgtgtaaatatcttttcataatttttcctacgtatacacaaacattttgaccaaaaatccacactatatgtactgttctgtatttttaattttaaactgaacaataatcatcttttcctgacaataaatatcaatctctatcatcaaaaaaaaaaaaaaaaaactcgaag

SEQ ID NO: 686 - DNA, 1783 bp, Homo sapiens
ggcacgagatttcagcctggagtcagtcaaaaaatcttagaggtctgtaaaggagatgactatgctgttagggctgtggtagaaacctttaataacaagtgaaaagagcttgtatttgccaaaatgaacacaggatatgattctttttttgcttttgctttggagttgtatcagctctgtgcggtcacatgggtatctacaaatcaaagcacccatcaaccagatgcatctctgagagttaacagcagaaggtggcataataaaagaagttctcggtagtgaaaaaggttggaaaccaccagctaaaccaatcctcttgtaccaataggagattcaagttgagaggtgggaaagggcctatctcagagtaggtgcttgaatacttcttactagaatgaaagaaggaacttaagatcacacagccatgttactgcaggacggggaatggaacctaggtcttcttatttttggttcagtgttaactcccattctctaagcagactgggcctgttattcaaactgccttcccataggtgcttccctgcttctctcctcacccagagaaggacttacaaacagcttatcttcagaggttttgtgcctgatagttatggaatgtgctggtttgagcagggaggatgtaaggggaggaatgctaaaagcctgtctacttagagtcaggtttcctgggtaagtccctggaaccccatccccttcccctttcttgagaccccaggacttgctccagtaactgccaccctgtgcctttgcttcacggccatgctggataaggagctggctgcctctgtgaacatcctactcaaggcatcttcactgctgtacatccttttgaaatcccagagatcttcagtctccctgtggattaaggagatgtgcagtatttaaagtggcttcaggaaggcatggaagaggactgagtggggaaagctttttgtgcatgctgctggctacctccagcggctgcctccagcctccatcagctgcactctggggaagaggagctgccttctacctcccagcatctctggatttcatgttcctgtcagcacagaggagctaaatggcctgtagaggctgaaggtctgaggctcctaaagctggaagaaaaggctgggccagtcaggccaagcaagaacacagtgtaacttgtctctgagtgcttcatggttaagggggctaagcaggcacaagggcatgaggatggttatatgtacagactgaggggaagaagcagtgaagatgagacttgccatcttcttgagtcagtaggcctgcctcaggtgcctaggatgtaattgctctgctgcttctcatggggactcacgggaagttaaacagcctcgtcggcgtcctcgaggctccaaaaccaggctctaggcggggacgactgcagccgttatggaggccaccgcggctacggccgcggctgaggcctccccaggtggagcggtggcctggaggggaatcttgatcctgggccagccacctgtcaagaggaggcggagcgtcatgcctctggaagactggatgaatattctccaggagcctgacgaaggcgtgagtaatagggacgtgcgccgccttgttggtgttgatcagtccaccaaggagaagcagctggtcgcagtggccgtacctgtaatcccagcgctttgggaggccgcggcgggaggatcgcttgagcccgggagttcgagaccagcctgggcaacatagtgagaaacccgtctctaccaaaaagaaaaaaaaaaaaaaaaaaaaa

SEQ ID NO: 687 - DNA, 1799 bp, Homo sapiens
ggcacgaggattacacgtctgagccaccatgcccagcccagaaaaaaatttctatcatcttttgctaccatttttgctggcactactaaaagcattaaaatgtgacagcagttccattgcctccacatctatgtacaatttctaataccatttttgctctggtgctgatggtttcctgatatcaggtagggtggagtacagggatgcttctaccaggagtgtgattatacagccactgcctttatttctggctttgcctttgtgatatggtctatcagatgattgataaaatctatctagagtaaggatataagacaaaataaagatactgtaattaaggggaaagggaggctagaggacatggctcagtatccccaagtcttttatttaggatatgggttcagctacttctgacttgacttaaacagtgacaaaataacaatggcttaaacaagatagtttatttctcttcatgtaaaaatttgaatgacaatttagtgaaggtgacaagggcccacgcttctgctaaggtccaggcattcctagagtggtatatgatagatcatatggtataagctagatcacttccatagccacagagtatccagttattaatacaaacaaatgagaagaggaaggggagagcaagtctttctttgtttttagagcacaatccagaagttgaattcctatcttagtcacattaaattggctagagtatcgttacgtagtcagacctagagttgcaaaggagactgaaaaaatgcagtttaatctgaacagccatgtgtccaggtaaaaattctgttattagggaagaaagagagaatgaatattgggaaacactttcaagactcccacaccaaagtactacctaaatattttattcttcctatgtttgtgtgaggtattgaggttttayaaatgtgcacataattttgcaattgtatttttatttatattacacagtaagaaaaacagaatgttctatatttatagtcttcctgttacaaatatgcgattagagcttaaagagtcatagtatcagaattagaatgttaatattcccactcaatatactgaggtctcattttcattatggtgggtttactaactgccccatatacttcgcagggctgctttgaagctaaaatgagatcattcatatgggatcacattaagctgctagaaattagaaaatgtacatgagatagtataaattttacagtcactaatttaagtttcttttcattagacgctgttggaagctctgactgtggcagttgttgttactttctatgatgtatatattattctgcaagctttcatactgactactacagtattttttggtttgactgtgtatactctacaatctaagaaggatttcagcaaatttggagcagggctgtttgctcttttgtggatattgtgcctgtcaggattcttgaagttttttttttatagtgagataatggagttggtcttagccgctgcaggagcccttcttttctgtggattcatcatctatgacacacactcactgatgcataaactgtcacctgaagagtacgtattagctgccatcagcctctacttggatatcatcaatctattcctgcacctgttacggtttctggaagcagttaataaaaagtaattaaaagtatctcagctcaactgaagaacaacaaaaaaaatttaatgagaaaaaaggattaaagtaattggaagcagtatatagaaactgtttcattaagtaataaagtttgaaacaatggaaaaaaaaaaaaaaaaaa

SEQ ID NO: 688 - DNA, 3198 bp, Homo sapiens
caaaaaacaaaacaaaacaaaacactcacccatcaacgaatatagactcttctctcatttatcgatgatcctctttttccattttttaagtacttatgtggaagctagtctcccaaaacacaatctttagagagaaaagacatgaacgaactccaaaatatccatttaatcaatcatgtttttggctttggataaagaactttgaaccagtttttttctcaggagctgtcaaatggacacttaattatgacatgagaatgaagaaattattttggaaaaaaaaaatgacctaatttacctatcagtgaaagctttattttctggtgccttttgaaagtatatggagtcatatcattcttctgtttaaaatgttagtttggtttgactttccactttgtcctttctgctcttgtgaagaaaaaaaaaagcattttcgaggaaagaattatgcaatttcttttgttttctgtgtcattatttattgcttttcaatgtgcagccagtggatggttttagttctttcagatgaactgccatttgtgtttcagctcacagttctttgctgggtaaaagaaatactttctgacagtcacctgagccttaaatgtaagtattacatgacatgcattctgtttcttccagagttctgtctgccacacgaaagagaatatttgcttacttgatagaactttggcattttcatcattcttttacttaaccaggcttatggcatgatctctggaacaaatttgtaggaaaaaaattactccaattgaatgactgatgtatgtaatcaacttcattgggctgcagtaaactagtggaaattagagagttgttttattggtgttttctactgtgagttaattaaaaattgtttttatttggggtcattatgtcacagtcttgagttaacaagatcttacgtgattggccttttctttgttttctcttaggagttgtgtctcgtgaatgacagtactaaagctattaacaaccaagagtttgacagagaactataagcctgttgtatctcctaaaagttgcaactccccacccttggactttaaatgaaaattttattcagtccagctattcttacagtccctaaggattttcatatatctatgtataggagataaaatttgctcgtaagatttttaaaaactggctagtgaaaggaaagtcctctgaaagaaaccattttagcaaattatgggtatatgttttaatgtaatctacagaatgttttatagtaaaattctagcaccactagaataatcacatagcatgtacaatatatttatgctggctgaaaaggcagaatctgggaataataaaattgcaaccagtttggtaatgcaaacagcagaatagaatgaaatctcagtaatgaattaaagcaacaaaaagatattgattggcaaaaagcaagatataagagatgcatttgcttaacatctctacataatatttatggtctggtcagtattggtctggtcagtattgcctggctgccgtgaaatgtaaactagtaggcatgttattgatctgctaaaactaaccctctttttaagaggagatttaaggaagacgtcaatcaaaatgtcaaatatgtgtgtcagaatataaataatttttcacattgtattgttgctatataaaaaaaataatagaattggttgggtttctgaggtgaaatccagagtaagagtactagacagttcaacaagccacatctaatggcacagatagaggatgtagctattttatacctttcataacatttgagagtaagatatccttcaggatgtgaagtgattattaagtactcatacctgaaatctgttgtcaagattagaactggggttcatgttaaaaaccttccatattacctgagggtacctgtggggaacagttccttcccctgtgtggtagtattttgttggaagagaatgtttatacgaaaaatgaaattcttccaacagcagagaaactctaaaaagtttgatagtacctatcaaagtgctgtacttctgtgatagagaacatctgatgtaccaatttagatctatttctttatactttttctaaccaattgcttaatagtactttggatgattatcacctttgccacttaaaatatataaatatcctttttacttcatgaggaaggaggaattttttgataattactgagttcagccttttgtgatgacttatattttggacttacattttaactttaaagaatgtcagatcccttctttgtcttactagttaaatcctcacctaatctcttgggtatgaatataaatgtgtgtcatcgttatattgttcagctagatgagcaagtatcttagggtagtaggtagcctggtggttttagaagtgtttggtgatttttacggagagagttttcctaagtggtggtttataggtggtatcagatattattagggcagctttttggggagtaatctcaggtctcccagagcagcagcatttttctcattgatataagtaagattcttaggagcttttcttatcacacaagatgcctgaatcgaatgtgagaattgaaggcatttcttctgcataaacaaagaattctacctgctggacagaaacctggaaagttctttggaattcgctgaattacagtttagtatgtcctgattacagagtgacaatatttatcaagcctttgttatattggattatcttctctcttaaaatacaactgtattataattgaaatgacagcccaaaattggatggtttaccaaaaccaatgaaagggatttcacacatcaatttttatttctgttttgaagagcacatgctatataataattgctagtagcaactgcagtaaaacaggtgataagttattttctctgaaaagatccagtcctagagcaggattcttcgatcattcatggcagagtgaaaaaggtttgtatggttcttgtccaaataactcagttcttaaaattcttaaaatgatcgtaaaccattatcctttaaaggtttatttgaagatgctgttaaagtacagaattttgtgtacaggtagatttttccgtccctcattaatagtgccttcttaattaatacagactggtgttagctataacaaaactccagtaaggccaaagaatcccaagttctttgtggaaaaaaaaaaaaaaaaaa

SEQ ID NO: 689 - DNA, 4185 bp, Homo sapiens
  SITE (2673): n equals a,t,g, or c
ttttttgtactacaatcaactttattttgatgcatgtaaaataagatattagactgttttttgaataaaatatttttattgattgaacctttgaccctctatcttattacatttagaggcctggcatctttcttgtgagacaagcttaaggacacaaaagaaacacaactttgtgataccactcttctgaaggctacttatagtaataacttcatagatgaacagcatgattcaggtacagtggctttaaacatcaaagcacatttctcattatataaattaaaacgggtggctccagtgccactatcaaagcttaagttatatcttttatctagttctctgaatgtactgaaacagtactttattcgtccaataaataaagcaataaaaattgttcttactgaaaatgaagtagctaggtgctcctgaatttctctccaaaaactaaaacatttaggtcaaaccacttctccggttgagcagtgtattttgatcttgaggattcatggcttgataagtagatagttctaaggcaaaagtagctgagcctgatgttagcgttcgaagcacagttgaataacccataatttctgctaagggaacaaatccaataacaactttgttgtcctggcgagtctgaatttcctgaatgtttcctcttctttgtgccagatctgccaggacagggctgagataatctctagctactgtaacctcaagattcatcagaggctccaaaacttgcttatcagctttcttcagagccttttgcacgcatcttgagacacaggcagaaatcatagttgtggaggtgccaggatgaattgtcagggaatgtaaagtaattgctacatcctgaattggggatccaagcaatggtccttggagacatgcgctgtgaattccattttcaatggcctcttgggagaccttcaaaaggccttcattgatactttcagcatactcaaactcaatcacaggcataacagatgatgtttcaattggccttgcttccacttctacagtcacaagatgccttttgtctcctaaagttctatctaaggtatctgtggcacgaactgagtttaggatggtctctcgatatgccacctggagaggcccgagataggtctccagtccatattccctcttgattcgatcatgaataatctctatatgtaactcccccataccacacagaacagtttgtccagagtcaggatctagcctcactttcaaactgggatcttcacgctgaagacatttcaacgcatgttccaaatctggctgcttagacagtgatgggggttctatggtacagaagaaaacaggttctggaatctccactccagccaataaaagtctctctgcttcattgttttgtctgtgcttcttttctccctcccgttcgctctacgagctgcagctaatgcactggacttggatgagacaatggtgtctccagtggcagtatgtttaagcccaacagtcaaagcaatgttaccagcagtcaatgaagggatttctacatgttggtcagcaaacggcaaaagcagacgacttattctctccgtgcagtttccattaatattatgaatggccaactggggttttatagtgcctgagtaaatgcgcataaaaaccagtggtcctcgctgcttgtcatggagaactttaaatgccaatgcacataagtcatccttataccactgcagaaattcatagttacgctcttcaggtgaaggtaagtacatagtaacagcatctaacaagggctgtatccctttgtttttcagggcacttccacaaagcacaggcactgctgtctgagctagtgtcactctatgtattgcagtctgtagcttttcagctggtaacaaatcaaaattctcactaaattcttctaaaaccaagtcagcaaattcatcatccaaatctgcaacttgttcaattaaggcattccttgcttcagttgtttccttcagcaattcaggatcattcatttccaagaggggctttctctcaaagtcttttccatcatttgaattgcaattccaaagaagtttttctttcattactacatccaccactcctttgaaagttttggcttcaccaattggtaactgtaaaagcaaaggctttgcctttaacttctctctgatgctttcaactgcatacttaaagcttgctccagttttgtccatcttgtttaaaaaacagattcgaggtatattgtgtttatcagcttgcctccatactgtgagagtctgggcctctacaccagcagaggcatcaaatacagccactgcaccatccaacactcttaggcaccgctcaacctccaaggtaaagtccacatgacctggtgtatcaattagattgactctataacctttccaatcaaatgtaacagcagctgattgaatagtaatgcctctttctcgctcttgggccatgaaatctgtcactgtgtctccatcatcaacatctcccagtgatcttgtatatccggaatagtacaatattctttctgtggtggtagttttgcctgcatcaatatgagccataattccaatattcggattttagctatggaggattgatgatggaatgaagggatttgataycatttcctattaagcctggtagagaactgcaatttcttccaagcgncacatgtggctttaayctttttaaacttgctcttattttatagcagcatatattattaatatacacactgggtattgtctgatgactcattgcaaatatcctcaagttggtcaacatcttgatcctccaaactgttactgtctggcattaggccgcgtgccgcaggccagctctcaccgctgggctcttgaagcaggaggcgcgagccgcgccaaagtctgcaacggcctcaagtctcgacgccagcctaggcaaaaggcaatgtatctaaacgaaaagaaaataggctttctccgctctaccgcctcgggcagccacacctccacacttccggcggtgtaccggccaaatgccgcctgccagcaacttccgtcctcctagctaaaagcggaaaacagaggctcggaaccgctgcgtggttcttgctcttcactcggccgttttaaagggtgactctttcctgtcccggcctgcgtggtgtgggcttgtgggtctttgagacccgaaaattgagagcgttttcgcactccagcggctgctcctggcggctctgcggccgtcaccatgccacagaatgaatatattgaattacaccgtaaacgctatggataccgtttggattaccatgagaaaaagagaaagaaggaaagtcgagaggctcatgaacgttcaaagaaggcaaagaaaatgattggtctgaaggctaagctttaccataaacagcgtcatgctgagaaaatacaaatgaaaaagactatcaagatgcatgaaaagagaaacaccaaacaaaagaatgatgaaaagacaccacagggagcagtacctgcctatctgctggacagagagggacaatctcgagctaaagtactttccaatatgattaaacagaaaagaaaagagaaggcgggaaaatgggaagtccctctgcctaaagtacgtgcccagggagaaacagaagtattaaaagttattcgaacaggaaagagaaagaagaaggcatggaagagaatggttactaaagtgtgctttgttggagatggctttacaagaaaaccacctaaatatgaaagattcatcaggccaatgggcttgcgtttcaagaaagcccatgtaacacatcctgaactgaaagccaccttttgcctaccaatacttggtgtaaagaagaatccctcatccccactgtatacaactttgggtgttattaccaaaggtactgtcattgaagtaaatgtgagcgaattgggccttgtgacrcaaggaggcaaagttatttggggaaaatatgcccaggttaccaacaatcctgaaaatgatggatgtataaatgcagtcttactggtttgacagcaatttcatatataattattgaggactacacaccaattgaagaaactgccattactgtgatgtttctgaatactaccaaacagccatacatgtctgcaatgaagagatttattaaattgtaaacattaaagtggtccagttttataaatggtctttattttg

SEQ ID NO: 690 - DNA, 1054 bp, Homo sapiens
  SITE (567): n equals a,t,g, or c
  SITE (1031): n equals a,t,g, or c
  SITE (1051): n equals a,t,g, or c
ggcacagcttcgccgagcgtgccagcctcacgaagcatagccgggtgcactcgggggagcgccccttccactgtaacgcatgtgggaaatcctttgtggtgtcgtcgagcctgaggaagcacgagcggacccatcgaagcagtgaggccgcgggtgtgccccctgcacaggagctggtggtggggttggcgctgcctgtgggcgtggcaggtgagagttcagccgccccggcagcaggggcggggctkggggaccctccagcagggctgctagggctgcccccggagtcaggtggtgtgatggccacacagtggcaggtggtgggcatgacggtggagcatgtggaatgccaagatgctggtgtccgggaggctcctggtcccttggaaggggcaggcgaggcggggggtgaggaggctgacgagaagcccccccagtttgtgtgccgagagtgcaaggagaccttctccacaatgacgctgctgcgtcggcacgagcgctcacacccggagctccggcccttcccctgcacccagtgcggcaagagcttctctgaccgggctgggntgcgcaaacacagccgcactcacagctcagtgcgcccctacacctgcccccattgtcccaaggccttcttgagtgccagcgacttgcgcaagcatgaacgcacccaccctgtgcccatggggacccccacacccctggagcccctggtggctttgctaggaatgcctgaagaggggccggcctgaagcccatgaccccccagcaccacactccgggagcccagcccccatcgggggcttcctgtacctccttttgcctggctctgctctttagactccagatccctacccctcagcaactagctcccctgtcggccagctaagagagctgggacagtggaggctggcagaagctgagacgtgactgtctaggagtaacactcattaaagctttcattttggcaccaaaaaaaaaaaaaaaaaaaaaaaactcgagggggggcccggtacccaattcgccctatngtaagggaatcgaatttcanaga

SEQ ID NO: 691 - DNA, 2472 bp, Homo sapiens
gctggagccagggatgctgttaaggttctcccctttttccatgttaacaccattgcctcacgtttctcattgccctcacgtttgccccgcttccctttcagtcagccatcataatcatctttgtttttctccatgacatgaatctgccatcggttaatttgggtttccgttgtttttatttattcatagatttttgttttccctcatccatctttttttgtacagagttcacatgagactctgaatatagtggaggagaagaagcgggcagaggttgggaaagacgaaagagtaatcacagaagaaatgaatggtaaagagatatcacctgggagtggtcctggggagattcgtaaggtggagcctgtgacacaaaaagactccacctccctgtcttctgagagcagcagcagcagcagtgagagtgaggaggaagacgtgggagagtaccgtccccaccaccgagtgaccgagggcaccatcagggaggaacaggagtatgaagaagaggtggaggaagaaccccgcccggcagccaaggtagtagagagggaggaagcagtgcccgaagccagcccagtcacacaaacaggtgccagtgtaatcacagtagaaacagtgatccaggaaaatgtaggtgcccaaaagatacccggagagaagagtgtacacgaaggcgctcttaagcaagacatgggagaagaagcagaggaagagccacagaaagttaacggagaggtgtcccatgttgacattgatgttttgccacaaattatttgttgttcagagccaccagtggtaaaaacagagatggtaacaatttctgatgcctcacaaaggacagaaatctccaccaaggaagtccccattgtccaaactgagaccaaaaccatcacatatgagtctccacagattgatggcggggctggtggtgattcgggcacgttactgaccgcacaaaccatcacatctgagtccgtgtcaacaacgacaaccacacacatcaccaagactgtaaaaggtggaatttctgaaacaagaattgagaaacgcattgtgatcacaggagatggagatattgatcatgaccaggcactggctcaggcgatcagggaagccagagagcagcaccctgacatgtcggtcacaagagtggtggtacacaaagaaacagagttggctgaggaaggggaagattaagtaagaaagtcattttttaaacaacactcaactttgtgaacccctgaagattttttgaccgttccaagtcttaatgccacaccactattccagcgaatttatgctacaactggtaacaatgaccagaagcctgaagaattaaaatgccaacaccaaacctttccttaccagctctggtctatattgctcccatgcatttaatatattattttgttttataaccacttctaaatattctcagttctttctttttgttgttgttaattaaggggttttggttttgttttctgtttactttgtgtgcaactacctgcttttaatgactcactttgatcaaatgacagtgaacaaagccagcccaagctggtaaggtgctgttcacttgaacaggtgctgttgcgcagaaaggaaactctgtgactaatttagatagtggctttccttcttctggattcttttcattgaattctcacagtaaatatttacggagttttcaaattgcagcaaatatactgtatgagaaaatattaatacagattaaaagcctttcttacatcttgaaaattttctaatatttgagaatttcacagggatgttttttatattggacccttttgactttccagtcctgtgactttctacttttagtagagagtcagaatctctggactggagaataatgaagaagttcactgactgtgcactgtgcttagagaccctgccgcaccacagtgccaatgcttgtcagacacatgcccttcggcagcattccagaacaggagggaagagaaagagaaaactttcttcccttctactaaaagattcaggcagcttaaaaccttagtgctttctttcttaacatacccacatttcaattctttccattatttgaacacttgggtagaactcttgctttgtattaaacctctttgtctacacatgtaaaacttaccttttgttattgagcaggcctatctctttcagatagttttatgattcacacaggtttgaggatgctggggagagggggagggggctgtggtggtgttctgttggttacaagaaagttataccatttaaagctggcaccagagacccgatagggacttattaactatattgaacattttttcctttgcctttgaccctatgtatagttacgatgccagattagatttatagcagcctcaagttgtattaaatgatattttgcttcctgtaatactattataaaataaagtttgtttattctctaaaaaaaaaaaaaaaaaa

SEQ ID NO: 692 - DNA, 1606 bp, Homo sapiens
  SITE (84): n equals a,t,g, or c
cttgatgccaaaaaggcggggggagctctccaccctgtttgacgtgggcggaatctttggtgggatcctggcaggtgatctcanaccgactgggagaaaagggcctccacctgcggcctgatgctgctgctcgcggcccccacgctctacatcttctccaccatcagcaagatggggcttgaggccaccatcgccatgctgctgctcagcggagccctggtcagtgggccctacacactcatcaccaccgccgtctccgccgacctggggactcataaaagtctgaaaggcaacgcgcacgccctctccaccgtgacggccatcattgacgggacgggctctgtaggagcagccctgggccccctgctggctgggctcctctccccgtccggctggagcaatgtgttttacatgctgatgtttgcagatgcctgtgccttactgttcctgatccgcctcatacacaaggagctgagctgcccagggtcagctacgggggaccaagttccatttaaggaacagtgacaccccaccccagtcccgtggagggggtctgggcccacccttcacaactgcctttcaaggacagttcagacaaagggccctgcatggaaagagtgacctccctttgccttttgcacacgcacctggaaaagacacagaagccaacctgagaacccctggtgctattttaaaggagacatattgctgaacagcagtgagaaaagtctgcaggaactgctgcctgagccaagccagagaaccgaagacccggccggccctggctcacaggcgtgtgcccatgcagccacccaaatgcacgcgtgacaacaaggccgggagggtggggggggtgcacaggtagccccgaccctctcaggcattccagccacagaacatcaaagtgagcgagtactgcgctggctgtggcttcagagaacctgtatgtgccacgtggaaaaacaggacaccagagcccaccagacagtgccggccagcagagaagcagaragccagcgccacacaacatcaagaaggccgacaaccaggttggaaaccaagacggagctcagacccaccacatcgccccagaggcttttccagcacccatgatgttccggactgacctaaaaactaattgtcgagaagccaagggtgaggaggcaggaagcacctccggttggaggcacccaggcttgccagccacagagcgccccgaagtcaccgtcatcccagcccctggccttcctgccgccctccggkgccatggcgctgctgttcagctcaggcacaggggcacagcagaggtttgggaagcggtctccccaccggcactgggattggcgggtccaagcccagcaaccggttcgctccacaacacacaccacacctgggactgtttttaatacatagcaacagactgggttatttatttaagatgtgtattgtgtcatatgaagtttaagagacataaatggcattttgttatttattaagacaamctccaattgttctctggctgtttttttcagttgtgtctagcaaaatacttatctgccctttgaaataaaatgtttttgtttaaaaaaaaaaaaaaaaaactcga

SEQ ID NO: 693 - DNA, 2505 bp, Homo sapiens
cttatagtgatgaggtacctctttgccttcctcaatcatctatcacagtacagcgatgagaatatgatggaccctataacctggccatttgctttggcccaacattgatgcctgtcccagaaatacaggatcaagtgtcttgccaggcacatgtgaatgaaattatcaaaaccatcatcatccaccatgagactattttcccagatgctaaagagctggatggccctgtttatgagaaatgtatggctggagatgactattgcgacasccatacagtgagcacggtacattggaggaagtggaccaagatgctggtacagagccccacacaagtgaagatgaatgtgagccaatagaagcaatagccaagtttgactatgttgggcggtccgccagagaactatccttcaagaagggtgcctccctgctgctgtatcaccgtgcatctgaggactggtgggaaggcaggcacaacgggattgacgggctggtgcctcaccagtatatagtggtgcaggatatggatgatacgttttcagacactctgagccaaaaagccgacagtgaggccagcagtgggccagtcacggaagacaagtcctcatccaaggacatgaactccccgacagaccgtcatcctgacggctatttagccaggcaacgaaaaagaggagagccaccccctccagtaaggcgtcctggcaggaccagtgatggccattgcccgctccaccctccacatgccctttctaactcctcagttgacctagggtccccaagccttgccagtcacccccggggcctgctgcagaaccgtggcctcaacaatgacagtcctgagcggaggcgcaggcctggccatggcagcctgaccaacatcagccggcacgactccctcaagaagatcgacagccctcccattagaaggtccacgtcatcagggcaatacacgggcttcaatgaccacaagccactggacccagagacaattgctcaggatattgaagaaacgatgaacacagctttgaatgaactccgagaactggagagacagagcacagcaaagcatgcccctgatgtggtgctggataccctggagcaagtgaaaaactctcccacccctgccacttccacggaatctctcagccctttgcacaacgttgccctcaggagctccgagcctcagattcgacgtagcacgagctcctccagtgacacaatgagtactttcaagcctatggtggcacccagaatgggcgtgcagctgaagcctccagcccttaggccaaaacctgctgttcttccaaaaacaaatcctaccataggacctgccccacctccccagggtccaacagacaagtcatgcacaatgtaaaaaccagccaagcaaggccataaagggaggtgacttaaaaaagaaaatggattagtgacaaaagtcactgatccwtaactttccttagttttgtgcttataactggagatcttttggcttttctatgttgtcgaatgtaatgtctgagactagctaaattaacacgggcatttgtattttgtaatttttttaaataactggacatatgtcattttaaggacaatagaaacacttagacttacttgaaaatccaatgctgcaccacttgtaatgaaggcaacaccgctctccacattgtacagagcttcaggtttaatgtagcccagctgagtcagaaaggttgtgacctgaaggcagaagaacccgaatgccacacctcattggagtatagccagtgttggtctgtggcacttgggctgaaaggtgataatggcattgcgtggtagctgacaatgagcaccttcggttccatgtggagcggggtttagctcatgcaaaagacttgcaattgtctccatgggacgatcccagtgggactgtcagcccacagctcgagtgggttggatgcttgcctctttcctaacagttatttccccgggtccagcttaaagactcgatggaaggaggtagaacctctgctgttactgcttgaacttaacctgggaaaggagaggaagacaccatctccaaagctattaatgtcactccttttgcgagcatgattaggccccggagatttccaagtccccccatctacacttacaaacgattagaagggtttaattttaaagactttctggttacactactccacgaactcctccaaagatccgttattcaataactgcctagaaaatgtttccatctcctctaaatccctgtgttctcctctgtggaaatgaaggcagcaagaagcacctgaggccttggttcatgcagtgttctcttttgactaaatcacctaggttcctttaaacatgctacaaagcccaggcatggtggtgcacacctgtactcccagctactcgggtggtttacacaggaggatggctttgggcctagtagttcgagtccagcctgggcagcatagtgtgagaccctgtctcttaaaaaaaaaaaaaaaaactcga

SEQ ID NO: 694 - DNA, 1271 bp, Homo sapiens
ggcacgagcaaaactaactcctccctaaggggtcattcttcataaattacaaaattttttgtgggatcttggatttttgtaaacatgagccacttccatgcttttggccacaccacctttgtggtcatgcataaaattcctctttcagctgacacttatgctctgcttcatgcttgctatatatttaggatttaggaaagtgataatactcatggcacagtatttctgagttcttgttttaacttggcaaatgttttcactaataattttgttggtaaaatatgatattcctaaagaaaatcattttaatttatcatcacttctgacaaaaaatacttggttgaaaaaatattcattgcatctttatgaacatctcccatataatataccagctataatttaaatgttttccctatgtccagtacttctaaatggtcaatagactatggttggccatttggcaaaactgacttctcaagaggaaacaagcatattttgataaaaataatcttgttactcaaggtcattaagtaattgatgaactatgtacaagtttattatatctctttttatcttgtagctacctgtcagtatcacgttttttttcctaaattgtaatccttcatgcacagaaatgttccatgtggcaacttcaaagacaacctgctgagaaaccaagagaatatttaataatgctcaagagcaatgaggcatgaatgatcaaatgaaggtctttccagttagttattgattattctatcatggcaggtaacttcaaacaccacacacaatcttttgaacattaccttcatctcctaatatttctatcactagaagaaattactttccttgaccttccatagcaggcaaatctgttttgcattatttattgatcttataatataatattcttggagggataaatgagactcatcaagttcaaataaattataattgtagaagtcttaaaggtaacccttatattctcatatacttaatgcagaagaaaactgttagttctcatagatggacttctagaacaccatccaggacttaaaagtttaaattgaaagtgaacttttattttagactttttaacaatatatgtcaaagtgccatttggcaactatcccttaacatccagaaaactaatgaagtgcaggtaggttacaccttagcttactagtccttatggttatctccttttctaaaatgacaaaagaacttgaagaattagctgtggaacaaaaaaaaaaaaaaaaaactcgtag

SEQ ID NO: 695 - DNA, 1748 bp, Homo sapiens
ggcacgaggtagcgtgacagcaaatacgcacaggaaatgccgtggaccctggcaaatgtagtgggtaatttcatgcaagcctggagacacgtcgctctgctggcatgaacctctccatgtgtgttttcacgtcctgcctcaacacctggagcttcccatggaggcacaatcttgaattggggctgaatgaggaggccatgtccccagggatcccctcaatcaatgaaagatggaagcaggtcattgccccagctttccatctgttagaggcaacagtgcttgtggctgtcttgtgcgcttcttggagatcctggtgggatcaagtccccattgctcataccatgaatcaggaaatgtgcccttataatattcctccttctcctcctcctttctctcatcctcgttgccccttcaatcttgtacctaaaatcatctcccaaacaaaccacccaccctcatgttcttcaattagtttcccccwmayaaaaaaccccmaaataaccccaaattagacacacttaatgttgctagcttctytctttgctcctgacagtgtaataataaccttttaatttatatagtattggtgcttaaaatgtatgcttttccttaaattgttagagcttctatatacctcatccatgtgatagttataatagtctgagaagtaaaatggttgtttccagggactgtaagattgaggtgttggggagatcttggtcagaggctacaacatttcaatgagacaggaggagaaagtttaagagctccattgtacaacatggtagctgtagttgataacattatattgtattttttcaaaattgctaacagaagattttaagggttgtcactataaagaaatgataaggatgtaaagcaatgcatatgttaattagctcaatttagccattccacaatgcatccatattttaaaatattatatcgcacatcataaataggtataatttgtatttattaattaaaaatagcttttaaaaacagtaatatcacactcatgaattagaaaattctagtcagatttaatacattttaattgktatatacacaacttcttaccctggtgataaatattttccagtagcccatcctcagttattctactaatgctttttgtaccagtcagtgttctgaaaaaaaaaatcyccttttttgttagtttctgaataatgrgracmttgaaaattggataccccttgcaaaataaaaatgtctcttcaaaatgataactgggtagtaaamctgcttttgmytgtaatagtcatattgaagaaatgctcawmwtttctagctgattaagtcatgtattattgattgttggttttattcattattaagttggtggaatagaactcattggtccttccattatttctttaggaaagttgtacttttagataatggaaagcagtaagtatgtggaattgatgttaaaacacgttcatcgtttatcatgagcaagttcacagtcaagatctttgtccagcaaccaaatataatatatataaaataaagaaaatataagaagacaaactattcaaaacaacttctggagaaaatttccctgccaaagaagggtcacattcaaagtgtgtcacaaaacctaacgtctttcccctatttttcttgttctccctccctctcctgtatgcatcagtgcttccaaagtgctcttcagtcatttattaaagcctctgtcccacaaaaaaaaaaaaaaaaaactcgta

SEQ ID NO: 696 - DNA, 3707 bp, Homo sapiens
aaagaagcaagccgctaacagctaccaagaagaggaggaagtgggagatgcgctgcttcctgtagaaagaacgttgattgaagwcaaagctgggtggggactagtccctgggmctgcagccgctgctaacacatactcacaacgctgccgccgcgctccgtgggcaactcctactactgctgggctgggctgggctgggctgggctgcgccggagctcgcctgcacagatcagctccggagaggggaaaaccacgctcctcggaccaagcctcgggagctaagccagatctgccagtgagcctcaggctttaggaactgaagagtgtttctgaaagatctatccagcactccgatggccagcaacaacaccgccagcatagcacaagccaggaagctggtagagcagcttaagatggaagccaatatcgacaggataaaggtgtccaaggcagctgcagatttgatggcctactgtgaagcacatgccaaggaagaccccctcctgacccctgttccggcttcagaaaacccgtttagggagaagaagtttttctgtgccatcctttaagtctttgagaggggcctgaagagcctccgggctcctgggacattgatgtagagtttttagtgaagtgggcacctttctagtccacggcatttgaagagagcgaggagaaccattctggaaactctaggctatgcatgtttaaagatctggtcccctttatgagaatgcaagccgatccacatcctgacttaagagatctgattctgacgaactgcctggaggaggggaatatataaaaataaaattggtgtcacttcttttctgctatcccccagccccccccccaaaatcctcatgtttctgcttcatattttgaaaaataacaattaaaacagacagctgtactgaggtaagatatgtgtgaccttcttggaatgaatattgtctttagaataccctttgataagctgagctgtcccgtgtagatgcaattcggtttaatggcattgatgtatagtcactgtgcctttctttttctttcttccttctcctctacccctccttccacccctccccattagagtagtgtggagataaggctggactggtctatcagattgaactccaagaatgatcacacaaaatgtttagggagatgttccccgtggtgtatcctcatggtaacaacgacaaaaaatgccggttgtctttgttctcttttcactattcctaacatgtgtacatgatagctttgattctgcaagtaaaagtaaatcctgtgttgtgactggtgctttcatatatttgtgacaatttttgagtaatattgcatgaaaatgtccctatgttacatccattcagaagttttgttgttttactctaaagctgggaaaggaaatgagagggaaaagaccccggagagggaagaaaatctcagtattttgaaaattgagattacttcagagccttagccacacctaaaatacctcctagttaatagtggtataaatgcctcttcaatacgttttccagaatccaaagcattttggtttatccaggacccagggcagcacagctgtcaccaagcaggagagttaaggattcaccatgagctgggaaatgcttttgccatgagtatgagcaaattccctctttccctgaatcatggacattctagattaaaagaacatttttttgtgctcttaacaagaaaaccatggccctcctttgttcaagtatcagaagaaataaacccacagctccagagaaggtgaccattctcagaactccagctattcactctccagggagaaggacctcaaatcgccactctttgggcggcaggtgcggtccccacggccggctctacgaggaagagttctggctcttttgtccactgagatggtcttggtttttcacttaacaaattttttaatggaatctttgtttttgttctccatcttgtttgttagagtctctcggcctttatttacaaattccttgcaactagagcgctccttccccaagatatggtagtgagagtaatttttcattgtagctgtagtctccatcagtaacagcaggccctggaagacttgatcacctttttctgtgtcattttcagtcaaagagggcctctcttacatcttgtttgctttcaaatccccaaatatcatctccatctcccaattaattttattstctctttcctctctattcgctttctcctgtttttttttttaaaaaaaagcatgaaaaaggaagagaaaaagtttgatatgccaaggacagattttgaaacagacttggtaaatgttttccttagctccttcatgggcatgctggtgaaagaataaatacatccaattaaagctcatgctggggtcggggagaagaggatactgaaacatttgtgaaatgtatgaatgcacttctgtaaccagatacttctgttcttctgttcaaattgtggggtttttgttacagttaggacgcccatgaagatttaggggtgaaaaaaacagcagagtatttattaaactacagcattgtacaattagcttagtaacactatggaataagctaaaacatatcacagtttttacatgggccaaaacatgaattgagtatgtggtcacatgaaaacacggatgaatgaataaaacactctttggtggtgactgaggcatcattagaaggcccagacgatttccactattcacagcatttccttttctcagaaggactctttatatttccatgtaaatctagatctttggagcaattaagatggaattacaatttctagggagcattttaaggaaaatgttttggctttttcataattttatgtcttacagtatggaattataatacgaaaatctttatatgagttttggcttcttggtatttgtacttattcaggggaaaaagtctttcgattacttatgcctctatagagcttaatttcttgagaaattcaacagtcattttcaccagcataattttatcttaaggaataactaataggaaaagtcagcttaattatttaaggccctagtttctacatataatatattcgatagaaatgaaaatctgccgtggaattaactaataagtagtaacaataaacttcatatttagaatgcaaagtctataaagaataattttacatgatcctcaatatcaactccagtttaaaaagtgttatttttaaaacatttgaaaccaagtactgtttaatttcaatcagaagatgcaaatacatactttgatctatgtttgattttgctaataatatttgaaggagattgcctaccaaggacaaaacaataaatttaaaaatcaaacgatttctccatacgctcatagtcacatatggaattttgagaaaataaagcatgctgtctttaggaatttttatacttctttgtctttcttccttaatatttgcttctagctgctcttggcaatgatgaattgttatgtatgcattaatgttttgcagcccaaaagttgttcacatttttcctatataagatctgtggagtgtgtgtttcaaagagagaactacagaaatgttaaagcaggaaaacctgaatgtgatgtgcacattttcatcccacatggacaatgtatgtgttttaataaatggaattttcagattcaaaaaaaaaaaaaaaaaaaaaaaaaaaaaaa

SEQ ID NO: 697 - DNA, 1307 bp, Homo sapiens
ggcacgagtttcctggtggtggtatccaaaatcttcagtaactaggaaggaaaccagggtctcatggtttaaaagactttgaagcaggaatgttgcatttgacgcctttaaaactacctttttgctgttgggaggagtcgggggcgagccttagcagctgcaccgccatccccatgctggttggtgctgccctgcctctcgtgccgggtgttgcttcagcccagagccagagggctgggtcccgggtcctccacaggtgaccccggtggacacacgcgttcccatcctggcctccgtctctgcttttccacttctacctgcgtgtgggtttgccgccttgtcatcggttgtgtgagtgtcgcagacctttccagagctccggttcactctttccaaacaggcctccctgtcggtggcactgcactcctagaaccttcagtttctacgatggtttgtttggtccttttgaaccaccccaaagaactcaacatggcaaagcaaatggtaaaagcttcccgactgttctactttgggtccgcgcgaagcccactcacgtgtgatctgtgttgcccctctcggtggtcccaggcgatccagccatgccccctgcccctctgcccagatgcttcaggggcccggcttttcaggcttgccctcaccagcggccgtcagccgacactcagggatgtagctaacaccactccgccagtgctttcagtaggaagagctgaggctgcctgggaggcccggggcgaccggaaaagggctctctcaagttctgaaaagagaatctgccaccagatcgaatttcgacccctgagcttgttcggacgtatggtccaaattcagattaaggtggtcacccaacccgagatgtcaggaaaggccttctgcagagaaaatgtccccccacccgccatctgcagccaggtgtgtgccacacggcagccttcccgaaacatagtatggattttaaaaatgtgtttatttttgtttctcaaccactttataacgtattttttaatttattttgtaatgtcttgttttgaagtattgctgctatccttgttatccttcccactgtttttatcactgatttattttgtgaaagttgtacactaatgttctatgtcaaaatcaaaagtatttaatgaaatactagttctatttaatgtggttatggaaccagctggaaacacaaaacaaacagtgattgtacagcaggctgggcccaggaggtcaggttcattttgttacatatgcaataaactcacgactttacaaaaaaaaaaaaaaaaaaaaaaaaa

SEQ ID NO: 698 - DNA, 2304 bp, Homo sapiens
aattcggcagagccctccctcatgggttgtatttccctaccttcccatacacttctctccctaaggtcttatctaaccatcattctcttcaagttgccatttccattccctacttcccagctatgcacctttctgttccatttggttgacttttatttttttcttctttccagcacatggctttcagttttcctgcctctgctggagttgtcagggttggagccaggagggctttactttttccttttcttctaccaggttagcccggttggtttatgacatctcctcattttcaactctcctcatctcttttcatgtggctttgttggggttggatggctgaggttggctggactgatggttacaaaagaatatgtgagagtattgagggagtgactaaatccctcagggataagagagggaacaggaccttccagaaggttgtgctcttattgtctcagactttgtatatacatgtttatttctgtaaattgctttctccatttggacaaactacaataaccagagtaaaaagctaccaggaatgagttctgttcaaaattacagagatggacattggagtctcagtgagtttgcttgagagttctcggaataatatgaaaatagctttaaaagggacaacaggagagtatgcagagtggagctgcttcttttttttttgatgccgaaattggtttagatagaatgaaactgtctctcttaagattcgaaaaataaaagccaaaacaacccactcatctctcaaatcccggttgagctaaagctacaaatcatattcatttgtaggatacggttgagagatgactctcgagtaatgaaggctcataagcctgggctgtagttagcgtaagaggtaaacaggggccttcttgttttcactcttttggaagctctaattcatttctaattactatctcctggaaaaacaccgtgttgtcattgccttttaaatttctttctcttttcagagaaaacacatattttaggtcattaagaaaaaccttgtcttaatttggatgatgtttttattctacaaaatagaattattatcttgttcgaggcacaatttggtaagaagaagaggctgcatgcattttaatttggcaatgaattaacaataataaagaggatatgacttttccactgktacacagttcagatctacatgcttatgtaggtcagagaagaagcatccttgctatttgaatttttacagggaattggtcaggaggaaaaaataatggcatgtgaaatatcaaaacctttccttaattttcaactcaataacgtgttttgcaattttaaaagtccatgaagaagaagaaaaagaaaaagaaggctttacaattagtaggtgtgaaaaagaaaaaccaatattgttttgtatagacaaggaagcagaatgtggcaaaaattagcttttgttgtttttcatattatgaaatattccccaacacatatgaaagtgtaagtaggcaaaaattttttycycactcataagctgaggttaycttggttattttttgaacaacttagtctgttcttatggtaatttggggaamcgtatgaattgatgggataaacttttccttgagattgtgaatgaaaatgggctcaatggagtgccatggtcttcctcagtgcatagcagattctgaagacatcacatmcacaaattgtccaccacttctagttccaagagaaggtgtgggaaaaaggggtgaagggaccagcattgcctggcaagatggttgggggagtaatcagctggggagaccaccttagtctggatacagacgagagaggggaccagagaggtctcagactttgccattttacttcttgatttactaatgggctccaagtgtgaactgtaatgtagagagtcaggaagaaggtaggtcttaaatcttgttaaaaaatggatacattcttaaatgcttcagcttgtagagaagagagaagaaattttgattattccttatgcctctattaaaatacctgggaaaaccatttactcaattgatttttaccagctgcatttttgtatgacataggtaaactatatttgttttaacaagtaaagaccaaaaatgctgatcgcaaaaagaaaaatacattattcacaattctacctctaatagacgggtactgttgtgtgtactcgtatacacacgtataatataaaatattatatttgtgtgtgtgtgtgtatgtgcgtgtgtgtgtgcgtgtgtgtattctttcatttggcaaaccaaaaaaaaaaaaaaaaaactcgag

SEQ ID NO: 699 - DNA, 2719 bp, Homo sapiens
  SITE (2706): n equals a,t,g, or c
  SITE (2707): n equals a,t,g, or c
  SITE (2708): n equals a,t,g, or c
  SITE (2710): n equals a,t,g, or c
  SITE (2714): n equals a,t,g, or c
gtgcaaaggaaatggtcacactcttggttgaccttagcttagtgggtaagcccaatgagcaaagagaacaaaaacctgaggagtgttggaaaaggggaaactcatcttccaaagtattttgcttctatgagaaagggaatccattacataacattcttggtttctctctgctccctctttcacttctaccagacagaaggagtgaattttctgactagaaatttaaaggacaggaactagcatctgtgctttggtcccttcctcctttttttctttgggatttgcctgtctgcagagagaacacagcctgttctgctccaccattgtataaacatcagagtggaagggtctgccccatgcagttggatgactggagttgtccaacactgtctgactatgtatataaataagtgcctaatttgggggctcagtattaagaagcttgcttgcccacwkyagtawgccatgttctgcaatatcatcttaattagcagtwaaggtgatatttcatctccatcygcttggccatttatcagctggctcttctagaaggtacacagcctcttagcaaatggtggatgtggccaggattaccatgaaaccaccttttggaaagttaccactaaatacactaagtccagtcagtcaggaggcagagtagacttgwttcacatagaactaaggctggacaaaataaagccagagagctgatagcttggatatcattgtgagctagttagacatagactttctgaaaaaccatcagtactagggtcttaacttgttgagtcccacaaacagccttgagaaagaattttagtgcttagtgcaggtcatttttttaagaggtaaacccggaatataccggttcaggaagtaggagagtgaaaaatgcaaaaamaaaaaamaaaaaccatgaaactgtatattaaggaagaagttgctggtatgggaactaggactcaacctcactgaggacctctgggagattgcacagaacactattcttacagttgccccacaacaccccccgccgccccctcactaccaccaccaaggggcaaaaaagctaggccattcacccactcccattggtcatgggttgagggctgttcccaggggcagtattaattccctggcacttccagcttgcctcacacattgatttagcatcctctgaaggtaggggaaggccctcacacaaagactgagaaactgttattgcaaaaaagaactggcagatcatgacagtgactgctacaaatctaggtgttgtgtcaccacagaagaaaacattttatgtaaggctcagtggtcctcacagcttttctatctcacttgacaatgaagatacaatcttacaaggtgtctagccaggaattttatcttcatcaagggtaaagagacgatgggaaacaggatcagagagatgaggacctgccaaaagaaaaaagcacaacaaagtgacatccaacaatataatatatgggaatttaaaatgagacaaagccaagtcctgagcttttttaatgaatggaggawaagcaattctttgagaggatggagtagaacatgcactcagaacaagaataaatgttttaatgtcagtactttgctgaatgtatatgcagaattgacagactccatccatttccatcaagggcatcaaatttcaactattgtttgcttagtctgcaaaaatagccaccctgcatccttgaagcttaattcaactccttcagtaagttttagatgatgggtagttaaaggattaaactgctgcagttgaactcttatgccttataattgatatattgaaaggctaaagcatgttcgattcctgatgatagcaatctgcagtggcatcataagcacattaaattcagactgaaacattcagcgaagttaatattgacttcacaatgttctaagatgtaagtgaagctatgctctttttgccttataaaattagactgcaaaaaaacaatttttgaggatattcccagtcaattgacttggttacagagtgagcaggaaatcaaactctagttaagttcatagatactggtgttttattcatttggaaacagaagagaaaaagagtatgctgtagtaaattgtttataaattctttttaattctaaaggagggggagaaagtgaaagtaaaaagcaaacattattaatctcttactgtcacaaaaaaaacaacccamtcttacacctccatcattgcctaaaagacaaaaactccaaagactggcatttgagactcctcacagtctgccaaaactgcctcctccctcgtcaggtcagtcaccaagtcctttcagttctatctccaaacacatctcagtccctgccaccatggtctgttatctgaactactataacagtttcctaactggcctccctccttcctctctggaccctccagtgtgttccttcgtaacagctagagtggatttttaaaagtcctcccatggagttggagaccagcctggccaacatggtgaaaccccgtctctaccaaaaataataaaattagctgggcatggtggtgcacacttgtaatcccagctacttgagaggcagaggtgggaggatcacttgaaccccggaggtggaggctgcagtgaattgagattgtgccactgcactccagcctgggtgacagagtgagactccatctcaaaaaaaaaaaaannnanaaantcgag

SEQ ID NO: 700 - DNA, 2600 bp, Homo sapiens
aattcggcacgagctcgtgcgtttctatgctcaagattgttcaattgctgctgctgccgttgtgttttctttcaggatcgaggtgggtaccttcatataatatcttctttttaatttcttctctggcaattctttcctggattctttgctttgcataattatacctacaatgaaaccttagaagaaaagaatatgaataaattgttaatataaagtcctacagaaattaatttatgaaatttctctaaatcacacaaaacttaaatacagatgactactaccctgagactgaaaaatatgttctaatttatagtgctatttttgggcagttttggtgtcagaatacctatcaacacattctttttttattaggaaaaaaaggatgtctacataacaatttgtaaagtgataaaatccattagtttttaagtcttctgatagcattggctattataagaaacaagtatttgctctcgtttttaacgggataataatgctatgtctacataaaatgatttctaccaccttaaatagctcactgtagaaattcatgtataaatggaaccatatagtacatacatatactcttaggtctggcaaatatttgaggttcatccatattttatattcactcatcagtagttgtaaacacattcttaaagtagcattttcagttatgaataagcaaggatgaaataagtattagggtaagggaaatggttgaggctttcctaagtgaagtgtaaaaaccacagctttctttttaatgggatgtctaatatgcatttatctgttcaagcatgttaagatttccatgaaaatgtcctgaaaaatcaagattcttcattgagggtgaggatctcccaatgggagactgctctgaaaagagcatgtgctttttgaattagataacctactataatcatggatgttcttgaatacttagcaaacataccagcatcccaaagtcaccaagataaaccctcctactccaacatcacatgatcttctaattctacctgtcaaaaataagcataacaattaattagaatataattacgttatatacattactccacctagaaaaaaaaatagttcattatgtagagaaatgctttttttagtacatagagaaataaaaaacacagatactcactagtgaacaaaaaatgtccaaagccagccacaacagatcctaatgaaccatacaatattgaatgccgggcgcagggagtattttcaacatctaaaaatcctaggagcttaagggactagaatgaaaaaaaagaacctagattgagtaagaaagtatttcattttggggtgctttggcaaaaatgacaatacaccatttcttttcttgtagttgagggtttaaactagagtatgtgccacgtgacaacctaaatcagcttgcgttgtctttgtccagctttggtatgcagtctgaatctttaaatccgaaaaccttacaaattggaccggaaaacccttaagcagtagggtaacttggagctgtatcttaatttgctaatcaactgacttggaaataggataattcattttatgagctctttaaatgagtttatttgggaatatgcctatcattggaattgaaagcagcatagcttgcttcagtaactccaataatttgggaagcagaaatggaaaaagtaatttgagtcatgtttgcttatgtagtgccgtttaaaattcccctagtaattacctttcatattttattaactaggttaacatcaactgtggttgtaagagtaaatgtttcaccttaagataaacatgggcaatatattaaactctagtctgttttcttgcctgtgaagtgaggctgcacttgattatatttgattctttgttcgtaatacatgggaacgacagctaagtgtggtgaaaaacgcggggatccaaagagctggatttttatctcagatctgccgctaacttttgtatcctataggctacttttatttctatggtctcaatctataacatgaatgggttgggttaaatgactgaagttccttcaagtgctaaaattctttttctacagtcttcattggatttatgtatttcttattcctaatatgtttaactgggatgtctgtcactctagggcggcaagacagacatttaaaagtaacagtcacactgctgaactggcatttctgttaacacaaaagtttagaaaactcacggtaactgttacttgatttaagtgtatataaaattttcagtaaggctgcttttaaaaggaaccactgtccatttaaaggtttcatagttatcttcaatgggttagtattgtttggggcaggacattaaactagaagggattctataggatgaggtgatacctagaaggtaatatattgtaaggcaaaagagattagaagaaatggggcaaggatagtaaaaggcaagtcagattaaaggttgaaacatgaagatattctcaattgtatttctgcctatgtttgcttttttggctcaagcatctgttggaagagacaaaatgtgacttggttcataataaagcaagaattatttactctcggaataaaaaaaaaaaaaaaaaaaaa

SEQ ID NO: 701 - DNA, 2721 bp, Homo sapiens
ggcacgagaaaaaacttcattggcttgtccgagtgtgaaatgcacatttaggaaggttacatgtcagaccctttgttaaggataacccttggactctggggcatgtggctcttttgtgggaggcaagcacatctgggcttcttgtggaggggaaggtagagtgaaagaaagagggcccactttctaacagggtggagcaaatgagaccaagaaatcattggtaagatgatggttagtctgaccagtttcatgttagtaaattcacttgttcttgggaagcagattaagtagcagaaagtccaggaaagaaagaccagaaggagtaatgagacaagtgatggtggggaagctgaatgttgagggaggtggaggaaggaggagatgagcagtgtcagtaaatactgtgcattcagtagaagttgaagaatcattgttagaagcatttccaaacaaaacactaagcaaaatgggaattaggcttattttgaatgcatctttaacttacgaaagatgtactaattgtgggggtgcctgagtcaggcggagctgacccaggggtgggaacgatggcagctgcccaggacccatgtgcttggcccaggctatgtcctcgtgagaggtactggggtccacggatatgtgttgtggggcagacagtcactgtgggatgtcttcaaagtcagcagttacagaattagtttactttgaattttgttgtctaaatagctcctgctttattttttaaattaaattttttgtttttactatcacaggctggcctaactaatacaaaataagtgatgaacctctggttttaccataatgcaatgtgccacggaaagtttgggggaggtttttaatgtaattgcactctggttaattggctcgtaccaagccctgccttatgacttgtggaaagcttcaaggagttccactgatgcaaaagggtcttttcctagcttcctggtctgatcagtgctatgagatggacagataagtgtgaatgttttatacagaaaatggaaatgatacatttctcttgttaggtgttttcataaaatgtagcattttttttcttatggaaataagagtttcaggtgtctccccacctagggcaaattcatgcacattgtcatgttataccaccattctggaaatgatttctgtggatttgaaattgcacttttaattttatatatgacagcatttaaatgcaaacactaccatgaatttaatgtataaaatgttgtcaaaccaagggaaaaaaccacagttcaccatgtggagtttacttttttttatatgaatgtttgttgtactgtgtctaagcataacttccctaatgtcattacttttacataccagatttgactgaccactaatgtagtactggggataacttaatatcctatgttgtgtcaagactctttgaagactttcttgaattgctttcgtaaaggtctgaacactgttaaggagaaagctgagtatcaacttgcctttctgatagaaatgtttcttgtgccagttttattgttgagatatactatttttttccttttttaattcagttttttaaaaaaacaaatgtattgtggcttccagttaccaggttgtctaggtaatgacagtaaactgactgtagaatgataattgtggtatagtgaccaatagatgccaaacagcttgtggcctcactaaaggtggggtcgcttagtccccgggagtaaaatgagtgacctcagaaacaagaattcctggaaaggcacatgccgaagaggaatatggtataattttaaattttaatgcaaaattttaatttgtctttattttttatcatttgaactgataagcactttttgtgtcaatataaaatatactaaaactgatgaaatgctaagacatgtcttgtgaaggaaggtttcttggagaccacttttatttactcatgagaagtggaagctcctagtatcagaagaagctgatacatagtgtcatgtgctcagtggttgccaaagtctaccaactttggggagctgcagggttctttttgggaggtgggaggaagggagatgagttttgttattttggggttttcaagcattggaaccaaaggccaaataataaacagcctttagtttttaaagtaaaattcattttatttgcagagtacacttgtatggtagactgttaaagacaattttatgactatttatgcacattataatggttacatctgctttttgtctttaaaataaaaaataaaatcagagaaaagcccacctttgaatacgtggctgaagataacagccaagaattggtctttcctaaaaatgcaacagataatgctgctagattgttattttgtttgcacttttttttgattggcattttaaaatcggtatttaaactgaagacattgtcatgttttattaatttaacaaagttgaaagtgactgctctgtacatcatgaccttaacaatgttaatgctgtaagtgaaagttcactgtcgtctgtatactaaatttattggtgtttctaacttaaaagtaagactgcagattatcccccaccagccttagtccaggggtgtggctctgtccgggtgcagtatgcagtcatgtggaaccttgctttctagtcctgggaaaaaagatgtctctaattactggcttcaataaacacgaatccagactgcttaaaaaaaaaaaaaaaaaaa

SEQ ID NO: 702 - DNA, 2626 bp, Homo sapiens
aattcggcacgagaggcagcggcagctccactcagccagtacccaggatacgctggggaaccttcccccagccatggcttccctggggcagatcctcttctggagcataatttagcatcatcattattctggctgaagcaattgcactcatcattggctttggtatttcagggagacactccatcacagtcactactgtcgcctcagctgggaacattggggaggatggaatcctgagctgcacttttgaacctgacatcaaactttctgatatcgtgatacaatggctgaaggaaggtgttttaggcttggtccatgagttcaaagaaggccaaagatgagctgtcggagcaggatgaaatgttcagaggccgggacagcagtgtttgctgatcaagtgatagttggcaatgcctcttttgcggctgaaaaacgtgcaactcacagatgctggcacctacaaatgttatatcatcacttctaaaggcaaggggaatgctaaccttgagtataaaactggagccttcagcatgccggaagtgaatgtggactataatgccagctcagagaccttgcggtgtgaggctccccgatggttcccccagcccacagtggtctgggcatcccaagttgaccagggagccaacttctcggaagtctccaataccagctttgagctgaactctgagaatgtgaccatgaaggttgtgtctgtgctctacaatgttacgatcaacaacacatactcctgtatgattgaaaatgacattgccaaagcaacaggggatatcaaagtgacagaatcggagatcaaaaggcggagtcacctacagctgctaaactcaaaggcttctctgtgtgtctcttctttctttgccatcagctgggcacttctgcctctcagcccttacctgatgctaaaataatgtgccttggccacaaaaaagcatgcaaagtcattgttacaacagggatctacagaactatttcaccaccagatatgacctagttttatatttctgggaggaaatgaattcatatctagaagtctggagtgagcaaacaagagcaagaaacaaaaagaagccaaaagcagaaggctccaatatgaacaagataaatctatcttcaaagacatattagaagttgggaaaataattcatgtgaactagacaagtgtgttaagagtgataagtaaaatgcacgtggagacaagtgcatccccagatctcagggacctccccctgcctgtcacctggggatgagaggacaggatagtgcatgttctttgtctctgaatttttagttatatgtgctgtaatgttgctctgaggaagcccctggaaagtctatcccaacatatccacatcttatattccacaaattaagctgtagtatgtaccctaagacgctgctaatcgactgccacttcgcaactcaggggcggctgcattttagtaatgggtcaaatgattcactttttatgatgcttccaaaggtgccttggcttctcttcccaactgacaaatgccaaaagttgagaaaaatgatcataattttagcataaacagagcaagtcggcgacaccgattttataaataaactgagcaccttctttttaaacaaacaaatgcgggtttatttctcagatgatgttcatcccgtgaatggtccagggaaggacctttcaccttgactatatggcattatgtcatcacaagctctgaggcttctcctttccatcctgcgtggacagctaagacctcagttttcaatagcatctagagcagtgggactcagctggggtgatttcgccccccatctccgggggaatgtctgaagacaattttggttacctcaatgagggagtggaggaggatacagtgctactaccaactagtggataaaggccagggatgctgctcaaccctcctaccatgtacaggacgtctccccattacaactacccaatccgaagtgtcaaactgtgtcaggactaagaacccctggttttgagtagaaaagggcctggaaagaggggagccaacaaatctgtctgcttcctcacattagtcattggcaaataagcattctgtctctttggctgctgcctcagcacagagagccagaactctatcgggcaccaggataacatctctcagtgaacagagttgacaaggcctatgggaaatgcctgatgggattatcttcagcttgttgagcttctaagtttctttcccttcattctaccctgcaagccaagttctgtaagagaaatgcctgagttctagctcaggttttcttactctgaatttagatctccagacccttcctggccacaattcaaattaaggcaacaaacatataccttccatgaagcacacacagacttttgaaagcaaggacaatgactgcttgaattgaggccttgaggaatgaagctttgaaggaaaagaatactttgtttccagcccccttcccacactcttcatgtgttaaccactgccttcctggaccttggagccacggtgactgtattacatgttgttatagaaaactgattttagagttctgatcgttcaagagaatgattaaatatacatttcctaaaaaaaaaaaaaaaaaa

SEQ ID NO: 703 - DNA, 1034 bp, Homo sapiens
  SITE (1): n equals a,t,g, or c
ngtgtatataacatatggatattaaaaatggggaattgcacattttaccttttggacagtaatttctatcacagttagaaggaaatgatagtcaaatacacgtttagattaaaactagtttaaaaaattataaatgaatctaatcaaaatgtgaatagtagtcaaaaggataatttaataagcattttacgttactaaatttgttcatttcaatattaactaaatttccctcatcaaagcaatctttgtgatattacttcgctattaaataaagaaaattggatgcaagacaatggagaaactttaaaactaaacaggaccaccctttattcttaaatttgtgtgtgtccaacagttgaattgaatgtctataaggtctaaaggtagaatgtgaatattgccacagagttcattgctctcagtataagattttactttattaatgcagaaggaatatggatatatttctttaagtctgcagatttttttattatggtgcagcttttttttaattatgtttttaaaattatacagttgaaaaatatgccatttcataaagtctgaggattttcgtcaaccttactgaaacacactggtgctttcatcatcagaggtcaaattattatgataactattccattaagtttgccaaacatttgtcgtggttaccagtgcagcctgtcaaattctgctatttgacacagctttggaaagatttagttcttggtttttccgttttgtattagaatgactgttacagttttatttggctgtttaaagccaaattcagctatttaattatggtttcatggacactgttgagcaatgtacagtgtatggtgtgcttacctgtccactctagagcattgcttacaggttttttgttttttaagatgctgtgctgtaaaatactgtcatacttgctatttcctggtacagtgtagtttttcccctttcatttgaataaaagcatggcaccaaatgactccttttctgtttcttgaataaaatgtagtttttggtaaaattatttg

SEQ ID NO: 704 - DNA, 1589 bp, Homo sapiens
gtcatggggctgtcagctgcatcgcaaatctgtgggctctgcctcctctggctctctcctcattttgcctcacagatatgtcccccagtacacatcttgcccacatctaatcctggctcagtgtctgcgtctcagaggacgtggaccaaggcacttgccgtctcaggcttagttgacccttcaacctcctgagaactctgggcccaggcaaccctagagaactgactcctgtccatgttctcctttctctggaaaccacttagctgcctccgtcatgctctgggcaaaggcagggcaggttgggagaaggaatcagtgaggctgaggccccagcctagaggtcacagggccgcctggcccaggagaaatcccctgcaccaggcatttgcccacatggctacaagtgaacgttgggatacggagtgttcttttttgctatgaaactggagtcatggaggtcctggtcgacattcttccttccaaatacagtggcctggatgggggagggcagtggctatagaggcttcctgcaccgtgtcggggctcttgtccattgcaagctgggaccccaagctacccacatggtgtttggctcccgtctgatagggaaagactttgaagtccacatccaggcataatggatagccaggctgcctaagtggtttgatagatctcccagaaaattcccagatggactctggacgcacagccatgccacagctttcctcctcttgggaacagactaccagtgagaggctttactctgaagccaggtgcaccagggcccctgtgtcttttcctctaaaatctctgcaggtctgcactaagagaaaaatagaaagttcaacttgctaagagccccttttgcttaggaaacttcttttcatggtttttcacttcataaatggacttgattggaatgaacctttgggcaaatgacactgtcaatgggcatcacggccacactctgccttggaaagagtaacacagaggagggttacgcacttacgtcagaagagtagctctgttgagtctatagagatttggccccaggataagggtagcaccttctcttgtccactgtctatgatcaaggtggccagaccaaccctgggggctagaacatggtagaccctactggtgacatctgaaaatggtttggctttacgtagatgaaggaaaagtatgtgcaaagaccttgcccattctgtctcactttttaagagtcaatatgcaatctggaggcaaagatagacaaaccaactgatgtggtttggctgtgtccccacccaaatctcatcttgaattgtagctcccataattccgtgatgtgggagggacctggtgggagataattgaatcatgggggcagtttccccccatactgttcttgtggtagtgaataagtctcaagaggtctgatggtttagaaggggaaaccattttcacttggttctcattctctctcttgcctgccatcatgaagacgtgccttctgccatgattgtgaagttccagccacgtggaactgtgagtccattaaacctctttttctttataaattaaaaaaaaaaaaaaaaaaaactcga

SEQ ID NO: 705 - DNA, 3161 bp, Homo sapiens
ggcacgagtttctctgttagtattgcacgacataagcaccagagagatgacttttttcctcctttggttcatttgtattttacttgtcctattccaaaagaacagtattgaaatgagacacaggtatcaataaggaaaatttccagagccagaagaaggaaggaactgtcagggaacaattagtgtgatgggaaactatgttatgcttcctcagaaagtatgacaaatatgttacatttacttgagtttctggaaactgcacatgagggatatagcattaatttcctttgtcttgttggtatctgttttaccattcatgaagaaagaaaaaaaatgagagaaaataaaaggtctcagaactcacagagtaaagatatttttctaattgaaagtcaaacttcagagttgtaattctctgttaaagtgggttttggttaaaaattattttctgtaaactaattttataggctattcctatctgtctgttcattagcacagttttggggtcagcaaattattccttatagtttaaaaatattttttataatctttgaaattaacaaacttttatttgatagctattttaagaagttgttacaggtgtaagactttttcttctctaacaaagatgtgcgctgatagagctgaaacacaatatctatgtaaaataaccatggtgcccttcaaggaaacctttgtgccctggcagataaagtgttgtggcatgtcacatatgggaaggggtagggaaaagattccatgtgagtattttgacgtaaagctggtgcatttgagaattcaacaggctgagacatagaaacattgtatcagagtagggtgaacgaatggcttaactcacggaaagcagaccatttggatagcttggggagaaaacagaagtagtgtgagaaatggtggaaaggacactagaaatacttgaggagtttctaactatattctattgagtaaaaacaagacaaaagccatccttgatttgtcaaaagtgataaaaatggtgtaacaagtaaataggattttcctgctgggtttggggtaaacttggaaaaaaaactgatcaatttgtctttttgagccatgtgtttaaaattaagtggaggatcagaagcaataaatatggattaattgactccattcagattgccacttcactgttttatgatagactactgggaatagcaaataataagaaacttaatgtagatttgtttaaaaaatttgttactactgttgtttcaatgtcaagtttattttgcttgttgatgaaactggtcttttatcacataactctaggtcataaaagtatagtttgaatttccaacatttctaatgtttctttttcttttgaaaaataatcaaagaaaaagttctgctatgttctggttacttctgtatgaatctcatagcaatcatgattttccattgtgtttacagaactttcattgtgttttatcgtaaaggaatgaaagaatggattattttttcttttttgtctcaatggagtggtctacattttaaaggtttattttacaaaaggatacttgttacatattaggtttcatcaaaagaagttcaatactaaagataaagagttttccttattgaaatatatattgtaagcttttaaaccaaatgaaagtatgagtggtcatatttatactgtagtaggttttcataatagattttccagattaaaaccatttgtgaaatcatcaaagagatgttaatcctgctttagcattgatgcaaagttaaaataactgacattaaaaaaatcatttgggaagctttattgaatatattgagataagggttaatggagtccttctcttcatgcatactgtggtaccaattccaggagggttcaaaatccatgtgaatgaccccattcacccttaaactgtccaattcctggcctaattcaccttcactctgctgtagctaccagttgcaggactagctgcattttggccagactgctcaccctggaaattttaaccactctctctcttctgattgccctctttttctggttccatctcagctttattccctctgcattgttctttatctttggagctctctaaatcccttaaattcattgggtataggattctgtcatcttcatctttgtaatatcagtgcctagactaagcctggcgtataataggcactcagagatttgaagaataaatggctaaatgactgtatcaaatacttgcccattgtttgctgtttctgaattgtacaaggccatcatgataattgatgatcttaataatgtgagatatgattctctttccttagtaagagagccatcagtttattggatgatagttatatggaaaaggaagaaatgctactgtgataaatatttataattttaaccaagtggtaagtagaattaatgataaataacttacttattgaaggttttcaaaaaattagatgcatcagggtcttacctacatgtcttatgtatttttattcaaaatttttagaaatgaggaaacaggttaagtaaccttttctttatctttaaacaggctaaggatattaagccagtactaacaaacttaaggaccaaactcgtcaatatgtaagatactagaaaaattaatcagaatatattttgaatatcttgtggaagcttctcaaaggatattacattgagcatcataggctggcatgttatttcatgttttaagtaaggcatttgtaagttgtccatttaaatatatttattttagaaagcaaatatatttgtcctgtgaagagcatccttattttgagggatagcttcttgctgttaataaacttcgtagataacatgttggaaagaataccacaggccgggctcagttgctcacgcctgtaatcccagcactttgggaggccgaggtgggcagatcacttgaggtcaggagttccaaaccagcctggccaacatggagaaaccccttctctactaaagtacaaaaattagccaggtgtggtggcatacaccctctggaggctgagacacgagaatcgcttgaacccatgaggtggaggttgctgttagcctagaatagggccactgcattccagcctgggcaatagagtgagactctgtatcaaaaaaaaaaaaaaaaaaaaaaaaa

SEQ ID NO: 706 - DNA, 1409 bp, Homo sapiens
ggcaccaggacacccaggcctgcatgactcagtgagtttcgcgtgccagcgcacacctccacttgttatataacctgtttgtgtaagttcatacttggctctgagccactattgtctgtaaaaggtataactgtcctggtgatgctgtacagaggctcttggctcttggggctcagctttgcctcaacgtggcttcacgtggcgggcaccctggtgcccagagagagaaccagagctgtccgtcctgcagatggacacaggggagccacagcacggctcgcgctggtgcccagagagagaaagagtgaagctgctgaccctgaaggcaaggcagagtctgccatgcagctgcagatgtcggggtgacaggagccgcagagccggagcaaacggctgagataagagcggacagcgtgagagaagctgcccatgaaagcgctggtgtgaaaaagctgktaatgaaagcggctgctgaataaaaccatattcacctgcctagagctccccaagcgttctttccgctcatccacccactcccctcggaccgcagcatgggctggacctggaccccaggatctgaaaaatgtatttgttgaagaaatacaatttttgtcctgtagaacctgcaatttgctaattgcatttatgtggtatctttgaacatgtctctgtcctctgtatttctggtagttagatctcgggtccaatgtctttgtcaagaatacttcccagatggtgtgtgtacctcagctgcaggacccttatgcttggttgttgcccatcattaccataggttatttcatcagaggtggcaaaatggtgattttctaatttttaattcattttttcctttattttgtttgctggaatacttctataaagagaaactttccctcatcaactatttgatgatgtaaggtgcagtttatataaagccagatacatgctggattcttttcccttactgaccagtttttaaaacgagttggtttcctagtctcctgcaaccagtgattttgatacagaatggttgggctcctggctaaaccccacccttgggcctggagccgcagccctaagtgaaaacagctgaccccgttttccacccaaatgttgcctttttggcctgccatgcccctatcctgtgcccataaaaagacttcagctggcagagcaacacaagcggctgatgcaaggggtcggggatgcaagctgctgaacgtaggggatgcaagcggctgagcatcagagactacagatagacgcagctaacctcagacggtgcagcttcagggaaagatcaccttcttcccgcaccatcccctttccaattccccattctgctgagagccacatccatcgaccaataaaatcctctgcatacactaaaaaaaaaaaaaaaaaaactc

SEQ ID NO: 707 - DNA, 1931 bp, Homo sapiens
  SITE (6): n equals a,t,g, or c
  SITE (184): n equals a,t,g, or c
ccaggngcaagctttggtgaatccagtgggctgagtggctctatggatgtggttgtttggatgtggtagggagtgcttagcagaatgtgtgtgtatctctgaggctgtcagggggtgggtgggtgtgtgtctctgttggacctgtctctcctcagtctattcctgtcatagatgtgggtgtccntkgtagggaagtgcctgtgtggtctgtttacagtgcagaaggcggctcagcagtgcaatgggctgacagccttggaccgggagtcagaagcctgggttctggttgtagctctggcccctccctgtgatcttcaacaagccacttgctttctctcgtcttcagtttcctcaactagaaaatgaacagcagctgaaattatgttgaagatccttttatacctgaaagagtttcttcatagaaatttctgtggtggggagggggcaatctckgkgtgtctcagtatacctaaaggttggggtgggrcggagttgtgtgtctctgtagaaaggcgaaggggcagttcctatcaggactgtgtatgtctgagcacatgtggctctgtttgggattacgtgtttgtctgtgaatgtgtgtgtgtgttggagggttgtctattgtgtgtggctgtatagggtgtctgtagatcaagatgtgtatacagctgcttctgctattgctggtttgggggaggggactggaaagctgagactgaaaatcaagagggaagaggtgaggaaggcccacccctggggctgggcagtgtagacctgccaccgtgtgaagaaaaatgaaagcacagatagcctaagactgcacaggcctgtgcccacataccttatagcacaggcccaggtggatcatctcatgctaacaccccacatgtgctggtggatccactcccatggatccactcacatgctgcaggcatgcagtagactcacccacagcccactctctggacaccaatcctgggaggtgggagctggaatggggagcaatgagaggagggagtgagactgttggcttaggaagggtggtacctctccctgcatcatacccaggaacttccagctccaaaatattggggtacagctcaccaccccccactccgccaacccattcctacctcctctagtgcagggacccaagttagatgatgagaaaatgccaaacaaagggaggcaaggacagagaaggtacctgcaggacccacaaggcccatactggcccccatctgaacccacctctcccacccagatcaacatccccccaacccctgtgcccccatcatctggaccccagagccagccctcccactaccaccaccaccaccccggggctccttggctcacctttctagaacatgggtacctcctctttttgggggctcatttagactgctgcctttgctgctgacttgcagtgtgactcgggcccattgttcaatctctgtggccctgagacaccagggaaaatctccccccccacaggacatactagttccctggcaggcaagggcttccaactgaggcagtgcatgtgtggcagagagaggcaggaagctggcagtggcagcttctgtgtctagggaggggtgtggctccctccttccctgtctgggaggttggagggaagaatctaggccttagcttgccctcctgccacccttccccttgtagatactgccttaacactccctcctctctcagctgtggctgccacccagccaggtttctccgtgctcactaatttatttccaggaaggtgtgtggaagacatgagccgtgtataatattttttttaacattttcattgcagtattgaccatcatccttggttgtgtatcgtgtaacacaaataatgatattaaaagcatcaaacaagccaaaaaaaaaaaaaaaaaaaaaaaaaaaaaaaaaaaactcga

SEQ ID NO: 708 - DNA, 2128 bp, Homo sapiens
  SITE (2095): n equals a,t,g, or c
  SITE (2121): n equals a,t,g, or c
gggaaaccagggagcaaagtctccagggtgcttgggcaagaccccagatggtctgcagcaacgcacgggcaacacgggatgatcagcgctacgtggtgagaaacttacctccttttgcaggacaacattttccagtccttctgagtaaatcaaagagaagtctcagcttggtgattgcaggtctctaatgcttatttctctgtctctgtctctgtctcttttaacaaaagtctaccagcggcctcaggctcagggcctgtctcaggtaaaagcgggttagggtgtaataacagtgatcggtttcattgtgtttatttttatagctactttctaattatagcaagtgattctgagtttccatttaggatagtaataggaagtttctttttcaagtaaatgtgcataagtaaaaggagactgctcaaaggaaaacagctggtgattgatagaacaggctgtggcattgttgggccccagagggaagggctgtgtgagcatgcaggaaattctgggaaggcagctaaatgcagttgctgcatgggggccaggaagcatttggagacgtggctgggcacagcttggcttttgagcccaagagaggcctgctggggatgtgttgggagccaacctacccctaccagcaggtggaactggttttgccactccaaaacagagttccagctatggggacagccactagagagcagagctaagggcattctaggccaaggggtcacagtccaccctgaactgtgcctcccagcctgaagccagaaagctcagggaggctagcggccctgcccaggcctcagcactgaccctgcacccctaggcccagctggatgacccctaagagcttcctggaatttggatgcagggttattctgtgtgtgctgcctctcagagcatgtcactttgacgtggacatctcgggtctggttctggtgctgtccctgtctcgccacgtgaccctggataagtcatctctccaggccttgatttccccatctgtaaacagaggaacccaaggaacgagtgggctctaactgctgcagcatatgggagatgccaggaggagctggctgtggcaggccatcccagtccatcagacaacttgtagtggatgaagatgcagtgtccatggccagaagaaactcccgtggatgctcaggccaaggctgccagaagcacgaggaggggcagcattgagtgtcatcgggaaaaggcaaagtgatggtcctgaagctgccccatgtggccagtccctttttgggaagcctgaataaatccatttcctgtgcactgtgtgggaagccaacccctcttcagagcacctctgaactcaacaggatcctacacttcttataggcctggcttgatgctgacatccttcagccccagggaagacctaaagatctccaggtcttgaggcacctggaacacctccacctgagaccactttaacatgatttctctgcttgagggattttggaccatgctgtgtgtattcagccctaaaacatgggcgagtgcccgcttgcagttcaaattctcagaggaagttccctgtactccacccagtgccaagtttagtttgtgcaaatttccttaatgtcccctcctgtacaacaggcttatttggtgttaaccctcatatcgggggtctaactctttggttttccagcttttgtgctggaatatcccattaaactgtccatgttgggtattttttctttgttagtaaacatttgttgcatattgttgatagcattttagatttgaagaaataactgacaaaatcaatatcatctgtttcatcattacaaatagactcatagctctttaatttttccatttaacactttaattttccataggcctagattttcaagaagtccaatatctctcacttgaagtgtcttttccctggagtagattgggagatttgagggatatctgtccaaagatgagacagtctgtttctagtttcccatccagcctgatggggcgtctacagtttttaccacaaggtgtcgctgttgaacagattctggtgcagtctagtgcataagctgtccacttctaagaagtgatnacttgccgggccaaagttcctctccntaagtgg

SEQ ID NO: 709 - DNA, 2283 bp, Homo sapiens
  SITE (29): n equals a,t,g, or c
aaccttaaggccaaaatcaggggcaaccngatagagaaggggaagaaaatttgagattccatttccagaagttgacaggacttggtgattaagcctaatcccaacagagaaaaggaaaagtcaaagatgccttcccatagtttcctagtttaggaaatcagtgatgacatcaattgagctaatgcaagaacaggtgaagtgagaagattaacaattcctgtgctgaagataatgaagttcaaatacctctggaggcagggcaagttacccaacaagaagtcaggctatttaagtttgaatttcaacaacagggtcgagaatgggagcacatgaacactattactcagaagagagaattttaaacctgtggacacagtcttaccctcgatgcaatttcactccatcttgaggcaactgtcaagagttgaccagttccatttactctcatagttgtaaaaattccacaaaattgttaaagtctctgtaagcgataactttaaacagtcagagcttttgtcttgttctgagtcatttttcccctttcctctttgtatgccattctttctgtcaaactatctagttaaggaagatatgtgaggtataaggatgcataatataaaaaaatttttgctattcttattaaacattttgtcttaattgtaaaggtaaagaaaagaacattcgactattctaactttaggaaaacctaagttaaataatgatttacctatgtgactcyccactaattttctctkgcaaatcatcaccccttaattaactgacayccccaaggcagtcaactcaagctgtagctttaaccacagaggttaaacaattcacagtcctgttgttgctgtcagaaacccaagttacactgtacctttgtctaatcaatggtgccctagtttggtgggagatggagaggaagggacctgttggcaaggaaacagctgcttccttcctgaacaagggaaaaccagtaaggtgacagatgggcagagcagaaaagtagccaaaaattgctgtggctcctgtttggcaataatttctggaactgaggcacaactgaatattttaaagtatatcaacaattgagagagtattgtttacctgagtgcgccaaagttcaacaagccttcccacacgtttcccacatttgaaaaacttttaagtttgcagtagtacaaagagcttagccttagcctatgtacagtgggcaaagactgcaaggcactgtcccatttcactttaggattacacccaagcaaatgcactttccggttaaaaaaaaaaaggaaaaaattttattttctctatagtagttatagttgtatgactgactagaattactattaaaatctcattaaaaakgtttttcttaaaagtttacttttatatacttaatttgaaaagatttgttcaaacttttataatttgttctttaatcattccccctccsatccacttcagtacccagaaaactaaatatccaagaattcctgggtaaaacagacaaccactagatagatataactaacgtatttttttaagctgtatagttcttcatcaaatggaaatcggcaaccactgaaaataacattaaaaattagtgtgggcatgaagtatggaattttaaacatcagtttactatgctgattaagtcaacatttatattttcatcagaacttaataatcccataaataaatagagctctcagttatttaaaaaaatcaagggataacatatgtatttagacatattagcagcgtaaagatgtatgcttcaacacacttattggggaaacgtctgaaaatattactacactgaattcaagggtatccaaaggaacctgacatagaagttctctagaataacatcatttcagggaatttcaaaaaagaaaaggggtcaaataggaaatagcctcaaattaattgacaaagttcagtgtttgccccaactagattattctctctctccactgcaaaaagaaagtctcaggatgagtgaatcacttagacgaaagttcatctagtggaataaatggagaagccgcttgggcaggtgacacaggagagtcggtggtagtgctgactttcgctggtgagttacaagaagatccggcactgctgctgtttccatcaagggtatccgaagatacacacacaccaggatctgacagctgtgcaacgtcagaagaaagcatgttggtgatgccctggaaaaatctctttggctgatattcagtttccatttcacattttcttttcactcgtgccgaa

SEQ ID NO: 710 - DNA, 2742 bp, Homo sapiens
  SITE (778): n equals a,t,g, or c
  SITE (780): n equals a,t,g, or c
  SITE (863): n equals a,t,g, or c
ggcacgaggggaaattctatttttaaatacatgctactttaaataaatgttacttcatcatttgcaaatgactattcaatcaacatgtataaaagttgtggatttctttgcttttatgacaaaagtggtattgtatttttaaactgatcactttattaggtcagagagggtatagttcaaagtgtaattatttattgttaaattgtatatttacaaacattttagttttgaaccattagatatttatgtaatttaagtatgaaagtttaaaaatggttcatataataataggcatgtgataaaatgtcatgataaaagacagccaaataaatattatttcatcctacttagaaagaataattttccagagggaactttactcagttttagagagaaatccaagaatagtgttcttctttcatttttcaacatgatataatcagagaatttggaaaactggtaaatataacctatagtaaaatggtcaggaaaaatactcatttccatttatgataactgaagtgacaaaaagactcctagaagttacattttccctttgtggtatattaaagaacaatgaatataccacactttattctaaaaaggacttttggtgtgaatgtaaaggataatgatcagatttaagtttctttctacaaccacttctaattctattcacgtgatctatttaaaaattccttacttcaacatatttaaatgttgtagccattttgaaacattttagtccctcaagatacagaaatatacaaaaaacatncnagtttcagatccagaattcagtttctccctaaagggaaattcatcatccaatcttctggcgttctttaaactagacactaganccttttcatctagatattgcatatctcatatatattatacatgcatacatgttatgttgttatgcgttgttatttttaaaatccagtatcagtagtaacatatcaaaaaggaatttctaatattccaaggttctcatgttagaatagaaacatattcacaatagtgtttaccagtttcatatatttagagtagtttcacactaaaatgagtgattaggctaggcacggtggctcatacctgtaatcctcgtactttgggaggccaaacaggggggcttgcttgagctcaggagttccagaccagcctggggaacatagtgagaccctgtctctacaaaaaacatttttttttttaaattagctcctcacagtgacacgtgcacctataattccagctacaggggaaactgaagtgggagtatgacttgagctgaggagttagaggcttcagtgagccatggtggcaccactgcactctatcctgggtggcagagtgagagcctgttgcaaattaaaataagtgattaggacaaaaaagatatagggccaaataaatagaatgcttacccacctcaaataaaaagaaaataatatttgttaatatgaaggtgatactggataagtgaagtgcctaggacttttttcttaaataatctagtatattttatgtgaataagggactataaagtagggagatcagcaggactgtaaaagtgggtgtgggagaagaaagtttgctagtcaaacttggtttaaattgactgcctttgtaatagcatgtggctgaatgttttgatctatttataatgaatattttaaggatttgctaatttttgaaaattggcaagaaatactcatttttttcctgtcttgaggtatgccaaaaataaaacttgctagaataaaaaaaaatgaaagtgaaggaatgtcttgtgtgtgctaaaacacctccacttaaagagtttgatatccactagaaaatgttgtttctttaaaaaggggacaaagggcatttgatgcttctcacctttcacggttgtgacaattctcttagacatcttaaattctctaagtggagatttcttatattcttcacagtacacctgtttaaaaattgtagtccacagaaatctgaaactacaaaagaaacttttctcaagatgataactcacaaggagtgtaaattacagttacttcatttgtgggagttttcctatcacttttcaattaataagacaccctggttatgggaattttagtctcactgaaaaactcaatttttctatgcaaattaaatttgcgtatgcaagttacaatttgagtttaagcttgggcctacgctgatggaaggataacaggcaaactggaatgtggtacttgaccatacttagtcagtgcaggaaaaacaacaaaaaaatcttcagaaactttcttaccattgacaggggctagtgtcgatattccttgtggttttcccttattgactgtatctacgccatcacatagcaaaatgtacacaacagcagaaagtagacattttactcatagtttctgcaaaatctgaataaagataaagtttttctattataaataatgccaaagatgtggtcttatagatgtatgcattctaaggatcagggaaaggctgtgaaataaaactctaagttgaacaaaattcaagtagtttatcttttaacagaaatatctccataaaccatatcgatataaaggtgaacaggggttggacacagtggctgaaagcccataattccagtgttttgggaggccaaaatgggaggatggcttgagaataggagttggagaccagcctgggcaacatagaaagacctcatctctacaaaaaaaaaaaaaaaaaaaa

SEQ ID NO: 711 - DNA, 1294 bp, Homo sapiens
caaatatgtattggtggccctttatatttccgatatttcttgcagcaacagaaatttgcccttcattcagtggagataacttcagtgtgttctccaagagtagtatataagaagacacagcacataaaagaaaagatgagtgtgctaaatgagttcataaattacagatattcaaatgattgaaactaaatcatctatatattgactctaaaattgtaggactatcagaatattttaataaataatatatgtgaaaatctatgtacaaaagatatccaataatttcatgtataagaacatttgtttatttaatctagcagggttttattcattttgataaaatatctctgtaacaattaattgatatacattagttttatacaagtatatgttagtttataagatacataatacatttggtcacaccatgtaactttcattttaaaatacttagcatcttctctttgttttgtctttgcataaaatgttcatgtaactatagttaatcatgtacattagttgagatatcttgtttctagttaaatcattctttagttcattaaagtaaaagagattttagttgtgcccaatggaaaaggaggaaagaaggatcttgtttagttacgttgcctaagaggaagtagtagcttctgtggctgctgctataactaagaatatcctagaatttaagttgttgccatagaaatttattgtttaaccatttttacatgcttacccaagaggagactgaaatagttaatataacattaacataacaagattctttgtcttaacagtatttatattatatgtacttagaattgtcagaaattttaatgtgttaaagttatattggtgattataaagacagtttgttaatttagctttttcggatttctaatgttatttagtaggtagagagaggtagatgaatttgcaagggtgaacatggaagttctgtttataatgtgttagtgtaatattgaaaatagtggtttctaattcagcagtcctgctaatttataaatcttatttttatttgtatacttatttaaagaaaaatggaaatataaaatgtgctaaatatttaattttagcatgtgttaacttttgatacattttctctattattgaaatctattcatttaatctaagagatgaactctgcatgatatcaacagatatagcacatgcatactgaagatttttaagttacatgatttgctttaacatggccctgaaccataaagagggctaaattaaatacctttcttataaaaaaaaaaaaaaaaaa

SEQ ID NO: 712 - DNA, 930 bp, Homo sapiens
ggcacgaggttactcagcagtttgtgcctcctacacagtcaaagaaagagaaaaaagataaagtagaaaaagaaaaaagtgaaaaggaaacaactagcaaaaagaatagccataagaaaaccaggccaagattgaaaaatgtggatcggagtagtgctcagcatttggaagttactgttggagatctgacagtcattattacagactttaaggagaaaacaaagtcaccgcctgcatctagtgctgcttctgcagatcaacacagtcaaagcggctctagctctgataacacagagagaggaatgtccaggtcatcttcacccagaggagaagcctcatcattgaatggagaatctcattaaagtttattttctccaatttcttagtcacttctgtcctaccatgcaaatacacagattatgccaagaggtaccacattttcatgacagatacattcatgcacaatccataatttgagttttacataaaatagaaatttgttagaatttgttagattttattgcaatgatgcctaccaaacatttccagacttaacattttggtctctgcagttaagtgccatgaaaatgtggttgaattattcattatgcagtgttattggtaagtgtattttcacttttagtttagtgaattctaacacataattcttgaattctctactattggcatgtaacgaatttaaattttttataacatagtgcaagctgcctaaatatgtattatttgagaattgtgaaacagatagttatatgtatacaagtcaaagaacaacttaactattgctgcaacaggtttttcttaatggttatcctcttaaatacacctgctggtacttggtgtggttaaataggaaaattgttattaaataaagaatttgtatgaacttttaaaaaaaaaaaaaaaaaaaaa

SEQ ID NO: 713 - DNA, 1393 bp, Homo sapiens
ggcacgagcaaccgtgggcgagctctgggtgtgcgggcggcctggcgcggcgctccgctgtgtcagcgtgttatgatgccgtcccgtaccaacctggctactggaatccccagtagtaaagtgaaatattcaaggctctccagcacagacgatggctacattgaccttcagtttaagaaaacccctccaaagatcccttataaggccatcgcgcttgccactgtgctgtttttgattggcgcctttctcattattataggctccctcctgctgtcaggctacatcagcaaagggggggcagaccgggccgttccagtgctgatcattggcattctggtgttcctacccggattttaccacctgcgcatcgcttactatgcatccaaaggctaccgtggttactcctatgatgacattccagactttgatgactagcacccaccccatagctgaggaggagtcacagtggaactgtcccagctttaagatatctagcaaaaactatagctgaggactaaggaattctgcagcttgcaaatgtttaaaaaaataatggccaaatttttggggtcctccccaaaaatgttaagtgaacctacagttagctaattaggacaagctctatttttcatccctgggccctgacaagtttttccacaggaatatgtatcatggaagaatagaggttatcctgtaatggaaaagtgttgcctgccaccaccctctgtagagctgagcatttcttttaaatagtcttcattgccaatttgttcttgtagcaaatggaacaatgtggtatggctaatttcttattattaagtaatttattttaaaaatatctgagtatattatcctgtacacttatccctaccttcatgttcccagtggaagaccttagtaaaatcaaagatcagtgagttcatctgtaatattttttttacttgctttcttactgacagcaaccaggaatttttttatcctgcagagcaagttttcaaaatgtaaatacttcctctgtttaacagtccttggaccattctgatccagttcaccagtaggttggacagcatataatttgcatcattttgtcccttgtaaatcaagatgttctgcagattattcctttaacggccggacttttggctgtttcctaatgaaacatgtagtggttattatttagagtttatagccgtattgctagcaccttgtagtatgtcatcattctgctcatgattccaaggatcagcctggatgcctagaggactagatcaccttagtttgattctattttttagcttgcaaaaagtgacttatattccaaagaaattaaaatgttgaaatccaaatcctagaaataaaatgagttaacttcaaaaaaaaaaaaaaaaaaaaa

SEQ ID NO: 714 - DNA, 1913 bp, Homo sapiens
aaaaacttggagtcctttttgatttatctctgtctctcacaccccacatcccatccatcagcaaatatttgcatcatgtctcactggatactgcaaccatctccttgctgatctcactgcttttcagcctatttcacaacccagcggttgaaatagttcttttaaaacataggtcagatcatgtcatttctcaaacctaccaaatacttccatttcactcagagtaaaatacaaagtccttataatggccatacacaatctgccccctccccatctccttacccatctcacttcatgtcctgctattttctcctttgtttgtctctgctgcagccacactggccttcttactgttctataaatatgccaggcactttcctgcctcagggtctatgtacttcccatgctttctgctcttccagatttctgcagagctcatttcctacctcctttatgtctttacttgttcatcttctcatgcgactttcctaccatgtttaattgcaaactcctgcccccaacactccatgtctctctttctaccttatttttctccatcatgcttatcactcaccaacagacctcacttatttggtttattgtctgtctgcccctactgacagacagttcttttatctattttgctcattgctatatacttagcacctagatagtgcctggcacatacttggtgcttcaaatacacttgctgaataaagtatgggcatgctatgaaaaggcatagataggtaaggacttttgggtccagattgtgagaaagtcattggcaccaagatgttttcactcaattttctgagtcctattacagaatcctggccaaaagtataatacaccaaagaaccagaattatcataggtgaagtaaaccaggccaattgttttctagatcctcttaggtatttttgtgaattatacatgttatgggaaattttaaacttgtctatactaaagcaaattagaatgctttgataaagcttattttggatttctcagtgcttctccttggtcacaaaatatggcaaggggttctagaaatagatttagtgggggaaggaaagaaactaacatggaatcgagtgacttctaaatttctaaaccccttacatctcatttaaacttttgacaacttttgagtcaagaaacattattccagctatgaatatatacaaattgaggttcgggcctggtgaaatgactcatgctggtaatctcagcactttgggaggccaaggcaagaggacggcttgagcccaggattttgagaccagcataggcaacacagcaagactctctctctacaaaaaattaaaaatttatctgggcatggtgacacacacctgtaatctcagctactcaagacgctgatctgggaggatcacttgagcctaagaaatcaaggctgcagtgagtcatgattgtgccacagcactccagcctgggtgacagagcaagaccttgtctcaaaaaacaaaaaaaaatcaaactgaggttcagagagaaatattaatttctccaattttgcacagccagcaaatggcaggcttagaattccatccactagctaactgagtagtataggacctagaccaagcttgtccaacccacggcccacagactgcatgtggtccaggacatctttgaatatggcctagaacaaatctgtaaactttcttaaacattatgagattgttttgcgattttttttaagctcatcagctatcattggtgttagtgtattttatgtgtggcccaagacaatttttcttccaatgtggcccagggaagccttgaacaccctgacttagactttatagctaatagcttgacaaattaggtgacttaggagaaatcatttaatatttgtctcagttgtctgccaaaaaaaaaaaaaaa

SEQ ID NO: 715 - DNA, 2502 bp, Homo sapiens
  SITE (52): n equals a,t,g, or c
ggcacagtgggccggggggccggcggcggggaggccggggcctgcaggcccnggtacgacaagatccggactccggcccggactacgaggcgctgccggctggagccactgtcaccacgcacatggtggcaggcgccgtggcagggatcctggagcactgcgtgatgtaccccatcgactgcgtcaagacccggatgcagagtctacagcctgacccagctgcccgctatcgcaatgtgttggaggccctctggaggattataagaacggagggcctatggaggcccatgagggggctgaacgtcacagcaacaggcgcagggcctgcccacgccctttattttgcctgctacgaaaagttaaaaaagacattgagtgatgtaatccaccctgggggcaatagccatattgccaatggtattgagccttcctgtgctggttcccccactttcccaactctttgggctttgctgctgtcagtgctttccagtctcagcatggtttggagctgaagctttgggctgggataggccagattataagggagggacttccaaacctgatgttctcagacaacgggccgcttcaaccctgccttttcctttggggcacctcaacaaagggttacagtatcctcccttacctaccagcttgacttgttcctctcatctccctggcatcaacttctaatgccctggtaatgtggagacacactgaactacccccagtctatgtttgacagttgggtggtgtcctgctccttagggcaggattggaggcgacccagccagccacccaaggaagatactaatgaagcccctgctttttgcctcaccttttcaggatcccaactcaccakaggcagtttgtgttgagaacatgacaaagcctcatgacaaaatgaatgggggtggggccaaggaactgcatgaagaaaccagaaggttgtgtggaagtaagagaaaggatagcagcctagggctttaggaccggctggaaaccaagttgagtgtggagaggatgaggggtagagtagttcaggacctgaacgaaagatctttgtagacaaatgttaggctctgcaaatgggttctgcggcaggactgaggtgggattctgtggtgaggttctgtgagatctgaccacctggcccccgtatctccctccactggtggcaggtgatgtgctggcatccctaggcagcagtgtatctgcttcctgtctggggtgtgagctgcatttattctcagaatgatctttattgataagacttgagctggccttcctatcatggatgtggaatacattagtgaccttacaaagttggtgggaacagatactttaccttcttaaacaggagtttaggagcagtgggtccccatcttttggactagctcttaacgttacttttccccgctgtagtgtagcacagccactccccttcactgggggacctcagtgagttggtcagctctcttggccttacatgtggcagttgttttcttgtttgcaggtgcggccgggtgtgtggcaacattacttcatgatgcagccatgaaccctgcggaagtggtcaagcagaggatgcagatgtacaactcaccataccaccgggtgacagactgtgtacgggcagtgtggcaaaatgaaggggccggggccttttaccgcagctacaccacccagctgaccatgaacgttcctttccaagccattcacttcatgacctatgaattcctgcaggagcactttaacccccagagacggtacaacccaagctcccacgtcctctctggagcttgcgcaggagctgtagctgccgcagccacaaccccactggacgtttgcaaaacactgctcaacacccaggagtccttggctttgaactcacacattacaggacatatcacaggcatggctagtgccttcaggacggtatatcaagtaggtggggtgaccgcctatttccgaggggtgcaggccagagtaatttaccagatcccctccacagccatcgcatggtctgtgtatgagttcttcaaatacctaatcactaaaaggcaagaagagtggagggctggcaagtgaagtagcactgaacgaagccaggggttcagatgacactgctgcatcctggtcacattctctgtctcctggaatgctcccacctcaagtggagttagaaggaaggtagaggggctctcccccaggattttggtgttttgactaacaccagttcctgccaacctctgttgccaccacctttccttccaggccctaagcacgtgcagcaaagcacaccacagcacctttgataacctctctccatcctgggcctgatgacctgctctagactgttatagagggataagcagctcattcccctggttcctaataaaaagcctttaaattaaaaaaaaaaaaaaaagggcggccgctctagaggatccaagcttacgtacgcgtgcatgcgacgtcatagctcttctatagtgtcaccta

SEQ ID NO: 716 - DNA, 1276 bp, Homo sapiens
  SITE (788): n equals a,t,g, or c
ctgcaggaattcggcacgagtaaagacctgatctccaaataaggtcatattctaaggtgctgaggtttaggacttcaacatatgaatttgggagggaacacaattgagtagcagagtctgaaacagcactataaagaagatagaattatatgtatcattgccctcaaatttamcaagcactgctaacaatattattttttaggtttattgatataagtggaagatcaatttatgaccaatgattttcccacttcaagaatttagtctgtttggacaatggtggctgcaagtattcttagaaggtattatttttatccccactattttgttgtatgtgcatacctgtgttcctagcaactcacattccatctaattataacattcctgttacggctgataacaaatgtttctcagaagacttaaaattgtaacagtttaaattgtaagataaccttagaaagcatctggtctaaaccctccagttttctaagtttcttgcagaaatagaaatgtggatagctatgaggccaagtacatataaccagttatgtctcatgggagtgggatccaggttatctggtttactgtctagtgatgtttccattacatcatgttacataaacctaacctttctccctgggatgttttttgtgactacttcacctaacaattaacctagttgttgataattttgtttttatgctttttatacatctagctccaggaattggatttttggaaaaacaccttaagtaatgccttggtttgtttgttttcttttaatstanttggctgctwtrcatttggatcaagtgttagtaattgaaaagattgctgggattacaggcctgagsccaccacgcccggccagtctttatttttaacttaaagaacttcagaaaaacaaacctacctaaaaaaattaacactcctggttttgttttgttttttgttttgttttacttcagagacagacattttcactgtatacttgtgacttgcaccacaattcaagtctgagattacctaactgatgatgtttattaacacttcagtagaattcttcgcagcagtgaacagtagtgacaggtcattatgtttttcttgctgttttaaatcttcatcttacaatgagttattttgaaattccaaaacatttccctgtattccagaaattgaaaatggttgttcactaaaaagcctcttcttttcctgcttataaatttgccaattttgccattttaaatcacctttcttacgtttctctgaattgtat

SEQ ID NO: 717 - DNA, 1279 bp, Homo sapiens
aagcacactgccacaaattttgtctatttcatatttgtcccctagagccagccctagcaaatgtgtgagttgggagtagttaatagtaaataagactctgactttacacaagctacacattttatacttttcataaaccacaaagtctctctagaattttttctgccttcactaaaattggactgtagccaagatataaagcaagtcatttggaacctgccgagtgagcactgaagctactttatcatgagatgtgtgttaagaaggctgcagcccacaggagtccagggaaggcggggaccacagaggcacagagtccagcacttggccgctcatgggccttctttctgcctcagaggacgggggcagagaagtgatgaagggaaatgttcttagaggaggaaatatcctttgtcctgttcagagagaccagggccctaccattaggcatactttcagaagcaacctggagaacagctatcaatcatattcaaaaccagtacaagaactgctgcctggtaccctgtgagtcatttctatgaaattccatataaagaatgatgataagtttacacactgtgcaatctcacaatctgaaaataaagttgagttggctgtgttttctctgctcttgtcagaacattgggacaattggtcgttcaaaaacattcatcctcttactgcaagtttatctgggtacttttacctgtgtgttcaaaggcatttcttttcagcagtgatcattataacttcacaaaaaaagatgctgacggatttacttacagggccttaatgttattttgtcccagccaacaccctctaggtcctaaaagtcaaggtacttcagtttatttggcaaacatgacaacattttttttggccctgggcccaacagtttgtacttcatgaaacatattgtacattttacatagtttaatttaaaaaataccttttaagctagttgatctttgactgtcttatttattataacctttcagcacattccaaggttttagttactcaggaaggagttaattaaaatgattttattttggtctgatggatgttttttaaaaggaaaattattattatgaaccttcagcctactttcttgagtgccgtaaaagtgcttgtaaatctttttttttttttaagaagaaagaaaaaaatggtgtttgacgttgatggaaattcaaaaatatatatggaactgaaacattaacttagctaaaataaaagcaatctgtgtttgaaaaaaaaaaaaaaaaaaaaactcgag

SEQ ID NO: 718 - DNA, 1086 bp, Homo sapiens
agtttagctcttaattcccacagaagtcctttgagacactattattatccccagtttacatgtgaggaaactgaggttctgagaagttaaataacttgcctgaaatccacgtaactagcaaatgatggagccaggatttgaccttagtcattcctgctttggagtctgtcctcttaatacattatatggcgtctctaatttgtgagtgagtgaataagtgttttgagattttaagtatttataccacttgtactccacttttgctggagggtggattctaggcaggagtctgggatgcattgaggatgttaatgaatttagcaaatactcactgagcacctgctttatgtcagggatatgaaagtgcttgacagacaaggttcctgccttcaaagagcatatgttccaggggggaatctgacagtaaacaagtaaacagacatggtaatttcagattatcagtgctatggagaaagttaactgttacagtacattgcagagatgggttctgtaggcagtgtgtcacacaatgtttaatgtcatatagctttcatgatgttggatattatctccccctttttttttcttttcctttttttttttttttagacaggctctggctctgtcaaccaggctggagtgcagtggtgcaacctcagcttactacaaactctgcctctctggctcaaggtatccacttcagactccctagtagctgggactgcaggcacacaccaccacacctggttaatttttttccatattttgtagagacagggtctcactttgttgtccaggctggtcttgaattcctgagctcaagcaatctgcccaccttggcttcccaaagtgctggaattacaggtgtgagccactgtgcttggctcccaattttttttctaattaaccccacatctgctgaattaaaggagagtgttaaatacaaaaatgaatttattatgcaaatctgcagttatcgtgtatgttcttttggacttgtaataagggagtatgttctagtattgaagaaatagaaccagagaggaatactgctgtaaaaattaaaaaaaaaaaaaaaaaactcga

SEQ ID NO: 719 - DNA, 1276 bp, Homo sapiens
gaacattctagcaggggtaagtgaccatagctgaattcttttcttatcaatcaggaaaatgaaaatccttccttaatcaatttctccaaagtctctgacacataacaacaactccaaaaatgcacctctctttccatcaaactccactgatatgaaaaatgggcaacctgtttttccttgccctgttagtgaacttgtgggtgtacccagtggccactctaaggatctctataatcaacaagacacagtaacaagtgttggcaagcaagtggagaaatcagaacactcacacattgccagtggggatgtaaagtggaaaacagtttggaagttcctcgaaaagttaaacatggaattaacatacaactcagtaattccacttactcctaggtaatatccaaaagaactgaaaacgtatgttaacacaaaaacctgtacacaaatgttcacagggcattattcataatagccaaagagtggaagcaacccaaatgtccaccatctgatgaataaatgagttatatctatataatactattcagccacaaaaatgaaattctgatacatgctacaatgcaaatgaagctttaaaatattatgttttgaggtkgggcatggtggctcatgcctgtaatcccagcactttgggaggctgaggcaggcagatcacttgaggtcacaagtttgagaccagtgtggccaacatggcgaaaccctgtctctgctaaaaatacaaaaattggtcaggtgtggtggcgcacacctgtagtaccagctactcgtgaagctgaggcaggagcattgcttgaacagggaaggtggaggttgcagtgagccaagatcttaccactccactccagcctgggcaccacagtgagactccatccccgccccctacccaaaaaaaagtatatgtgtatatatgttttgaagttagatgtgatttaaaaattagaaaaacaaaatatgtatattaagtgaaaaaagctggcaaaaaccacatattgtatgattccttttataatgaaatgtccagaatccacagagacagaaagtagaatggtgcttggtaagggctggagggaagagggaaaggagagtgactactaacaggtatggatttgtgctgtttttctgaggtgatgaaatgttctagaactagaattgcacaactctgtggatattccaataactactgaaaggggggactttaaggcatgtcaattatacttcaataaatatgttaagttcaaaaaaaaaaaaaaaaaaactcgag

SEQ ID NO: 720 - DNA, 2757 bp, Homo sapiens
tataaagcctgtaaacacacctaagaaaataaacattttacaaatgaaaaaaaaaaaaaaaaaaaaaaaaaagcagagagggagcgcgccttggctcgctggccttggcggcggctcctcaggagagctggggcgcccacgagaggatccctcacccgggtctctcctcagggatgacatcatccgtccacctccttgtcttcaaggaccacctcctctccatgctgagctgctgccaaggggcctgctgcccatctacacctcacgagggcactaggagcacggtttcctggatcccaccaacatacaaagcagccactcactgacccccaggaccaggatggcaaaggatgaagaggaccggaactgaccagccagctgtccctcttacctaaagacttaaaccaatgccctagtgagggggcattgggcattaagccctgacctttgctatgctcatactttgactctatgagtactttcctataagtctttgcttgtgttcacctgctagcaaactggagtgtttccctccccaagggggtgtcagtctttgtcgactgactctgtcatcacccttatgatgtcctgaatggaaggatccctttgggaaattctcaggagggggacctgggccaagggcttggccagcatcctgctggmaactccaaggccctgggtgggcttctggaatgagcatgctactgaatcaccaaaggcacgccccacctctctgaagatcttcctatccttttctgggggaatggggtcgatgagagcaacctcctagggttgttgtgagaattaaatgagataaaagaggcctcaggcaggatctggcatagaggaggtgatcagcaaatgtttgttgaaaaggtttgacaggtcagtcccttcccacccctcttgcttgtcttacttgtcttatttattctccaacagcactccaggcagcccttgtccacgggctctccttgcatcagccaagcttcttgaaaggcctgtctacacttgctgtcttccttcctcacctccaatttcctcttcaacccactgcttcctgactcgctctactccgtggaagcacgctcacaaaggcacgtgggccgtggccggctgggtcggctgaagaactgcggatggaagctgcggaagaggccctgatggggcccaccatcccggacccaagtcttcttcctggcgggcctctcgtctccttcctggtttgggcggaagccatcacctggatgcctacgtgggaagggacctcgaatgtgggaccccagcccctctccagctcgaaatcggcagactaggatggaagtgccctgtgagctggggggcccttcaaagggccaaggagaaaacgcaggccgagggaccagccttccaaatgggcttcaagctccaatgacctccgctcgccccctcgaaatgtctggaaaacataatgggcagattttctgtcttcaaagtttccggctaaacctcttcaagttctttattgtttgggactgagacactcagccatgttaatgggtagtttcttttgtatttgccttgaaaggccaaaatatttttatattgccacagacaaagccacctatttaaaaatgaactccatgtccgtcgtttcccaccaggagactatgtaccatgtgtgtgtctctatgtattctggggtcttgaaacaggtttctcatggggatggtcattcaccacggtccagaggggcagaacaggcggcgcttgccttgcccagggggcctggggaacgtgggccctcatctcagatctgcccccagtatgtttaggacgcgagccccagaaggatctgggagtaaacttaacattcactgtgtctctgctctgcatccgccatttgtgtgtgtttctggactgtgggctgtgtgtaccttggttggtgactcagtgagaagaagcaggaatgccaaagatactgtgaatgttctgagttttgttgctgttgttgttgagaggttgtttcactggtatctattgcattgtataataaatgaccagatgaatgaatgagtgaagcaagagagaatgaataaacaagtaaataggtaaagaagtaagcaagccaggatgagagtgtgtgtacacaagaccatggttcatccgctttgatggctaggcaatcaatatataaatagaaaaaaaccagtgaatcactaagtaatagggcaacacacaaagcgatatcaggtgattatggactaaggggtatgtgtaactcaaatatatgcctctgacatttgacaatgaaaaagaacctaaatgaaagaaagaatggatgtatgagtagtgaagtgcagaatgagacatagattttgaggcccgtcaaaatgaaaagatgcaagttagggaacaagtgatcaaaagggagaagggaaaggttttttttaaaaaaccaaaacaacaaagaaaggttaaaaaaaaaaacagactagaggatgagtaatgagtaactctgtaaggaggaccatgtcagactattgtaagctaagcattaggactgatacaaataatatatgctcctggcatagaaaaataaaccacagagaacgagttcaaagaatagcaaagaaagaaagaggacccagtgggcgaaagatgagagtgtacttttaccaaaagttatctaagcctgagcacttgaagtctgcacataaataaataaatgacaaaaraaaraaaaaaaggccaaaaagtctacattgcgtgtgtgct

SEQ ID NO: 721 - DNA, 1547 bp, Homo sapiens
  SITE (94): n equals a,t,g, or c
  SITE (1166): n equals a,t,g, or c
ttcaaatgtcggaccccaaaagaatttcttctttttcactcttctaaatgaatggctctttcattattgagtctccctttggctcttgtgccgnaggcaggactaggatggaagtgccctgtgagctggggggcccttcaaagggccaaggagaaaacgcaggccgagggaccagccttccaaatgggcttcaagctccaatgacctccgctcgccccctcgaaatgtctggaaaacataatgggcagattttctgtcttcaaagtttccggctaaacctcttcaagttctttattgtttgggactgagacactcagccatgttaatgggtagtttcttttgtatttgccttgaaaggccaaaatatttttatattgccacagacaaagccacctatttaaaaatgaactccatgtccgtcgtttcccaccaggagactatgtaccatgtgtgtgtctctatgtattctggggtcttgaaacaggtttctcatggggatggtcattcaccacggtccagaggggcagaacaggcggcgcttgccttgcccagggggcctggggaacgtgggccctcatctcagatctgcccccagtatgtttaggacgcgagccccagaaggatctgggagtaaacttaacattcactgtgtctctgctctgcatccgccatttgtgtgtgtttctggactgtgggctgtgtgtaccttggttggtgactcagtgagaagaagcaggaatgccaaagatactgtgaatgttctgagttttgttgctgttgttgttgagaggttgtttcactggtatctattgcattgtataataaatgaccagatgaatgaatgagtgaagcaagagagaatgaataaacaagtaaataggtaaagaagtaagcaagccaggatgagagtgtgtgtacacaagaccatggttcatccgctttgatggctaggcaatcaatatataaatagaaaaaaaccagtgaatcactaagtaatagggcaacacacaaagcgatatcaggtgattatggactaaggggtatgtgtaactcaaatatatgcctctgacatttgacaatgaaaaagaacctaaatgaaagaaagaatggatgtatgagtagtgaagtgcagaatgagacatagattttgaggcccgtcaaaatgnaaagatgcaagttagggaacaagtgatcaaaagggagaagggaaaggttttttttaaaaaaccaaaacwacaaagaaaggttaaaaaaaaaaacagactagaggatgagtaatgagtaactctgtaaggaggaccatgtcagactattgtaagctaagcattaggactgatacaaataatatatgctcctggcatagaaaaataaaccacagagaacgagttcaaagaatagcaaagaaagaaagaggacccagtgggcgaaagatgagagtgtacttttaccaaaagttatctaagcctgagcacttgaagtctgcacataaataaataaatgacaaaaraaaraaaaaaaggccaaaaagtctacattgcgtgtgtgct

SEQ ID NO: 722 - DNA, 1614 bp, Homo sapiens
ggcacgagcggactgacattacctcacacagaagcccacgggaaaagaagacacatcccccagacctcacctaagtgggagtccagagagcctccttgatttaagtggctgtggctttcaaaaagtgttaaggaattcaaaaaaaggagagatctcttagaactgtagagggaaaaacagggggaagtatatttttgtggaaggatttagagatgaggtgacactgtggcagggcctcagagaatggggagcatttgaacttgggaaagtcggggaaggaaaagcatgaactaaaggaagtctgaaggaaaatgtcaattatggggtattgcaacaaaaattagtttagttgctggactagttcaggagggagaagtggtaaaaataacaaacttttattgagcctttacaatgttccagggacaatggtgagcactttatatgaataatttcattaatcttcaaaacaatcctatgagacaggttctcttgtttcctccattttatacatgaggaaacaggaagcttagaaaggttaagcaatttgttcaaggtcacaagaggcagaatcaggtatttaacccagaatcaatgctcatcaccacaacactatcctaggattagattatgaggaaaactgtgctggagtgaaggcctgagactatcttcttcaagtagaagggagccactgaaggactttgaacaatgagaatgacataatcaatgtcattctttaggagggtcaaggtaataatacaatgatcaaggatcaagcatccaaaatacatgcaagaaagacccccaccaagacttcttacaaaagtttaaaaatataaaataaaagtgcagctttcaagcaccaaggtaatttccctgcttcagctaccattaaagaactgaggcagttaataagagaaagacagtcttcatctttccccacctgtatttcatgaattgcttcaggacgtcaggctatggggcaccagtacagaggaggctagagagacaaatgaagcaaatccccaatggtggctgttggaaggtgcaacacaaaagtttcttcatctttaaaacctgcatggaagtaaagatcaattacccatagaagtatggggactacctgtgacaaaatgattaatcccagtgggtggccctactgccaccttgctccttttctgcctgcagtggtatgagacccttagctctttggatataaagagatggatataaagtggatgatgcgctttttatagcaatgtaacacaacaaaatgtgacaagatatggagcagaaaaaacagatataaaaattacttcaagggtgcagtgctcactcttgtaatcccagctgcttgggagactgaggcagaggaatacttaagtacaggagtttgataccagcctgggcaacatagcgagctcccatctctaaaaaaattatttttaacttagctgggtgtggttgcatgcacctgtagtcccagctacctagagggctgagacaggaggatcccttaagcccaggagttcaaggctgcagtgagctatgatcatgccactgcactccagcctgagcgacagagccagactttgtcacaaaaaaaaaaaaaaaaaa

SEQ ID NO: 723 - DNA, 937 bp, Homo sapiens
cggcacgacggaacgtctgtatttccctctcctgcacgaatcactcatcattcttggagggcttctctgcattcctccttttcttctctcccctcccctgccttttgtcttttctaaagagtctgaactccgatttccatgctctcctgctacattaataagcaaaacctgcttgtgtgtacggttctttactggaaacatgactttttgtttctgtattggttttactgtcatccagttttctagtttaatatctagcaaaactaaatctgaatgtactcgctttttccgttaagtatgccaagcacctcggttgaaaggcttgactcaaaccagaagtcttgctggaattcgtctctgaacacttgaaaaacagaaaccctgagccgcaacaaacatgcctctgtgtgtcgggattgcctttgtctctgcttccatgtggcttttccttttgtagctatgcttagtgacataatcttccctcttctagccttctcctttcaagcctgtctgttaattaaccatgtcagtattggcaagcatttatcttcccccaccctaacatgcaatcttctaagaattttgcaaaattctaaacaaatatagagatggtatatagaattcatatctagaaaactttgattttaatgtgagcttatcaaatttgttctggcttttttggcactaaggcaaaaacatgttaaccagaaataatttattcttcatgtatgtaaaatatttgagaatgtttagccttttattagaattttatttggaaaatatttatctttctacacattttacacttatgttcctttgcttataacccaatttcttaacttttttgttacttaagcaaatatcaattatgttttattatctaataaagtgtaagattcttactatctaaaaaaaaaaaaaaaaaaaaaaaaaaaaa

SEQ ID NO: 724 - DNA, 1329 bp, Homo sapiens
aatacaggcgctgcacagcctggcccacctgttcattaatgcactcaatttagtactgaatggtctttctcccagcccattcccagcccttcctatttcctttcctattttttttttctccccacactttcttgggactcccaccttggaaggaggaagggctgacctgggttctctccagcccccaggtgcgccgggtcacccgtgccccttcattatggacctgggccctaccggaacccctgccccagttaccacaactcaggccggctggcccgggccatgggctgcgcaaatcaccagcccccaacccagggaggaactggcccctcctagggagcctcttcgacttttttagaaaaatgatctccatttctttccagccatgatgtttagtaaatatttttagtaccgcacttagcagacagctttccaagtgtgctttcttgccacaaaagtgtcctggcaagagccccttatttttaagacatcaggaagccagaccgctttgagttgggagaattttgtagctcaacatatcaagtcctcgatggtatctgagctgcccacacccccacctgccaaggccccacagagcccaaaacagaagggggctgccccagccagcagagcacagagtttctggagctcccatccacagatgcaggagggggtactgatggtaacccccatgtggatttgagggcagcagtccctggcctcaccctagccagcctgggtggctccctagccccaagaggccaggaagggctggaaggcagggcctgcaggtgctccccgccctgagacccaggccccaaatcagcaataatgaacaaacccttggcccagcctgggctggtgacctgggcaccagagaccttgcatccctcctcatcctaggaggcccctaggggtgccccatctcagtgtcccctgaactctttatttgcctaatttatatatatatatatgagatatataaatatatataaaatagctattttgcttaaatttctacagtatgtaaaagtgaaaaaatgatgaagacgggtgcacctgtctgagtttggccctcatgtgagctgtgcccttccctctcctcatgcccccttccagcggcttctgccaaccatggggggctggaccaccatggccactgacccagcccctcagaatcccacactccaatcctttccatttcagtttagtcctaaaagttcatcacagggtctttctttctactccaggactggttttgtttttatatatataaaaaaaaaaaaaaaaaactcgagggggggcccggtacgcaattcccaaggagtt

SEQ ID NO: 725 - DNA, 2455 bp, Homo sapiens
  SITE (894): n equals a,t,g, or c
  SITE (1330): n equals a,t,g, or c
  SITE (2418): n equals a,t,g, or c
  SITE (2420): n equals a,t,g, or c
  SITE (2445): n equals a,t,g, or c
gaattcggcacgagttagattccatttttgaagaagaaattcagtggggattacataaatgacaaaatgtatagtttgactaagggtctaagttttactgtcctcagatgaagagcataatgggatgcagaattttatttgaattaaaatgctggtgcattttatgagggaaaaacatcaataaaagagcattaggggtaccttggctctgtgattaggagacatacttctaaataagaacattatttatcaaggctggtaacataacaagaagaatgctggaatatggtttattgctcttggttattttggtcctttttccctcatttccttaaacttatcttcaatttcaaacaaacaggaaaccttgttagagggcaatgtaatatgccacagattgaagcgtatacgagtacttgktactttcgtcacttaatcatatataacgtatgtatgtttgtatttacacctttattacatataggttgttattgggctatcctgtctaataataagctattaagtagaccaatttaaacaagagtatatttcaggagtttattttgtgttagaaaaaamcatgatatcctgatgattctactttagttattcatcttcctcttctttyttttttttcttgagatggattccaaaacctgcctcaggaaggagccatgctgctagtgtctctaaagtggtttcttatcccctgcagcatctgccaaggttctgtttggctgaggatctatgaggcatctgaagctcctatgktttgtctacaaaaatatataggtcagatcaaaatgtaaaatatgtatttttttaattggaaaaaaaaagagaggcttctgtaacatccgaaaggccatctgagccctatctctgagctttggntttctcatctgggtgagggcagtggccctgcaaggtcccccacctcacaggacagctgtgaggaccgcacagaagttctttgaaagctggaaggcaccaggataacatggggtgtgttcttggcagggagggtgtttctgcaaaagcatatttttaacatgcaatttatgaaaaaatttaatatgactgacagaaggacaattttatgaaagtaaatatccatacttctcaatagactattaaaactgtagcactgggttagaattttgtctcatttgattgtagggatgatgataccaaaatctatatgttgtaatattaactcaattctcaattatattctttggctgtcttgtgtggttcaagttcagctctctgcttccgtgtggaatgccaacattttataaaaatatacaactgtaacatttttaacacnaataaaaaatgaggtagtaatgktatggcattatacagtaaattgccttggctgattaaatattagccctactaaawtgtaagtgcttataaaacmccaattttttaagktaaaatatattctaatttaaatcgcaaccttggtgagtcaactctaggtcctgagaaactatgtttactatctgtaatttctgaaccttcattgcatcctaataattttgatttatatgktcatgtatatgtgaaattacagtgttaaagtgkgtgcttatgatagctgctcagagtaaaagtgataaaaacttattgaatattagtataaaaactcmcagaatcctgtagagrctmcatagattcatagatttacctgtttaaattttaaagctaaatctaattatattaagctcagaagaattagaaaatatatataaagcaaaaaatatttgtgaatctttaactttatttgtagtattttcttaccatcaagaaattacaatggtcacatacttagtaactgccacataaatactgtttgcttgtaaatacatgaacttccccctctgaatttttagcatagaaatacaacataaactacatgggttggccacatactcctggaatctggaaatgtgtgagaggaaaatttgataaattattttatgcaagcaaaacaaaagcgctggttgctccagaatactttagatgtcgcgaaaggagcaaagaatgttctttcaatttgtaggaccataattttgcaatcttttataaggaaaaatgttgcaatgagatataatgtttgtgtgaataaagtagtgaatgtttgtttatatttcgacagcataagaagtatataataacctaacacacagatacacatgaatgaaaggctcttttacgttatatttaagatggggaactcatagaagtagcttacagtgaatccttctgaaggctttattgagtactgtgtaaaaactcttgtaaaaatatagaaagattaactgtagaactacaatgagttttgccctttcgccttgcttatatggagatttatttgtcattgggattctatttctaaagctggcactntncgtactaaaatattatatattattnttaaactctt

SEQ ID NO: 726 - DNA, 834 bp, Homo sapiens
ggcacgagctctcttgctgagagtccaggcctgcctgcctgccagccagaggtgccccttatgcacatccagtcctaccagcctgcttccaggagcctagagtgggaaaggcacctgggggagccctggtgaagggctggacctgacccatggaggcaggaggaagacctggctttcttggtttgtccggccctggggagcagccttccctactcactttccccttgcggcaccaaatggtcactccttccagagcaaaaactggcactcatagcaagccagaacccccatccccatcctcatgggtctgtggctgggtgcaggccatcaaaatggacaccacgagacagaagtggggactgcctggccacctagcgccttcccactccttaagcaagcacaaagaagatgaggcagagaattgtcagagctgaaagttcctttggttgctcacaactcaggtatgcacccatgtggcagccaggcagcggagccctactagactgccagtctcatgcacccagacctgtggccagattgtggcctctggctgcctcaggcattttcctctttgcattgggttttcctgcattagtaactacagctgcaacagacatcctccacattgtgcacactggttttgcctttgtcctcaagagttgatacttggcattagcatgaaacttgtgggtgtgggaggatggagagagaactctaacacaaaacatcttattaaaattgtacttgagagacaaaaaaaaaaactctgttgtattttgacagaattatttttattaaaatacacatccatgagcaaaaaaaaaaaaaaaaaaa

SEQ ID NO: 727 - DNA, 3371 bp, Homo sapiens
aattcggcagagtgacaggaacaaccggggtacagagccatttkttactggagtacggggccaggtgccacccttagtcactaccaacttcctggtgaaagaccaagggaatgcaagtccccgatacatccgatgtacatcctataatatcccttgcacatctgacatggctaagcaggctcaggtgcccctggcagcagtcatcaaaccgctggcaaggctgcccccagaggaggcttcaccgtatgttgtggaccatggggaatctggccctttgcgctgcaaccgctgcaaagcatacatgtgtcccttcatgcagttcattgaaggagggaggcgtttccagtgctgtttttgcagctgtatcaatgatgttcccccccagtattttcagcacctggatcataccggcaaacgtgtggatgcttatgaccgccctgagctatccctgggctcttatgaattcttggccactgtagattactgcaagaacaataagttccccagccctcctgcctttatcttcatgattgacgtctcctacaatgccatcaggactggtcttgttaggctcctctgtgaggagctcaagtcactgttagactttctacctagggagggtggggcagaagagtcagcaatccgcgttggctttgtcacctacaataaggtgctccacttctataatgtgaagagctcattggcccagccacagatgatggttgtgtctgatgtggctgacatgtttgtgccactgctggatggcttcctggtcaacgtcaatgagtctcgggcagttatcaccagcttattggatcagattccagaaatgtttgcagacacaagggaaacagagacagtatttgtaccagttatccaggctggaatggaggctctgaaggctgctgagtgtgcagggaagctctttctattccatacatccctgcccattgcagaggccccagggaaactgaagaacagagatgacaggaagctgatcaatacagacaaggagaagactctgttccagcctcagacaggtgcctatcagaccctggccaaagagtgtgtggcccaaggctgctgtgtagatctctttctcttccctaaccagtatgtggatgtggccacactctctgttgtgccccagctcactggtggctctgtctacaaatatgcttcctttcaggtggagaacgaccaggagcggttcctgagtgacctgcgtcgtgatgtccagaaggttgttggctttgatgctgtgatgcgggtccggacaagcactggtatccgtgctgtagatttctttggagctttctacatgagcaacacgacagatgtggagctggctgggctagatggggacaaaacagtgactgtggagttcaagcatgacgatcggctcaatgaagagagcggactctyctgcagtgtgccctgctttayaccagctgtgcagggcagcgtcggctccgcatccataatctggccctgaactgctgcacccagctggctgatctatatcgaaactgtgagactgacacgctcatcaactacatggccaagtttgcatatcggggagtcctgaatagccctgtgaaggctgttcgtgacacgctcatcacccagtgtgcccagatcctggcctgttacagaaagaactgtgctagccccttcctgagtgcatgaagctactcccagtttacctgaactgtgtgttgaagagtgatgtcctgcagcctggagctgaagtcactactgatgaccgtgcctatgtccgacagctagttacctccatggatgtgactgagaccaatgtcttcttctaccctcggctcttacctttgacaaagtctcccgttgagagtactaccgaaccaccagcagttcgagcctctgaagagcgtctaagcaatggggatatatatttactggagaatgggctcaacctcttcctctgggtgggagcaagcgtccaacagggtgttgtccagagccttttcagcgtctcctccttcagtcagatcaccagtggtttgagtgttctgccagttctggataatccactgtccaagaaggttcgaggcctcattgatagcttacgggcacagagatcccggtacatgaagcttaccgtggtgaaacaggaagacaagatggagatgctgttcaagcacttcctggtggaagacaagagtctgagtgggggagcatcttatgtggactttctctgtcatatgcacaaggagattcggcagctactgagctaaagcaagtgggtaaatggcatagggcccaggctagcttccagaaagcaccccaggatgtcagagaaattgggacagtaacatatcttatgtaagctgacctcagtctctctggggggagggggagatataaggagacaccttctttctgggctcaagtatcctgccactctgtcatgtcctgctgatggaaggtgcccctgttccctcattctaccctctttttcctgctaatcctgtcataatgaatgtagcttctcagttcactgtatatgattcggtattgggggtttggaggcacccagaccctggcaatattatgtgtccctttggaccagtctcccaagaggagaggggcaggcaggaaagagtggggatcctaaggttactacagggggctcagtgtcatccacaacttcctatattagggataaaacatataggtgcacaagagctggggtatagcccataggtggtggagagaaaagtggtcagtccttcttgggcctggaggttagcagtcaagtttctctgctttcactgctcgctcgctctctcctgcaatgattgatgatcactccgtggatagagaggcacactgtcagaggtgaccggagaactgagttgcaaaatatattaagatctggtagaggtaccagcttcctttccagctggagaggccccaacactggatggttctgtagggagcctagggagcctggtcatcaacttgcaatacctcacagagccagttcacatcccactctgagctcccacgagaaacactgcttctccaggcccggggttgttggggagagaggcagaggcagctggagcgccgttctctcctgctgggacaccgcttgggctttggtattgactgagtggctgacagttatcttccaaccccaactggcttgggggcaggacaagggctaggcttgatggtggccaggcttgcctgctccccacctgggatgcccctgctctggacctctcatttctcttcattggtttatttttcaatgcatctttaatttgtaaagaaataaaataaattaagatgtaaaaaaaaaaaaaaaaaaaaaaaaaaaaaaaaaaaaa

SEQ ID NO: 728 - DNA, 1094 bp, Homo sapiens
ggcacgaggttcttcctactttcaaattttaattattctagtttcttttaaagactcgttctctgaaatgttttatattttgtttatttgtttaggttccagagttctaaatctggaaagatctacctccatagagacgtacggctcctgttctctagaaagtcaatggaggttgatagcggtgctgcatatgaactcaaatcttacactgaatcaccaacaaaccctcagttttcaccaagatgttgataaggagtgatgatttaaagtatttactcagtacccaagtttgcaagtaaaaattagcatagaatggagtgtaccaaattaacaatcaggagagtggattctctcctgttatcctggaccagtttttatgaaaggattcctgaaatgaaatccatatattccatgtagactggaaaaactcatgtcctaatcctttttgtactgttgaaaccacttcattggacatgttgcaatagcaaaacccccagttagattagtgtttacacattttctcagttatttaatatttaatgttttccttaatactcaagtgatgtttgtctctagtgttctaatgtagcacaaatcctatgtaaaatcatactatgtatttttgacattaatgttgaaatcaaatatatgcacaagtctttaattttgtgtaatgtgttaagtgctgttcatttaagttattgaaaatgagaataaaatgttgagcttctttaaaagtaacacactatgcaagcatgtgtactttttatatctctcatgtttagtttttataacaccatatccaggttgctatctcacatagtagtcctttaacatattgtattagcagtgcaatgtggactaagctgcttcactttccctttgcaagttcagatcatcatgcccattcatagccaggattccttatccccaaaacagttctatttttccttaatcactactatagagtctttacattaaattactgtcgtatgctagataattttctcaaattgttaaaagaatatgtactttggaaacaaattagtatttatattgtaaatatattcaaaaaaaaaaaaaaaaaaaaaaaa

SEQ ID NO: 729 - DNA, 1243 bp, Homo sapiens
ggcacgagagaacgaggaaaaaaaggaagggagaggaaaagaaaaaaacctaataaaggagaaagtaaagaagcaatacctgacagcaaaagtctggaatccagcaaagaaatcccagagcaacgagaaaacaaacagcagcagaagaagcgaaaagtccaagataaacagaaatcggtatcagtcagcactgtacactagagggttccatgagattattgtagactcatgatgctgctatctcaaccagatgcccaggacaggtgctctagccattaggaccacaaatggacatgtcagttattgctctgtctaaacaacattcccagtagttgctatattcttcatacaagcatagttaacaacaaagagccaaaagatcaaagaagggatactttcagatggttgtcttgtgtgcttctctgcatttttaaaagacaagacattcttgtacatattatcaataggctataagatgtaacaacgaaatgatgacatctggagaagaacatctttcctataaaaatgtgttttcaagctgttgttttaagaacaaaagatagttctgcaaattcaaagatacagtatcccttcaaaacaaataggagttcagggaagagaaacatccttcaaaggacagtgttgttttgaccgggagatctagagagtgctcagaattagggcctggcatttggaatcacaggatttatcatcacagaaacaactgttttaagattagttccatcactctcatcctgtattttttaagaaacacaagagtgcataccagaattgaatataccatatgggattggagaaagacaatgtggaagaatcatagagctggagactacttttgtgctttacaaaactgtgaaggattgtggtccacctggaacaggtctccaatctatgttagcactatgtggctcagcctctgttaccccttggattatatatcaacctgtaaacatgtgcctgtaacttacttccaaaaacaaaatcatacttattagaagaaaattctgattttatagaaaaaaaatagagcaaggagaatataacatgtttgcaaagtcatgtgttttctttctcaatgagggaaaaacaattttattacctgcttaatggtccacctggaactaaaagggatactattttctaacaaggtatatctagtaggggagaaagccaccacaataaatatatttgttaatagtttttcaaaaaaaaaaaaaaaaaa

SEQ ID NO: 730 - DNA, 818 bp, Homo sapiens
gattttcttacctcaaagctgaagtttttcttcctattataattccactctctgttataactgactcttttctatttctgacccaaagcctaaaactcacatcaaaatatgctgtgaagaaaagtgataagttttcttaaaaatcattaaatgctacctcataaaataaatatatatatgaaacttgaagcatttatagatttctgttgttttcttgtagtgttaacctggatacaggtggttttgatacatcttttctgtttgaagtagcaggcttcccctgcagtgtaggtgatggccacctggtggcacatcacactaatgcatggagcttctcatttgtcttcaggattctgaaagtaaagccaatgtttggatgttatgggagctatgcatttcattgtattgtttcttgttaatagttttagaaaatactcttcacattatagttcagccatcaaaaaaaattcacccagaaatgaaggtactagtattctccatattgcagaaatcgtatttagaatttgctttaataagcagtgagttatagagaacaggattatgtagttagaaaagctaagaaaaatgggaaacgaaaagagttaaggttggacttaatggacatatggtatgggcatatatatgtatttttaaatagtattgctgctgttttaactattttaataaatatattacaaaatttatggcaatttttaaatctttagaattattacctgcgaatatctcttaatgaatttcgttagcttctctttgaaaatggctttttgtggtttttcttaaaaaaaaaaaaaaaaaaa

SEQ ID NO: 731 - DNA, 847 bp, Homo sapiens
tttttaacaaagtggtccaagggaaaaataatgttttaagtttttatgtgcggattccagacaagcattctttctttttgttcttcctgcactctcctacatttctatgttgttactagacagtgatgtctggttctgacttatttatgtattttttttctatttgtttctggcaatgcacataataagaaatacacatagcaatattcttgctgttgttgttcataaccactgagaaaaaaaagcagcaacaagtaggaataaaagaagcctcagccacagaatggcaagaaacgttatatgttttttagggccactctttgcactcgttttacagacaggttactacttatcagcttactgaccttgggaagacccaacctctgagctamcamttyctcatctgtaacctraggatccagtgaagtcatgtaagacaatgtagcattgtacgcttatgactagaccccagtcatgacatgagctgcttctgtctagaaaatagagggctggcagggcacgttggctcacgactgtaatctcagcactttgggaggccgaggcaggcggatcatgaggtcaggagttcaagaccggcctggccgacatggtgaaccctgtctctactaaaatacaaaawttagctgtgtgtgatggtgcgcgcctgtaatcccagctactgaggaggctgagccaggagaatcgcttgaacctaggaggcggagattgcagtgagccaagatcgcatcactgcgctccagcctggagacagagcgagactccatctaaaaaaaaaaaaaagaaaaaagaaaaaaaaaaaaaaaaaaaaaaaaaaaaaaaactcgag

SEQ ID NO: 732 - DNA, 662 bp, Homo sapiens
ggcacgagaaagccagctagctttaagatacagtgttgggcatcacattttgacacagagcaggcactcttttctttgcccccaggtgggactaagccaccacaagcctttcctggtgtgtgcagtgggtgatgaatgcttgcctgctcagcacccactccctggtggactgggtcacattactctgactcccccttgagcttcagtccacgtctggttcaagatgtattgactcaacccgaggatccagaggtgggatgtagctctggcctggccagaggactgaggatgctgaatgccatggctacagcaactggtcagctttgggctcatgtcctagtcagagccaatgagatgtaatgttgggatatctgctgggctgttgggaaggggaaaggctgccctgctcatccccattcctgatgctgagggatctgagaaaattacttgtaaaatttgggggtgtctggaaaaaggggagactgatgtctctttctctctacagacatctgatcagctacagagcttgactaacctacccagaggcagaatgatatggtggttaaaagtgggctctgggacgagtttttgccactgtactccagcctggacgacagagtgagactccatctcaaaaaaaaaaaaaaaaaaaaaaactcgag

SEQ ID NO: 733 - DNA, 2254 bp, Homo sapiens
ctggttcttaaaatgccctttttctcctgcttttaggagctctgtgatcatatcgagctcatctgggttaatttatttatattcacaatatccatggagtacatatggcatcttgtgggcctttagtctgccttctatgaatataagacattatttccccagaatgaaaatgtatatgaagaaagagaaatatgccactggaaagtagttcaaataatgaaagtcttttgcttgttatagccttcctttttttctgttctttttcctttccttccataaaagatttattatatgcttttaggaaaataacaaaagcagaatgtttgctaaccatctatgggtgaaagagtagcaaatttggtttaaggagatgttgtaaataatggtatgacaattcctgggattctgggagtcacttaataaggaaacagaaatagattccaatgccagtgtgccccctaatgagaaaagggaattccttttactgaggcctataatcttgggaatatgctttttaattaaaattataagtctaaaacttttactattactatgactgtttatagctcccaatttaactcacgtaacagaggagtgagtggatgggtgggctagacttaagataataagggagtaaggagtgaaagaaaaccccacctatctcctcacctgaaggccctggacacgtccagcctgctttgggagtaaggcaacaggagattgaaatcaagttggcagttgagttttgaactgtattagactccacagttcaatttccaagagttgtatgaaaataaaactagtaggataaaagacagacatccagtacactcattccttcttcaatgttctattttatcattatagccagtgcctgtggcaggcacactctgagatgggccacagtgttctgtctcccggaatccatacccttgtgtaatcgttaccacttcagtgtaggctggatctagtgactctttactgaaaaatacaaaatggcagaaatgctgggatgccactgattttgttaggttatcaaaacgctgtggcttttgccttgaatttctctccatgctcattttcttactttctgtaataccttacaaaaggagaagcaagctggcataatgagagcaactttatggagaagtccgtgtgagaaggaattggtatctctagccaacagctagggagggtctgagcctgtcagaaaccaatgaatgagtttggaagcagatctgtcagcccctttcaagacttcagatggctgaaactccaactgacaccttgtctggaatctcattaagccatgaagcacgtagctaaacacattctttaccaatatgaactattaagtaataataatctattgttttaatccatgttttcaggttattatagcaatagataacaaatatgcatagtgctcaagtttaaaagggattatatgccattaaatgcacattgcaaatatgattatatggattcatttttccttataggcaatattataagcaaaagtcagattcctggacagcctagcagaatgggattacttttataaaaagatgaccaaagtgtttgcataaaatattcttcacatttcataacaccaaagcaaaagagtacttcacagctcaggggagattgtaaaatactcagatcgcttacagaaccatggggtcgtttcatctctttgacttgtggtatttatttccaccaagttctttttaataaagtctgcggaagtttcccgggtaagttcaaggtgttgttctttctgtagtgcgtatttcaaaaaaaaaaaaaaaaaaaaaagctgacattctaagcctttcaaaagaattcttcttctctttttttgttttatagagataagaaaaatcaaatattgtatttcaattaaagatacaaatcatttaaaagatcagccatttattaatgaacaaatacgttgtcaaagaggtgacaagcaatggtttcagtgattttattttattttcacttcaaattgcttattccagctctaaccacctacattattattatgagctgctgttaactgaacctctattttattcctctttgtccaagagctctacaaacactctctataatccttaaaataactccacaaatggaagacattatttccatttcacagatgaggaaacaaactcggagttatcaggtagttgtctgcctatgaaatggaagaaaaggcatttgaattcaagtttacctagtcctaaaa

SEQ ID NO: 734 - DNA, 1079 bp, Homo sapiens
ggcacgagtaagtccttgcacaagtgggatatattttgaatattgaccatctagcttgatgtctcatacaaaaagatattttttacacagtttttaatatttccatagtttattttcaaagggactgtaatgcatattacttattaaaagcattttttcccccaactttgatggggaaaagcatatcaacagatacctacttttgtagatggctataaaaattgttacccaaaaggctttcttagagcaaattgtctcttatgattattcctgcctgcctccatgggatctgtctttatattgttggagagaatagcaaacatccataatacatttttttttttttgtggatataacattcaggatagaattgtttgtcatttattgcttagattgatattttgtatacttagggattatgaaaaaagtttgtgttaatattgcattattaaagcacatgtttaaagataattattagattttaagttcacaatgcttcatgtattggtttattctggtgattttatttttactttaggaatttattcttcattgcctgttgaagtccctttgaatcacaaacggtttgtttgtgatctaactcaagctgatcgtcttgccctctatgatttcgtagttgaggagacaaagaaaaagcgctctgattctcraattattgaaaatgacagcgatctctttgtagacttggctgccaaaatcaatcaagacaatagtcgaaaaagtccaaaatcctaccttgaaatcctggcagaagtacgagattataaaagaagacgccagtcctatagagccaagaatgttcacataaccaagaaatcatatactgaggtgattcgagatgtgataaatgtgcacatggaagaactcagcaatcattggcaagaagagcaagagaaggcagaggatgatgccgaaaagaatgaagaaaggcgatcagcttcagtagattcacggcagtctggtggaagctatttggatgctgagtgttcacgacatagaagggataggagtagaagcccacataaaaaaaaaaaaaaaaaaaaaaaaaaaaaaaaaaa

SEQ ID NO: 735 - DNA, 2166 bp, Homo sapiens
gctcgaaattaaccctcactaaagggaacaaaagctggagctccaccgcggtggcggccgctctagaactagtggatcccccgggctgcaggaattcggcacgagctgcacccagccttgttcttcctttttgaatgatattttcaatgagtatttttgaatgacattttcaagtctgggctgacagttttttctttcatcacttttaagatgtcagtggttaaatgttgtctttttgcttccatggtttctgatgagaagtttgatataattcttacctttgttcatctctatgtaatgtttcttgtttgactgccttcaagatcttctcttcgtcttttgttttcagcagtttgaatatgactgggtattgaatatgactcagggtattatttttctggtatgtattcttgatgttctctgaggttttggatttgtggtttggtatctgtcaagaattttggaaaattcttggctattatttcttcaaatatttcttttgccttgtctttttcccttcttctaggattccagttacacacatgttaaactatttgatagtgtcccaaaactcttggatgctctgttctggtttgtttgcttttaaaaactcttatttcgttgcggttcagtttggatggtatctactgatgtgtcttcaagttctttactcactgtatagagtataccaatgagcctattggaagcatcgtttatctctctaattgtgtttttaatttctggcttttctatttgattattatagttttcatgtctctgatgaaataactttcttttaaattatttatttatttagagatagagtcttgctctctaatccaggctagagtgcagtgatgtgatcacagctcactacagcctcaaactcctgggctcaagcgatccacgtgcttcagcctccccggaagctaggtctacaggtgtgtgccaccacacctggcttttaaatttttttttatagagaaggggtcttactgtgttgcccaggctggtcctgaactcccggcctcaagtcatcctcctgccttggcctcccaaagtgttgggattaccaatgtgagccaccgtgcctgacctgaaataactttctatcttgcatgttgtctctcctttaactccttcaagatattaattatagttattttgaatttcctgtctggtagtttcaaaacctacatcatattcgggtctggttctggtgatttccttgtcttttaagactacttagttattaagtatatatatatatatatatatatatatatatatatatatatatatagacacacacacacatatacacatatatatacatatatatatatatatgtatattttaagtccttgaacacataatagctgctttaaagtatttatctgctgtgtccaacatttggttcatcttggccagtttctattgactgccttttttcttaactgtgcgtcacattttcctgtttctttgcatctacaagtttttgattgtgtactggacattatggatgatatattgtaaaaactctagattctgttatctttccttgaagagtatttttgtcctgtggaactcaaatcataaattttgaaaatcaaacagcaacgatagactataacagccacaaaacctaaaataattcatccaaaaatccagactggaagatgaaatgacactcttcggaaagcaactgcttttattcaagagctctgacagttgagaatcaagatcaaatcaataagatacagaagtgtagtaatcatgcatgctgtttaaacacccagaagatagctcttgattttctgtgaaaattaaggagaggtgggccagtccacctgttagtaaaaaatgttatttaagtatttctgaagatcttttatcccaagtgcctctgcttctgcctcaactctgtgccttaaatgttcccaaaacggacagccaggcgcggtgctcacgcctgtaatcccagcactttgggaggccaaagcaggcagctcacgaggtcaggagttcaagaccagtctggccaacacagtgaaaccccgtcactactaaaaatacaaaaaaagttagccgggcatggtggtgtgtgcctgtaatcccagctactcgagggggggcccggtacccaattcgccctatagtgagtc

SEQ ID NO: 736 - DNA, 632 bp, Homo sapiens
ggcacgagttactcttcagttctcaccatttttacccttctgcaaagtctcttgtaattcctaagtaatgaaatgaaaagtacaaatttcttaaaacaagctctgttctttttcttctggaaaacttgtgtagtttgtcctgtgtatctgtttctcatgaggagaccggctttctgtggcccacgtgaacactgagtaagaaacaaaagactgtggtctccaggacacagtgtgtgtttgtcctctgccatggttattcaccaagtggagtccagcagtttaggaatcgggaggtctcccatgatgagttgtcatcttctgaattgctgcaagtgacaccaaaggggcccccctaccagtttctcacttcccagtctcactactggatcagctcttaggagccaggagagttcactgctgtggctaggatagaaaagggcagctagtgccccagggtagatcttggaaaatattttttgggaaaaatgtaattaaggccacccctaaaatagatactgtatctggctgtactatactaacagtgatttgcctgcatgtgtttgatagagatttctaccatgtactgcttggtgctggatagtctatcacagcaaaaaaaaaaaaaaaaaaaa

SEQ ID NO: 737 - DNA, 1104 bp, Homo sapiens
  SITE (453): n equals a,t,g, or c
  SITE (781): n equals a,t,g, or c
ctgcaggaattcggcacgaggtgagactctgtctcaaaaaacaaacaaacaaacaaaaaattaccaatcttcaactattatcaagtcatgattatgaacattaatccttagtttgtgcttttttagaagtagtaaatataggagtttgggttggcatgcactaatccaagcatttaagtggagatttggaatgtgatgggcagttctacatttattctctttttttcctttcttttatttagtcctttcctttctccctcccccacaacctccttatatttcttcttcatctactctcgcttgatattttctgcaaagcgctgcctgggccccttgacctcacaagaagctctctgacgaaacgcttaagaaaaacaaggtattatgcattatcctacacattctgcaatcgccctagcaatttagtaactacagtccaatttaaaccaggcntcaaggcaacaaaattgcaccaaatgccaactaatttaccaaacttatagaaggaatatttgggagtctattcccttcaacccatctgattcatattattgactcatttagaaaacagaaagtgaacagagacaagtttttaaggagtttggtttcatgcaaatgacttgcaattgcagcccmttatttttataccacgacttccattagtccatatcccctgtcagactgtgaccagtgtcaatgttttcaaaagcacaccaggacaggcatggaactcatcagcctgtgtcaaaggtcgctctcattaaggagtcaaaatgaaaanttcagtgtctctaacacatcgcatagctctccctggtactcccacccccagtcctgaaatccagggccagctaagcacctccagctccccagacattcaaataagatcaagatgacagggcaagaaaatgaatagagttcttacccggctggacctcataatctggtactgattgaaacaaccagaaagctgtttgccaggtcttatagcaccatttcctgaggttaaacataacatctcaaaatgaagcaattaggggtttctccaaaacaagagtcttcagtaattaaaaaaaaaaaaaaaaaaaaaaaaaaaaaactcga

SEQ ID NO: 738 - DNA, 924 bp, Homo sapiens
ggcacgaggtcaggttgggtaggagagaggagagtcttggaggggctgctccatgggggtcacacctctctcctgtgggttttcgctggtgattgagttctgaggcatttgctgcattgactgttgtagctttaactcgtgtgcacgtgtgacacataaagccccaagagaagggctgcctggctcagatgcacttccatgctgattatatgcatgggtgttgaaagcagtgctggctgagcagcgatcccagtgcagtttgactttattctttgctcaaataggtgaaggcccacggtcccggcctcgaaggtggtctcgtgggcaagcctgccgagttcaccatcgataccaaaggagctggtactggaggtctgggcttaacggtggaaggtccgtgcgaggccaaaatcgagtgctccgacaatggtgatgggacctgctccgtctcttaccttcccacaaaacccggggagtacttcgtcaacatcctctttgaagaagtccacatacctgggtctcccttcaaagctgacattgaaatgccctttgacccctctaaagtcgtggcatcggggccaggtctcgagcacgggaaggtgggtgaagctggcctccttagcgtcgactgctcggaagcgggaccgggggccctgggcctggaagctgtctcggactcgggaacaaaagccgaagtcagtattcagaacaacaaagatggcacctacgcggtgacctacgtgcccctgacggccggcatgtacacgttgaccatgaagtatggtggcgaactcgtgccacacttccccgcccgggtcaaggtggagcccgccgtggacaccagcaggatcaaagtctttggaccaggaatagaagggaaaggtgggtttcatttaaaaaaaaaaaaaaaaaaaaaaaaaaaaa

SEQ ID NO: 739 - DNA, 1492 bp, Homo sapiens
agtttctaaaactctgtcatttcaataatgttataaattgaatcatacagtatgtaattttatgggattcgctttttttctgttgatctctttttttctgagtcatctcagctgttgtgtgtatcaatagttcatttccttttactgttttgtttggtttaactcattgacctattgaaggatatctgggctcattccagtctgtgaataatgctgctgtggacattcatgtgcaagtttttgtgtgaacattaagttttcatttctttaagataaatgcccaggagtgaaactgatgggttgtatgtagttacaaactgccaagctgttttccagagttggcggtaccattctaatttcccatgacaattttttgaagagtccaagctagttgctttagagtgcctcacctacattttttaattgtctgactttttcctaatgacatcacttaatttgttcctcaatctcctgaatttcctatagactggaggttaggtctggtggtttgattagattttttaaaaaaatatgacttcatctgtgatgctgtgtactttatgttgcataacatgaaccctaagaacagagtgagctgctggacagcaagtttcatggggtgcagtaattaacacaccacatagtataaatctgaaataatgacaaatgtgttaagggccttgggatattgggccatgtactctgaggagacaaggtgaggtgcaggttcctgcccctaaagaactctatcttttgagattagcaactaacagtgtgagcccactaataggatgtgaaagttgtcaaaatcaagttctggtcattgtgttaaaaatcctaacaaatagagctggggaaggccgtgaaaggacgattttcatgcacagatgtctgataatgaggactatcattaaaagactgcacaaaaccacaccttgcacaaaggccatcacaacctgacacacacaaaaaatacttctatgaggacatttgcccagcaactccctgtccaatgtccaactggcaacatccttgttattgatccttgtagccaaggataattctctcaaaacaatcatttttgctttaaaaaccgttgtcttccttgacctccctgtatatgcacatagtttactgtggcacttgtattcttattgcaatgcctactcctgaataaacatcattttctttcagagagtctccctctctgttatttaggctgacaaggatatgccaagaagtagcttggatatagcagttaactctgcctttaggatatgtgtatggggatataagagttaactaaaagctgacctttgagttggtccttgaataaaagaagaatagattccaaaaataagaggaataaataatgatcctgagctaggagagtacattttgcagacctttggtttccatattaagaaattcagatttttatgtacaataaagaagttctggaattctcaaaaaaaaaaaaaaaaaactcgag

SEQ ID NO: 740 - DNA, 638 bp, Homo sapiens
ggcacgagggaccccaaaacccaatgatcctgcagcagcccttgcagcgaggcccccagggaggggcccagcgcctcccgcgggccgccttgggggtgacttggggcctggacgccagggagcctctgcgcaagcagtttctgtctgaggagaacatggccacccacttctctcaactcagcctgcacaatgaccacccctactgcagcccccccatgaccttctccccagccctgcccccactcaggagcccttgctctgagctgcttctctggcgctatcctggcagcctcatccctgaggccctccgtctgctgaggctgggggacacccccagtcccccctaccctgcaaccccagctggggacataatggagctctgagtgctggtggacagtgcccctcccaccttccttcttccccacaacagaagagaccagcgactcccgcaaagggacaaggttcctccctctcctgcagagtaggcatctgggcaccaagaccttccctcaacagaggacactgagcccaacggagttctgggatgggaggggtgggtgcatgggaagggaggcatcccacccccaagaagaactgaataaagattgctgagcaaaaaaaaaaaaaaaaaaaaaaaa

SEQ ID NO: 741 - DNA, 944 bp, Homo sapiens
  SITE (864): n equals a,t,g, or c
  SITE (939): n equals a,t,g, or c
  SITE (944): n equals a,t,g, or c
ctttcgcgtgggcggacgcgtgggcggacgcgtgggcggacrsgtrggggaaaggggacttgtggtagtggaccatacctggggaccaaaagagacccactgtaattgatgcattgtggcccctgatcttccctgtctcacacttcttttctcccatcccggttgcaatctcactcagacatcacagtaccaccccaggggtggcagtagacaacaacccagaaatttagacagggatctcttacctttggaaaataggggttaggcatgaaggtggttgtgattaagaagatggttttgttattaaatagcattaaactggaattgacaagagtgttgagcatccctgtctaacctgctctttctctttggtgccccttatctcaccccttccttggaatttaataagtctcaggcatttccaattgtagactaaaaccactcttagcatctcctctagtattttccatgtatcaggamagaggtgtcttatgtagggagggggcaagtatgaagtaaggtaattatatactactctcattcaggattcttgctcccatgctgctgtcccttcaggctcacatgcacaggaatgctacatgatggccagctgcttccctccttggttatcatccactgcagctgctagttagaaaggtttggagggatgacttttagtaaatcatggggattttattgatttattttcacttttgggattttgtggggtgggagtggggagcaggaattgcactcagacatgacatttcaattcatctctgctaatgaaaagggttctttctcttgggggaaatgtgtgtgtcagttctgtcagctgcaagttcttgtataatgaagtcaatnccatcaggccaaggaaataaaataattgcttaccttaaaaaaaaaaaaaaaaaaaaaaaaaaactcgaggggggncccgn

SEQ ID NO: 742 - DNA, 408 bp, Homo sapiens
ggcacgagtgaatctttccttttttcccccctcctccaaatatataaatctgtgctctcacatgtaatgtatttaatttttggaaaatttaatgctatatagtaaatcaagtgtgtgatttaaagtaatcagatcactttgattcttttaagttttcagaatttcttttttccacaggtaattttggagaaaataattaccaattaactgataataagcacgctgtcctctgctgtaaaaagtctgaatagatactgtgtatgtttttatgtccatgaacttgagctactcgtgtgcaattatgtgtatgggaatggagtagtgttcatgatttgtatctacatcatcatatggatgtatatttattaataaagtcattactttaaaaccaaaaaaaaaaaaaaaaaa

SEQ ID NO: 743 - DNA, 1687 bp, Homo sapiens
ggcacgaggtttcatggggacagagtgggcagatggagagttctgtggagggagggaggtgatggtcccgcattgctgtgactgcttaatgccagtgacctgcgcacctgcaatggtcaatctctgccctccagcgggtgcccccatggtgccaggcccccgtcatcttggggtgcacagcgcacgatgtctcaccaggatgggatccgctgagggttggagcctcagctcaggccagggctgcacctgcccccaccacaccatacacaccttccccactctgttccccattggccccctcctcactccacccatgctgtctggccccttctcccccaggttctgcaagagcgggtgtggtgggcccacttgcagtcccagctcctggggaaattgcaggggctgctggaacccaggaaatcccagctcgctgggcatcttgaactaccaaaaaacaccctcagcagaaaatgagagggcaggaaggatgtcagcagagcctctgtggactcttcatgggaggagactctcatgctgacttgccaggaggcaccccggaagcccccagtccaggagtgacatgggaagggtagttcagaggcaggtttctgacccctctggcctccatcagagccaccgcaaaaattccacctgttaaataaaaacggactgaggccgtggtgcactcctgtaatcccagccctttgggagccaaggtgggaggatcgcttgaacccaggagctcaagaccagcttgggcaacatagcaagactccacctctacaaaaaaattagccgggtgtggtggcgtgtgcccttggtcccagctacccaggaggccgaggcgggaggattgctttggcccactggaatgttctgccaggagggggtagtttagagcctatgaaccacggcaatgagcactgcgagcacggacaatggggggctggggttggggtgggctccacaacgctgaaagctgagctatcccaggacctgggaggtgaccctgtggctgccgagtttctctctggatgcacaccatgtctatcaaccctaaggaagggtccccactttgctgggagcctcgcaggctgggggcacatccccaatccctcggggcaggctcagatcctggcacactgacattgccagccactcctgggcacttgctgtgtgccgacccaggactaggagctgcacctgggccccaggatgtcccctagtttgcaaatgtggaaacttgagtctcagagacttagggacattggcctctgtgaatctcagggctgcttctcctgaggcctgaaccaggcctggcactgtctgctgggtgcgggcccagccctgggaggacccagcaggggtgctcagacctcccatcccatggctaacccaccgctggggaggaaacctgtggacacttgcactgaaaaatgtcactctctacaagtatgcaagggagtcggaccatctcccatcagacctggacacccgccggacaccacagcccctaacactccggccaggtcgctccaggctggcacaggtggcacccagccagtcacacttaaagcagggtttccctggccttaccatattatcactccccaaggaaggaaatgcgaatttttaattaagtgaattaaatgctaatttaattaagtgaaaaaaaaaaaaaaaaaaa

SEQ ID NO: 744 - DNA, 1266 bp, Homo sapiens
  SITE (641): n equals a,t,g, or c
gggagagagaaaaagagggaggaagaaagggaggaaaatagttaaacaagcaagatgaacagaaacaaatatctgctatactctgaatgtcaaaatggaaatagcctgtgtaaagttctgcaaaaccataaatgtaatagatttattttaacaaggtaccaaagtactgtatgtttaagaaatttatcatttttcaacttcctaatttatttctggatggtgacattttaatttaaataaacagcagctgacagtatgacactggagttgttaatccaactattcttgtgcctcatgtgggtgttaggaattaaacttactatttgctaagcagcttacctgacaagagtcagattttttccccctaaagaaaggactggcactgtagctgtatgctttattataaatgatcaatttgttaccctcctataaaacagtgggcatttctccgtagactactctcatgtatctggagaattagcattgtttccatctwccagaataagacacaccacaccacacacrcacacacgcacacacacacacacgttaaagctaaaattctaataataaaactgattaacttttaaacatctagccatgttctcatcaaagcattcagctttagtagagatataggnttatttttataatattctaacattagcttaaatgtttcctaattttatcatgtggaattaccccctatcaatcacacgttttgagcatcttcatttgtgatcctttgagaagggagtgtgtatatgtttatatatacmcatatcaatacatatcatttacctaaattggtagattgagttgtcagagagagtttgatcaaaatatggcaggttgtttcaaagatatggttgttgtgtggaccagatcattgctgagataatgtagccaaatcacagactggtaagctagactttttcaatcacatagagtctgtaaaatacttcagaatttaaataaaactccattgctcatgcaaaactcatcagataagttcaaggagtcaatgacattgatatttcaaaaactcaacattggcttcacttgcgttattgacaagcatgtttcttggatctctgggaatttgtaggtttgccctgtggattttgactgttttcaaagttctaatgatttctcagtcgttcttcttaacttcagaaaaaaaaatgcattgttttctcatctttcctatgcaaaaccaaaataaaaaattgattctttgttttaaaaaaaaaaaaaaaaactcga

SEQ ID NO: 745 - DNA, 2902 bp, Homo sapiens
  SITE (1059): n equals a,t,g, or c
  SITE (1064): n equals a,t,g, or c
  SITE (2902): n equals a,t,g, or c
caggcttctaatggtgatgcttctactttaggggaggagacaaaaagtgcttctaatgtgccatcagggaagagcactgatgaagaagaggaggcacagaccccacaggctcctcggacactgggtccatcacctcctgccccatcatccactccaacaccaacagcccctattgccactctgaaccagcctccaccacttcttcgtscaacactgcctgctgccccggctcttcaccggcagcctcctccactccagcagcaggctcggttcatccagccccggccaactttaaatcagcctccaccacctcttattcgccctgctaattccatgccaccccgtctaaacccaagaccggtgttgtccacggttggtggtcaacagccaccatcacttattggaattcagacagattcacagtcctcactgcactaaaaattaaattggacacagctgcagtaacttttcaccccatcattataccagtgctcatctgactgatgaaaaagaggaaagaataatcatttctagatactgaggctgcgaactagttctgtggcagtggactagcataagtggatgtctaagaaatttttcagttcactagactaaaatgttttacaacaaaaagcctccagttagcctcctttctagagtatatgttcagcaatgtgatctcataaaaggaaaaacaaaagatttaagtattctatataccaagtttttgttttgtttttactgtatttattttattgaggttctttatattcctgcctcttcatagtcaaggctcttagtacaggaatattgacttaggaattgtgaaaactccttaagtttcttaagttaaggatgtttggcttttttctttaattttttaaaaaccatttycctatgttaggagtgcaagaatagccagcatttccgattttgacatatgttcattttatgcatatttaagaaattatagctgcatatcccttctttcaaaaaatgtgcttttttttttaaaggaattttaatatatycctttaaargaaagcaatttaatcaatngcaangcaattatataaaaccacaaagaatgtactgaacctactaaccctttaacatacagtttagggtcctagcgcagagtccttgtttaaaggtcattgactcatcatctgtcagtaatgagaggattggaagaataattttgcatacaaatgaggacttaatttgttgaaatataatctctttaagttccttgaaaatggagttggttttttttgtttctaaatgctatctgcttttaactagtagttgcctacatctggggacttcagagaagaattatattttgttagttaagtagacacagtggttatggaagcatttctttacagtaccctttacgtgtttggtttctgaacttaaaattgccctcatacttaataatatggtctgcatttaatatgaaaggtgttttattgataaatctattgtactatttggatacatttgtgtattccttgcagccaacctgtattcgtgggattggtgtagggttaaatcatcaacattatttcataaaataagaatttgttctgtgttatctaaagatgtatcagtatattgtcacagttgtgctgttaactaaaaatgctgagacccctttttatagaaaaacaaaaagacatcaagtcttcttaattcaacccataatcattaagtacttaacaaagaatattttacaagtgatagtatttcaacaatgtgtaattaatatttttgatacagtgatttcatattggaatcattatttgtgcaaagggacagacagatcacttagattgctatactagtggacataggctaaatgtttgcacattcacattcttatcacgtgtagaatacttcacaaaatagtcaacatctaaggccctaatttatgttttgaaagatcatgtgttcccaaagtattccctattgttggctccacagccttaaagtgctatagatttaaattcattgattagttttaatttttaattttagactgtgtatttccataaataccctacgtactggcatatttgaaactctttttccaggttaggtccttttctttctcattgaatcatcttaaatagttcttggccctgaatttagctgatttaaaattcttaatattcaagaatttatacttattttttccttaaaagccacaggggacagttaaatatcttaaaatatctaaaacattttttaaagcacttagattgtcttacgtatgtgcatactatacctttacagcgtttattgtcttgtctcttgtcagtagaccttcagtacacagtatgtgggatatgtcagtcaagttggtcagcaccagcatctgtccagctgttcagtatattgtgattcattaaaaaatctcttctatcccagacatgggccaaggtgctgtatctgagggatgtgctgtaatttgatttacatgcattagagcacacagtagaaaaacgttagcttcattagtaatatgacacatgtatatagtgagatgtctttattgtgtgctttgcatattttgtaaatattttgcacgtcattatttttcttttttgtttaagcagtgtttggcctggaagagtgatatgcttgctgcttaatcaaaggattaaagatttaaagatgtctatgtcttctatttttatataatttcatgttctatgaggaatttagtacctcttcactgtgaaattcgaaataatgatttttataaaagcaaaactagaaatcttttaatgacaattttcattaatttcagggttatcatttttgagaaatctacaccaaagtggttttttaaaattacmtaactaaaaataaaccacaccgtggggttacctcn

SEQ ID NO: 746 - DNA, 1328 bp, Homo sapiens
tcgagttttttttttttttttttgctttttaaatttatttttaactgtttctcatatgtagcaacccctcctcccctcctgggcatgtttacacaggctctgctctgggggctggcctggctgtgaggtttctggggaggcagagaggcagggactttggggccttagtcaccatccatggtatcacctcatctcacttcctgtgagggacagggcctggctgatgtgatcccagctccccccagttcaggactgtctttcagctcctttgcccctggaggtgggggctgctggctgaggaggggtcaaggtgagttcaagaaagctacctgtggaaaatggaccaggttgggggggtgattgcaaagtctccccaaagcctggctcctcatgctcagtgccaggggcagaacactggggagccaggtatagagagccttcctgtcataactgccagtcctcttcctccaaggcctctgcatattctcatgttcccctcacccatcatgccagccacccctatccctcttctagcagggccaagatggggacagcagcagccctctggccttgggatgtgatgataaagcaagcctagggccagggtttggggagcagagagagccaagaagttgaccacgtgtgatttccagcccttcccactgggacttgacttcccaggtcaaggagtccgtctcattctggctggtcgagtgaccagaggcctgtgtgaatgtgtgcacctgcttttcctgcctggaatgttttctggctcagctgcagcaacatctgtgagcccagtgtctgccctgtgtccctgggctcgctccaagtgcaggaacatacatgcagggcccaacatgatgatggtgtgaagggcaggaaacagtcctctgaaggagtggggaggtgggcagtctgcccccgccaggtaccatcgcctcctgccagcttccttagaccaggcagggctgccatggtgctagctgcaagtccatcagtattgaccgtctcgctccatcttggtcctccggagtcccaagtttccttttcatcaaatctgacaagagagaagaaacatgggtgtgcttggcccacagggcctggtggtgatggacctccccgctccctcaagctctggatggctgcagtgttgtactagactttgttcaggctgttctcatctcagtattgccccttcctttcactttcacacttcatctcattcctgttgtcactttccccgaaacgaataaagtctccccagctcctgctgtgtaggctgggcagaaaccacaaaaaaaaaaaaaaaaaaaaaaaaaaaaaaa

SEQ ID NO: 747 - DNA, 590 bp, Homo sapiens
  SITE (27): n equals a,t,g, or c
  SITE (37): n equals a,t,g, or c
  SITE (58): n equals a,t,g, or c
cctaaggggaccaaaagctggagctcnaccgcgttgncggccgctctagaactagtgnaccccccgggctgcggaattcggcacgagtccaggtcttattcagatttcaccagttcgtgtgtgtgtgtgtgtatgtgtgtagttgtgcactttaaccaccaccataatatacagaattgttccgttgccacaaaggaacccttgtactacccacttattgtcacaccttatcacccatcctttcaccaccttccctaacccctggaaatcactaatcttcactgtaattttgtcatttcaagaagttatgaatggcataatatatgtgatacaaacatagcatatgttaactttttgagaatgggtttcccctccacagtatgatgctcttgaattccatccaagttttattatatgtaccgatagtttttcgttttttaacagattgctgtggatgtaccagtttgtctgactgctcactcatctattgtaggacattgggttgtttctagttttgggctattaaaaataaagctgctatgaacatttgtgtataaaaaaaaaaaaaaaaaaaaaaaaaaaaactcgag

SEQ ID NO: 748 - DNA, 752 bp, Homo sapiens
ccggccgctctagaactagtggatccccccgggctgcaggaattcggcacagcttcttccatggagctagaaagatggcatttggcctcctctgcaaatcccagctcacaattctacctccagggaaagactgaatgtactgcctcagctccattcaaaaacagttctgggaaagattcggggtggcctgctttgattatatgtgcatcctcttctgcacccccatctccttatttctctgctggcttcctggaccatcgcttgagccatgggtggagagactcctgaaagaccatcacaggcagccctaactagactacctgattgaaataagcagcagcttttcttggccgcaaaggggaatgctgctcacagaataagagagcagggcagagcttccaagtgtctacacagcctttctttcccttatgtaaataaattaattcattattaacatatctcaacracacgaatctgacctcttttaaatttgggtggtggaaagagacttagatgcaaattgtggttttattcattctgtgactttgggcaaataatttaccttctctggaagcaaatatgttaatttcccttttctataaaatgacaatggaactagcatcttaataattttattgtgaatattgcattatgtagcatatttcaatgcccagctcagggtcagacacaagatagacactcaataaatgctgattttcctttcaaaaaaaaaaaaaaaaaaaaaactcgag

SEQ ID NO: 749 - DNA, 419 bp, Homo sapiens
cggcacgagcctccaagcccctgtacataacctggagcgtgtgaccttcagagcttttcactttatgcaaaatggctcctgtgagggctgcaagctggagggtggtgcaggccttgggccacagggaggcgcctgtggaatagggggagttcatgcaccccttttttccccagaggggctggactcaggttagtttgggggtgggggctcctgcactttgccacaggcacggggagggttttctcctcaccccctctgccctcccaacttgggttgtactttctaagaaggtgattccccctgcccttgcccccttccccagaacaaaacatgttgatcatgtgcaatatttcttactgtgccgagaagccgcaatgagcgagattaaagctgtttaacacaaaaaaaaaaaaaaaaaa

SEQ ID NO: 750 - DNA, 949 bp, Homo sapiens
  SITE (2): n equals a,t,g, or c
  SITE (940): n equals a,t,g, or c
  SITE (947): n equals a,t,g, or c
cnacaagtacaggttatcaagtttgcacttaactatgccaaaaaaagtttgaagcgctctattctcagacatgctgtattattacttctcattcaagattgaaaaatataaaggtatccaaactctgtcttaatgtaaatgtaactatttttccttcaagtgttgactagggagtcggtttctctcttaaagacactcactgtacaactgaaagcagctgtcatatttctggcaaaatgtgtttacgtatctgacaagttgtacatttgtgtatgaactgacataaaatgtgaaagcctgtaagtgtacatgtagtggtgtggtgttctgtctagaggatacaactgaatgtttttaatttgctgacttacagacacaggctgtttacaaaatgctagctggaaagtctgtaatgttcatgtcataacttttagttaattgccattgagcacctgttctgaggaggtgagatgtggacttgtgcttataaactggagagtttagtcataatccctcctggctttgtgtgaatagcttgctcactttgctggcctttgaaatgtgttctccgtgataagctatccatgtgtttgtgataagagtgcttgtcaaccatgaccatctttgagccttcctagtcctccacctggcacagtatttgaaatggcaaaggatgtgcttcatcctctaacagtgtacactcccagagctgatattctggattttgactgtgcacatttcctctagttcatgtctgtagtccctatagaatgatctgtaataaaatagtatactggactgtgcatcaaagggatgtaaaattacagtattccaaaggttgaagttctgctgttttgttataatgcctgatacacatcttgaataaagtcttaacatttttcttttaaaaaaaaaaaaaaaaaaaaacycgagggggggncccgtancc

SEQ ID NO: 751 - DNA, 440 bp, Homo sapiens
ggcacgagtgacttcgcctgtgatggacttccagtgtgagcactggccagagtgaccaggctgaccagcaccagccctgatccagatgcagaggccaggatgtgggcccagccctgtgccaggaggctggctggaataaagggatgggcaggctggcatgggggcagccgctgcccctgcctgggtgttgctgtgtattcctgccggccaggggccactgccaggaccacgcctcccttttcatatcccgattcttaagttctgctattgtggtattctggtggagaaaaaagaaccgcgtggctgtttttgaactgcctggaacctaagaccctgaattcttttcccccccaaggggaaaatctatatggaaaacatttattttaaaatacaggatgaagtgaattaaaagatttaaatgcaaaaaaaaaaaaaaaaaa

SEQ ID NO: 752 - DNA, 1504 bp, Homo sapiens
  SITE (3): n equals a,t,g, or c
  SITE (283): n equals a,t,g, or c
  SITE (1396): n equals a,t,g, or c
cgnattgcaggacatcgtggtggccatgacggcggtgggcggctccatctgcgtcatgctggtggtcatctgcctgctggtggcctacatcaccgagaacctcatgcgcccggccctcgcgcgccccggcctgcgcagacacccctgaagcgcgaggccgcccgcccatctttgcgccacctgcctgagggcgcctgagctcccaggtcctccgcccgctctcctctcctcattcctgctgcctccttaagatccccgcggaggaggacctgccggcgacggnttccggcactttggsatcatcacacgccctttccagccgggcgtcagaytcccagaytctggccccggattggcccctgggyttgcgytgctgtgccagccgcatccaagggytytccccgctctccgcagcctttatagaggcggccagggcatggagccccttccagcaagagccatgggcactccggctyaccccgcacctccatcctgtgccgaattgtcccagacagaccgtcgccattgctcggtcactgtgctttgcaggcctggggcgcakctctccaagcctgtcctgccccgccccaccccactgggcttaggttagcttcgtgccttagtatctcgggcccactgcaggagccaacaccctctgctgtccagggggggtctgtggccctaagattggccggcctctccatgcatctggccagcgtccccttggagacaccttcaccctcaagcgctgcagaagcatgaggtgagggcctgcagcgctctgtaccgtttagggtgttggaccagccgggagcctggcaggcctggcccagcggccagggtgagtgttctcagaccccgggcagctggtggttctccagggccaggtaccccttttgtgtgtgcgacctctgactaggtccctgtgggaatggggcagatggcggccatcaccactgggtcccagggcagaagcttagataccggccttgagcagcccgaccttccaccgctgcctggatcccaagcctcagccgacccaggggaccttggtggcaacggtgtgactgacagcaccacccctagcctttgcatgcccaggggtcgagagccagtatccggcccagacaatgccacccgccatggaagaaaagctgaccctgcccacctgctgcagacccgggccccgggccgaggttgctttctgtgacgaccgcctggtgacgctggacaccaggagggttatggcactgccctcccctcctggagcccctggcactgaccacctggacttgacctgactcctggtcactggccaaacacccatcctcaccccagccaccccgggccctggctggtgccgtgtgacacctgtagcccacctgtgtgtctttsntccgcccacccctgcgtgcgccggtcagcgcaaacctggcgccagtgtctaaatgtccatcattctcagaccaaaaaaaaaaaaaaaaaaaaaaaaaaaaaactcgta

SEQ ID NO: 753 - DNA, 1635 bp, Homo sapiens
  SITE (6): n equals a,t,g, or c
  SITE (24): n equals a,t,g, or c
  SITE (34): n equals a,t,g, or c
  SITE (1615): n equals a,t,g, or c
  SITE (1630): n equals a,t,g, or c
gtggangcgctctagaactatggntcccccgggntgcagattcggcacgagctcgtgccscttctgtgtctcagggtaatactattcagagtcgcccctttgctcattttctcccgtatttgttaccttcctgaggcctcagtattagtcgtgagcacaaagttttgagacctttggcgttgtttcttgatgtgggaggggaggtgttagtgcatgcaagggttgaactagatagaccctgccttagtagagggtgggactataaccttagaggccagaacttgatccagaagttgctgtccacagaagtgctttctatttcatcatttttgtttctagggctctttttctgtagccaggtcttcccaaggattttagtatttgcattggagttgaggtttactctaatgatggtggcccagctgtgcccagaggacagccaggcaggcccygggagggagtttagaaagacagtcctggtgaatgggcttcaagtggtcacaaagagggtggctgtgaggtgaccccagacactgcagaacgatgtgcaccctctgcgttttggatgtccttggaatgtgggagcctagaaataaccctgtggatggaattggggcagcggctgctggagatctgtgtgccttgccttccttcagcaggaccgtctaggtgcgcagccacctatggatgcgtcccagccagccccgtcgctctcgtccatcctcagagacaaagaagagggcagggagtttgggcttggttttgaactttcctttcaatgtagcaaagcattcctagttaaccagagccttggaatctactgcctgctggccaggctttaaaatgaaaagtgttttaatgctgccataaaagggaggcgggggggaggaagggaaaataaaggcatctttccaagtactcatctaatttaattgtcaaaagattgataggccatgaattacttctccatctcactaagggttaaaggcgtgcaaccccccactggctgtgtcccctgccaccgaagtgagtgacctgccctacaaccaggtgggaccacctgtgctgcagtccggaggggcttctgcaggaagcactcaccccccacacsttccccggcctgagcttcccctacctttcgtcaccacctgagggcatgagcacaggccatggggcgtgcctggtgagtctgcctgtggttcaggcttagcctgtggtctcctgtgtgctgctgcccgcatgggatgcgcaggggaggcgtggggatccgcaggagggtggttgggatacaccggatacctctgctctcattgcttgtttscaaatgctctatggacatttgtgtgctaaatcctattaaataaaaaagacgggttaaaacccagatgctgtatattcatttgtaattatgtataaagtgaagcagttttaaactgtaaagatttttttcagtgtgttttctcgaattttgccacaacatactggcttcgtattttatttatctttctttctagttaccagcttcagacccttgtaaagtctccctcagccctttcaaaaaataataaatttcctgtgaagttaaaaaaaaaaaaaaaaaaaaaaaaaaaaaaanaaaaaaaaaaaaaanaaaaa

SEQ ID NO: 754 - DNA, 2141 bp, Homo sapiens
gaattcggcacgaggctgcatggcattctgtcaagagatgaggacactcctgttccttagcctggcattcaaggcttgccataatctggtcacacctcttattccagtctcatcttccatatttccagccacacaccgattcccagtattcaccatttcttgagttttcacactcatacccacccccaaacattggctcattgttcctcccacatggaaggctccttcccagagctctgggtcttaattccacccattctacagtgtctttgaagtcttcgttcctcctttcatttgaaagttgacggctccttcctctaagcaaccagtacctctcttcaaatactcggtattatgtggstaaacacacacaaagcaaaattttactagactctgagcttcttgctggcaggggacgttttttatacattgcggcccccagtgcctggcctgtggtgaatgcccagttaacgtgcgcatgaacaaccaaacgtgctcaaagctgcctttctcctgccatgtttgatagaagcactttgtggaattctttcagtctgcggatggaagactacgctgttgcccagttcactgctgctttcctttcttacaggaattacagaaaggagaaagcactaactgaagaaatggtgatgctctcagtttctctgccttccctatcagcagaaaggctcggggaaggccctcagcctcccagtctggtgaagcttcctgtatggtccatgaccgtattccaccccaggctctgggaggctccctgagatgtgctgtccactaagcactgcacaaacaagcaatcaaattatgaataaacataataaatatcagccgtgcgtgactgagtgatggctgcagtttctcagtatccctaggttctagttggtgcagttgtctctgctgtcctttatttatgggagaaacataggcccaggctatccaggctgcagtggagcctggtgaactattctgggggccctgggaactattttcattgtttacaaaagcccaacagaaactgtgcattttcccttaagaaagcttcatgggctaactaaagcctcatgccattctgtgttcagtgccagtcatgacagctctgcttgttagcatactacttaaatataactagaatgattcaaaactcgggttctgtgatatgaggatatagataggttttcatctatttcctggcttataactcccaaaacccttgttttaggcttttgttataatgttgggcacttcgggcctcagaaaacagcaggctgtttctcagatcttctcctgacctcctttcacctgctgctttttctccccaaggcaggccatagaaactaaaagtataatcttcctttgcccgtcttccagttggccataaaaagaatcctctgacctaccttgtctgattttaggtcatgagacccccatttcagaagggattctgccccatacctgagaggaagaaatgtagacaggccttgttggacttccccactccatctgtattagattatgcctcttttgtccaatcccatttctccagtgttgtccatgcttcaatcatccctatccaatgaggtctccataaaaggcccaagaagacaggtttagagagctttcggagaacagaacacttggctttgcaaagtggcacgcctggagagaacttggaagctccacgccccttctatacctcaccctatgcatctcttcagctgtatcttttgtgatatcctttataataaaccagtaaacggacctaagtgttcctctgagttctgcaagctgctccagcaaattaaaaagaaggggtcagccaggtgcggtggctcacacctgtaaccccagcactttgggaggccaaggcgggcagatcacaaggtcaggagagcgagaccatcctggctaacacagtgaaactctgtctctattaaaaaatagaagaaattagccgggtgtggtggcgggcacctgtagtcccagctactcgggaggctgaggcaggagaagaatggcgtgaacccgcgaggcagagcttgcagtgagccgagatggcaccactgcaccccagcctgggcgacagagtgagactccatctcaaaaaaaaaaaaaaaaaaactcga

SEQ ID NO: 755 - DNA, 2414 bp, Homo sapiens
ggcacgaggtaaactggtttttggtgaaattcggctcggcctcatgcgaacctatctaggtccgtctctggagtggcctgtcatcgatcgcgccctccatcgctgagcgacacaagtggaaccccccaggactgcattctgcgaaactaccctgcttttcccccagttttggtctgtgaacacatttgggaaattcttctgatcctaccgctactctcttgaggtacagtaaattgtctttgacttccatcaccttttgtaatattacaattgccatctactgagttcctatgatctgcctggcattgtactaagtgctttatattttcttgttcatttttttatgccaacataaatgagtttgactcaattcttattataacctgccaaaataagtattcctcttcctttttacagagagagaaacaagggaaaaaaaagttaattgcctgaggatatactgctagtgttgcgggacaaatagagacgggagaggccaaacagaattcaggacaaccctttattattaaggtgatcactggctcagtcggactggggtccagaaagtctgagcccggaacaaagggatcaatcaccttttaagcaatttgtggcgggagtttggtgctacaggaagcctacttgcagaagcaagaacaaaggcagttaattattcttttacatttgttacaccacatgtcttacatccttgggaatgcatgcttttgttagcaattgcttatcaaccttgtgactttacagcgcgctagggagggaagcaggaactcgtggtgcctcaaggaacgtgaaacggtggaacacagataagcctctccgtgcgtagaggagaaataagcggttaatattctctcttaacccaggcctccggagggtggggggctatatttcattctacctctaaggaaaagaataaacttcttgactaatatacttataaaattcattaattcccccttcactagtaaataataaatacctgacttaggattccaaaataggtcttgaatttttctgcaggagctcctcaaagtctctgaattcccacaaccttttattagatcacttatcccattgtattataattatctgtttaacaatttttcctcacccctaaaggaccctgagcttctggaaggtagggactgtatcttaaaatcttggcatttctgatgtctagaatatttcatttaagagaagggcttagtaactgttgtgtgggtgggttgatgagttaactgtcaggcaggtgaactaataggctgaagataaagtttttcactgttggaagtgaatttgggattagtcatcctaatcccctcacttttagagatggggcaactgagtcatgcgcggtggctcacgcctgtaattctagcactttgggaggccaaggtgagcggatcacctgaagtcagggatttgagaccagcctggccaacatggcgaaaccccatctctactaaaaatacaaaaattagccaggcatggtagcaggagcctgtaatcccagctgttcgggaggctgaggcaggagaatcacttgaacctgggaggcggaggttgcagtgagttgagatcgcgcaattgcgctccagcctgggcgacaagagcaaaactccacctcaaagaaaaaacaaaacaagacatggggcagctgaggccttttgtataccaggcatttatcgagttattcatgtgggccagtttctgtgataaatgatttgcaaataatacccaacttaatctgtattgttatttttatttttacagatgaagaaacagctcagatttgaccaagatcacacaagtaggagttgaggaattggaacccactatgactgactccaaattaatatagtgtttatagccacttacataataatggtaaaggttttatttttttcactatacaatatgtagtagataaatttactgaggaaatgagacagcacgtgacaaatccttaaaggatacacacatgacaggaaggattagaagaggaaacagaaacaggtaacagagaagcagaaaaagtaaaatctcccaaaataaaaatagaaggaattaaaaataaaagcagactccgggtgcagtggctcatgcccagcactttgggaggccgaggcaggtgaatcacttgaggtcaggagtttgagaccagcctcgccaacatgatgaaaccctgtttctactagaaataaaaaaattagccaggtgtagtggcgtgcacctgtaattctggttacttgggaagctaaggcagaagaatcacttgaacccgagaggcagaggttgcagtgagccaagatcatgccattgcactccagcctgggtgacagagcaagattataaagtcttctcaataaaatcgtctcaaaaaaaaaaaaaaaaaa

SEQ ID NO: 756 - DNA, 929 bp, Homo sapiens
gggacagctggcctctgtgcagtgggtggcgggggggtgctggacggctggcctctatgtagtcggggaggctggatgactggcctctgtgcagtgggggcaggcgctggatgactggcctctatgcagtgggtcggggggcctggacagctggcctctgtgcggtgggttgggggggcctggacgtctggcttctgtgcggtgcgggggccggcctcgggccgktgggcaggctggaaggtcagccaggccctgtggtgtctttagtgagaaacaggaaataaatcaaggggatgttgtagaagttttaccgctgctggtttagaagtgtttgtttttattatttgtatataatgtgttgttttcagtcttgcactggtgtttttaactatcgtgtaaagatgcaaacagcaggccagaaaactgccttgatatatcacattggcaaagaccaagcgcaccccggatcctagtgggtgagccggacccattggcagtggcctttgtggtgcctccagggagcctcacgatgctcacgcctctgaccagtggttctgcgctcagggcatgaccggagatgtggtctgggagttggttgtgtggatgtttgcgttgccagcgtttacaacaacagaggggaacagcccacagcccagcagtacaatgaggatggtccttgtgataaatgggatgctgtgattagattgtttctgaataagctaaaatgctcaaaatgtgatctttcttttataaaaaggccaggtatggtgatacgtgcctgtaaccccagcactttgggaggctgaggtgggaggatcccttgagcccaggagttggagaatgcagtgagctgtgatcacaccctctagcctaggcagcagagcgagaccttgttctaagaaataaaaaaaaaaaaaaaaaaactcgag

SEQ ID NO: 757 - DNA, 3940 bp, Homo sapiens
  SITE (11): n equals a,t,g, or c
  SITE (17): n equals a,t,g, or c
  SITE (1584): n equals a,t,g, or c
ggcacaggganaacganctcaggaaaaggaaactcctctgatcatgaagggtgttggaatgaagaaagctggacatttagtcagagtgggaccagtgggagcaagaagttcaagaagacaaagccaaaagaagactgtctccttggctccgcaaagctggatgaagaatttgaaaaaaaattcaacagcctccctcaatatagtcctgttacatttgaccggaaatgtgtacctgtcccaagaaaaaagaagaagactggaaatgtgtcctcagaaccgactaaaaccagcaaaggtcctttccakkctcagaaaaagaacttrttccrcaaaattgtcagcaaatrtaagcacaaaaaggagaagcccaatgttccggaaaaaggaagtggggrtaaatggtcmaacaagcaactcttcttggatgccattcaccctacagaagccatattttcagaagacagaaacaccatggagcctgttcataaggttaaaaatatcccatccattttcaacactccagagccaacaacaacgcaagaacctttggtgggcagccaaaagagaaaagcaaggaaaaccaagattacacaccttgtcaggacagcagatggccgggtatcaccagcaggaggtactttggatgacaaaccaaaggaacaactgcagaggagtctccctaaagcaactgagacagactgcaatgacaaatgctcacacaacaccgaggtcggggagacgcggagcagwactccagaaatgcctgccgtgtctgcgttctttagcctcgctgcgctggctgaagtggcagccatggaaaatgtgcacagaggtcagaggtcaactccgctcacccatgatggacagccaaaagaaatgccgcagctgcctgtacttatttcctgcgctgaccagtgaagcgccctttcattgtaaaacattgtgctttacctactaccctagccttgtctttaccgagggatgctagtgagtccaagtggtggaaaatatagactgcaaacaagtgcttgttgccccacacggcccagattcacttgaagcagaagttagcatcctgggccagtttgttctctcagaacccagaatctttgagggtaaggttatctgtctgatactgagcagaaacagaatgatcctggagctttgctttctattgaaggcttttgacggtaataggtggtaacttggtaaaaggctgcctttactgtagctcacccagcatctcttttaccaaccagagagtgtgaaactagtttcatatattacctagttattctttcaaaacaaaacaaaaaaaaaaaaaactgacgcactgcactagttattattagatattcttagtcttttttgtacatggagatttaagtttaagatggtttatataataggttatacctacatttatattgtagaataaatattaaaaagcctgttccagagactcccaagcagcctgggcaggcagatgtaccattgttagtggtgtatgctcggcctcgtggtccatatattctgcacttttatatttgccaccagaatggtagtttgctggcaaaaaaaaanaaaaagagagagagaaaaaattacaactcttacaatctgaatttttttcttagccttgagtgaccaagaagaatttgcttgaggcaaattgtggcaaatattttcccagacaggggaagagtcctgcagattacagattactggtgttttcatgccttgaggattcttttatttttacataggggtctaagtgaccaatggattgttcatacaaacaaaaaaaaagacaaaaatattattcagaagtgaccttagtattacttcactattctaaacacattgaagacactcacttcatgtggacttggagctacagaccttttacatccatcacagattggctggacgggttgcaattgctatgcacagcctgattggcactgcaggtttttagagccattttgagtttgtgttgtttaggaggtactgagtcaatgatgagggaggtatgcctgaccagagtgggactctcagtcatagatccacctgcaagtctctgtttcctttttgtgttttgktgcttttgaacataaaaccaaccatacataagcagcgccaagtggattaactggcttagaacattcaacatattgacttaaccacctgacattcacagtgtcttgtttcctagcaacagatgcaaagtgataaatcaaaattagtctgaggctacagattttacagggtatttgttctatagcacaaagtatttccccactcttgcgtcacagcacaaactaccaaattttaattattggattccagcaataatttttaatggktttcaaactggcggaattttgacagtgctagttcgagkttgaagcttttgaattagatctctwaatggkgacagkttacatggktttawctagctttcttawttatacttgactgaattgtaatgattttttttctaattgtaatttgacgtaatagccatacaaaaaatgactctattcatactaggtttagcttctcatggttgtagatattacttcagttccggtgctggaaaatatgtacaacatactaacaggattrarrraaaaatagaggtttttcttcttgtttttttttccaaagcaggtaaagagggtagcaaagcatcggaatgatgtgctcaaaaatgcatattcctggtggggatggaggaagaaggcattagtaaaaggttaatcaaacgttacaacttaaccccattcatgyaggaataaatcaagtgagcagttccagacttttgcataatatttttactatgatgctgttttattaatattttctaaatttcaaaacaaaaagtgaatgtttgaaattgctgggtcccgatgttggtggctgttggagttttggaccactcgctagcagtgatttgaagattataattagctaaaatccaaaacaaaaaaccaacaacaaaaattgtatggtgcggaacatgcaccttgacaatggtactaacttgttattctatagaacacgttagaatagatctatttttgccagagcaccctccttcagtcctccgattacatttcactagagttccttacgagattgctgtatattcctgggaccttttttaaaaaaaaaaaaagcaaaacaaaagattactttttttctatgtgattaatatcttacttgatctgcttttcctaaacctcagtggcttttcccttaggcagggttgggggtgggagggcaacttactggagatgactgttttcagatactttaaaacaaacctttttgtagaaatgcttaatttttaagcggttaggcactgagagtagcagaaatcctgcaaagctttatagttccttagactcaccttgtcgattctctgagtaaagtcttgatttcaataattgtgcttctcatgccctgaatctgctggagaggagtgttgttattttcaggtaacaacattcgttagcacaaatatttcagaccaatattagtgctctccaccccaccttttgttatcattttcatttcatttctctcattcttttttattttggaaaatcatattgctatagtgtgtactttaatctgccagcagataccatctacactaacatttgtcccacagcatcctcaagagaaaaagttgttgcaccttatatatatctcaagcaaaccaaaatatgatgctcttctgctttgttttattctaaattgttgtatcatatctttctgaaaccattctgaatttagttgaaattatcaatatttatgcttttaaccttaatttctggattcaagcctgtatataaatcttttgaaaaaaattgtcctagcccttctctgcgatgctggaagtagaagattgcgtctcagattggagacgcag

SEQ ID NO: 758 - DNA, 979 bp, Homo sapiens
ggcacgaggagattggtttcatagtaaggattctttctttaaggtgatatggagcaactgctttcacaggggcaccaggttggtaaaaactcaaagctaacaccattcagaacttacctaatgatgtttgaaaaagaggcggtaggctgataactgcttcctaggaagacctaccaacttcaccagcatgctcattactctcatcattgttgttggaacattttgttcttgggtacaagcttactttacacacatctggttactatgtttgttctggaagacggcagcctcatggagtgactagagaacacttgatactgagctctggaaatcgttttttaacagctttattgatattgtataatttacagatcatcaagataagccctttaaagtatacaattcattggttttttgaatatctacagagttgtgtgaccataactatagtccattttttaaacatttcatcactccaaaaggagactttgtacccatcctccctacctctctcttttcctcccctagctctaggcagctttctttctttttctttttctttttctctttctttctttctttctttctttcttttctttcttttctttctttctttccttccttccttccttccttcctttccttccttccttccttccttccttccttccttccttccttcctttctttctttctttctttctttctttctttctttctttctttttctttctttctttcttgatttgcccattttgaacatctcatatgaatggaatcatgcaatatgtgagaatcctgaaaattttgatttgattttcaaagaccgtgtagacaaacatgacctggttactctgcaggccccatcttcccaacagtgtcctgagtgtgagattaagaccaaatgaactctgtcagtgctgccaactgttttattggattaaatgacttgtttttggccaaaaaaaaaaaaaaaaaa

SEQ ID NO: 759 - DNA, 2105 bp, Homo sapiens
ggcagagtcagtacagagcagcgtttctaaagcacaaatgtgatcattccctcttgcttaaaattacacaatggctttctcttagttattggccaaaatctaaactcgttggctaaactgttcatgatctgactatgcttgccctttctaccagtctcccttatcacacttactttctagaaaactgaactgtttgctgttttctgagtaagtcatgaaatttgtgcttttctacctttgcacaggttatccccttttttgggaatgtttctttattttgtaactgtgattcattcttaaacatgtcatctccagatatctctgactctccatctttttaccctagagtttggcccatcattttgtgctcaaataagacattaattgcatccttcatagtatttaggacaaagtattatatttgtgtgtccaccatgccaaatagatgacagctcctttctttagagtaatatttctataggagtagaatacagtgttaaagagtacaaactttttactcagttctgattttggctctactttttaaagtagactatactagagatataattgcctcatactaaaaatsagatgataatactatctgaggatgacttgtattaagtgagataatgcatctaaactagtgttgtctggcacatggaaatctcttagtagatggaagtcacattagtatcttcagcacagattcattattcagcaaatatctgttgaataaatgatcacatatcaggtactcaggatatatgcactgttaactggtagtatctaactcggtaattggktatctacttagtatctggtaaggatatataaaagaaatcttatttctgtagaagcctycacaccactaatamcagtaataggaaatggctaagaaacatacaggatattatgtggttacacacttttataaaaggggagaattcactgtaaattctcaaatgatcagtcttacatgatcaaaagttctaaattcaacatttggattttattctgtaggttgagtaatggcaattcatggaggttataaagcagaggacaagcatgatcgaattggtcctttaagaaggataaacaggtgatggtttagacagtgatagggttggagggaaggagtagggtgatgacacctgaaggaggtggataagtgggaatggagttgggcctatgaatgaaattcatttgaagaaagacatatggttttgagtatagagaataagagacagataggagtcaaagattattctggccatgagcctggatgactgagagaatgataatatcattggaggaattagagatgtggaagagggatcttgtttggggaaaagtggtctagggaaaatgagtttacttggggcttattatttgagttgttcaagtgaaaaattcttgtaggctcttgtagatacagaattggagtaaagatgagagactggtgctgaatgtgagtactagtactgtttactaagggaatacttttaaatgtttgtttttttaatgtgttgtttttttctttaaaatcaagaccagttgttacaaagaartaacatgtttkartgtcattgtcgtttaaaaaatatttttacttcttaaagtagactagccaaaaggtcccgaacttggtatctaaaatgaatatggggaataaggattttgaaaaatagctgttgctctcattcttttttttttttttcaatatgagacagggtcttgctgtgtcacccaggttggattgcagtggtgtgatcatggcttactgcagcctcaacctcccaggactcaagcaatcctcacagctcagcctcctgagtagctgggactatagatctgcatcaccacatctggcaaattttttgtattttttgttgagacaggatctcactttgttgtccaggctggtcttgaactcctgggctcaagcgatcctgtcaccttcgcctcccaaagtgctgagattacaggtgtcagccatagcagccggcctattctctcattcttgaagaatgaaagctccatgttatgtttgaagttttacgagttgactgctttgtaagaaaaaaaaaaaaaaaaaactcgag

SEQ ID NO: 760 - DNA, 1491 bp, Homo sapiens
ggcagaggggaggtcgtctagggaatcgaggtgccggctgctccttcctcacaatttggtttgtgctgcaaggggagggtccccatcatctggccccagtggtgtaaggagctgactgggattcagtcactgacttggagccgctcgggggaagtcccgggcaggagcgcttcacctctatgacacgattgtattatcgggatgcctctgcctgtgttattatgtttgacgttaccaatgccactaccttcagcaacagccagaggtggaaacaggacctagacagcaagctcacactacccaatggagagccggtgccctgcctgctcttggccaacaagtgtgatctgtccccttgggcagtgagccgggaccagattgaccggttcagtaaagagaacggtttcacaggttggacagaaacatcagtcaaggagaacaaaaatattaatgaggctatgagagtcctcattgaaaagatgatgagaaattccacagaagatatcatgtctttgtccacccaaggggactacatcaatctacaaaccaagtcctccagctggtcctgctgctagtagtgtttggcttattttccatcccagttctgggaggtcttttaagtctcttccctttggttgcccacctgaccattttattaagtacatttgaattgtctcctgactactgtccagtaaggaggcccattgtcacttagaaaagacacctggaacccatgtgcatttctgcatctcctggattagcctttcacatgttgctgactcacattagtgccagttagtgccttcggtgtaagatcttctcatcagccctcaatttgtgatccggaattttgtgagaaggattagaaatcagcacctgcgttttagagatcataattctcacctacttctgagcttatttttccatttgatattcattgatatcatgacttccaattgagaggaaaatgagatcaaatgtcatttcccaaatttcttgtaggccgttgtttcagattctttctgtcttggaatgtaaacatctgattctggaatgcagaaggaggggtctgggcatctgtggatttttggctactagaagtgtcccagaagtcactgtatttttgaaacttctaacgtcataattaagtttctcttgtcttggcatcaagaatagtcaagttttttggccgggcatggtggctcatgcctgtaatcccagcacttggggaggccaaggcaggcggatcacatgaggccaggaattcgagaccaacctggtcagcatggcaaaaccccgtctctactaaaagtacaaaaattagccaggcgtgatggcacgtgtctgtaatcccagctactctggagactgaggtgggagaatcgcttgagactgggaggcagaggttgcagtgaaccgagatcatgccaccgcacttcagcctgggtgacagagaaggctccgtctcaaaaaaaaaaaaaaaaaactcga

SEQ ID NO: 761 - DNA, 1460 bp, Homo sapiens
atgttcgtatgttcttccacttcagtgaaattctggatgggaaccagctccatattgcagatgaagtagagtttactgtggttcctgatatgctctctgctcaaagaaatcatgctattaggattaaaaaacttcccaagggcacggtttcatttcattcccattcagatcaccgttttctgggcacggtagaaaaagaagccactttttccaatcctaaaaccactagcccaaataaaggcacagagaaggaggctgaggatggcattattgcttatgatgactgtggggtgaaactgactattgcttttcaagccaaggatgtggaaggatctacttctcctcaaataggagataaggttgaatttagtattagtgacaaacagaggcctggacagcaggttgcaacttgtgtgcgacttttaggtcgtaattctaactccaagaggctcttgggttatgtggcaactctgaaggataattttggatttattgaaacagccaatcatgataaggaaatctttttccattacagtgagttctctggtgatgttgatagcctggaactgggggacatggtcgagtatagcttgtccaaaggcaaaggcaacaaagtcagtgcagaaaaagtgaacaaaacacactcagtgaatggcattactgaggaagctgatcccaccatttactctggcaaagtaattcgccccctgaggagtgttgatccaacacagactgagtaccaaggaatgattgagattgtggaggagggcgatatgaaaggtgaggtctatccatttggcatcgttgggatggccaacaaaggggattgcctgcagaaaggggagagcgtcaagttccaattgtgtgtcctgggccaaaatgcacaaactatggcttacaacatcacacccctgcgcagggccacagtggaatgtgtgaaagatcagtttggcttcattaactatgaagtaggagatagcaagaagctctttttccatgtgaaagaagttcaggatggcattgagctacaggcaggagatgaggtggagttctcagtgattcttaatcagcgcactggcaagtgcagcgcctgtaatgtttggcgagtctgtgagggccccaaggctgttgcagctcctcgacctgatcggttggtcaatcgcttgaagaatatcactctggatgatgccagtgctcctcgcctaatggttcttcgtcagccaaggggaccagataactcaatggggtttggtgcagaaagaaagatccgtcaagctggtgtcattgactaaccacatccacaaagcacaccattaatccactatgatcaagttggggggaatctggtgaagggttctgaatatctccctcttcatccctcccgaaatctggaatacttattctattgagctattacaccagttttaacaccttcctcgtgttatgtttaaaaaaataaa

SEQ ID NO: 762 - DNA, 2653 bp, Homo sapiens
  SITE (23): n equals a,t,g, or c
  SITE (2630): n equals a,t,g, or c
  SITE (2636): n equals a,t,g, or c
ccacccaaaaaggtcaacttccnctccaaactcggtcctgaaggaaaaacctggattaatcctttcctatgcagacgtttctggtttacaaaaggacgcagcccyggactacaagtctggaactgacaagttccttatgacccttgacaaatcaccttaacccatctgagccttaaattctcatttatttcctgcataaggagatttggctaaatgctttctgaggtcctttggagtcctgtggctccatggtaatgtgctcctttccttgaagattgggggttttgtaatgttgagatactttgcctctatgcttgtcagctcatgaccagtcctagaagaggagtcgagacataagccaccttcagaggttcaatggaaactttaaaaccataccaaactcttttttaaaattagaattaacaagaaaaaaaaaaagggtggggtttatgagccttagttcttggaggattataagagtacttccccagttttgaggctggacagttaatatactttatatcaattatacatttaatataatttaatttaaaataatttaaagattcttaggagatagtctgactttcctgacctagatgggaatgatcagatagggattttttttgtggcacaggctaaatttgatggtgacatttatattgttgagaatgttacatcttattttaccacaacttttaaaaaatgttacatcttttgcagtaggatcagttgtgaggcacatagtagctgaggctccatggagccacctttcatttctttcagtcagagaggaggacagtctctgtctctgcatttctggtgtcttgcttgtcggtggcagagccatgcttgccggcatttgcttaggyggccatagtagttgctaagtgtacaggtgactgggcagggatgggaggtggccacaggtcagagacaagtgctcagtcagtccctggtgccaggactgtgtgcctcggtgccttgggaaatggaagctccctggtgcagctgcagctgtgggtggaggtagagaagccagcaagaccttggtcttaaccccgtgttcattttcttgctagctgtgtgacgttgggctacctcgcttctctgagtacaaatggtgtgtggtgaatgggtcccaggtatgctacgagctttgagggctgctctttttctcttcatagcgataagtgttaaactgtctttcttaggaaacgttcacagacttgcaacagctgatgtcctctgagtactgtctgactccctcaggcaagttcctgaattcagtaccatcattattatttttgtgtaagactttgacaaagtatagcccctgccaccagagcagcctgtacagtgggtctctaaggtgggacctgccccgggcctgccatgcacgtgtgtgaaacagcgtgaaaagtgtcgcggtaaggtgaccctgggttacccaggcaaggctcggtgtttgtttcagaaagcagagaagtatgtaattgattttaaaagtttctgtttaaaatatttggctatgttttagactatgaaggaatgaactttgcttctctggataagaaagtcacatacattgttccagctccaagtttgttcggccctcgccacaagtggatgtagcgtttggccctttgtgtgccttgctggtgactctggttttgggagctcggatatgtcccagaagcaggcttatggcacttctgtagctcccttgctacccttcctttgtgtctagataagtgactgacatgcttttctttggtctcaggaaagtgggggctcagcaagaactgattaccgagccattcaactagccaaggaaaaaaagcagagaggagcggggagcaatgcaggtgaggccgtgtgtgctgcagccggacgagcaagggcctgagggttctctgtcactgttactggcagaagaaacacagcaggtgtttctgtgctcttggttttacktttctgttcagaatacccttttatcaactccttagttttatttgaacttaagggaaaaaattagtaacaaaattcccagcatcagtatgaacatattttatttgcctaaacaagctttgtgaaagttaagcgttcaaacaccagtgtcagttacctggaaggctactaaggtaaataagcaaagcaggccagttgtcaggaaagcagagattgtgcctggtgctgaatggccttggggcctgatcttggcatggcagagacctggggactgccactgtccccaggtacgtgtacatggagccaaactgtgtgtcctgtggcattgtcagagttatgttgaaatcttatttgaaaatgttagcaacttacttgcatttttaaagaccaaacaagagctggtaacctatggcctcaagcatctgtccttcctaaaaatggaatagtgggatgtagtgcttaatggaaactgctaaatctttttctaaaaactaacagtggatttttaaaatatattgttttttgtgtatttcatttgtcctttgtatttatctaaaagggttgatatgattttatatcttgctctctattcctaatagtattatgacttcttatttaaaataaataacaattgccggtttctgtttaatcagttttcntaaagnccagggtttcaccatag

SEQ ID NO: 763 - DNA, 896 bp, Homo sapiens
ggcacgagctaatttggggtatcactgagctgaagacaaagagaagggggagaaaacctagcagaccaccatgtgctatgggaagtgtgcacgatgcatcggacattctctggtggggctcgccctcctgtgcatcgcggctaatattttgctttactttcccaatggggaaacaaagtatgcctccgaaaaccacctcagccgcttcgtgtggttcttttctggcatcgtaggaggtggcctgctgatgctcctgccagcatttgtcttcattgggctggaacaggatgactgctgtggctgctgtggccatgaaaactgtggcaaacgatgtgcgatgctttcttctgtattggctgctctcattggattgcaggatctggctactgtgtcattgtggcagcccttggcttagcagaaggaccactatgtcttgattccctcggccagtggaactacacctttgcccagcaccgagggccagtaccttctggatacctccacatggtccgagtgcactgaacccaagcacattgtggaatggaatgtatctctgttttctatcctcttggctcttggtggaattgaattcatcttgtgtcttattcaagtaataaatggagtgcttggaggcatatgtggcttttgctgctctcaccaacagcaatatgactgctaaaagaaccaacccaggacagagccacaatcttcctctatttcattgtaatttatatatttcacttgtattcatttgtaaaactttgtattagtgtaacatactccccacagtctacttttacaaacgcctgtaaagactggcatcttcacaggatgtcagtgtttaaatttagtaaacttcttttttgtttgtttaaaaaaaaaaaaaaaaaaaaaaa

SEQ ID NO: 764 - DNA, 2070 bp, Homo sapiens
agaagactaagggggcgtctccccggcttcctgcggcgtcggtggcgagctgaggtggaggcaggctgcggcagacggcgacagtggcggcggcgcatggcagggcttgcaggatccctgctgccttggtgatcccgggctgacagccagagagcacagcggctcagctcctggagagtgagggttgaagaaagcggagggcagccgcctgcgcccgctggctcccattaggtcggttcctgcagcggtgcccggcagccttggtgaaggccctgcccggcagagatcatgtattgcctccagtggctgctgcccgtcctcctcatccccaagcccctcaaccccgccctgtggttcagccactccatgttcatgggcttctacctgctcagcttcctcctggaacggaagccttgcacaatttgtgccttggttttcctggcagccctgttccttatctgctatagctgctggggaaactgtttcctgtaccactgctccgattccccgcttccagaatcggcgcatgatcccggcgttgtgggcacctaacggcctgccctgttagctttccaaggaagcagaagacgggaggggaggcattgacataggtcataaagcattggagtttcaaatcccgcagcctcgcgggtgtcacattcctgacggcgcctttttggcctgtgatgttttatccttacaatgtgaataatggcactgaccggtgcttttattgtaaagtcctatagtcgtgggtggtcttgtggttgtgtgtgttctgtccccatctaggtcctggctggccgcatgaccacccctctcgcctcattactgtgaggagtctgggtccatcctggtcagctgccccaatgtgacctggggcagataaaatgccagtctcattgtcacctctgtgacccctccttgtcagggtctccttccttcccagaatgttactgactcctcagtccctcttctggtttccctttatttctcttctacccttttccttttttggggagtacctgtccaagacagggctcatttttgcacttatctcgaatttgaagagattgctgacgcccgagagcctcgctttttcatccttctttccttgttcagcaggctagacagaaacatgtcttgactgttagttgtccacaaatcttcagtattttctccacttcatttttaagaaaggaagcaacagatagatgttgctctttcacctgggtgtctgggctcaagctttcccgcccagcctcacttcctttgcccttcctcctgcctttctcaactgtcccaaggagggggcctcattgtgtctcccgtgcatgctctgcagcattgaagtatggtgtgttcacgtagttctagcagtccccagctgagtgagtgggagagtacctgtgtgtttcgtaacggccttgatccccttgatagatgtttggatattttttggtgtgccctgtgtgtgtgtgtgtacaaatacatgtgtatattccttttaaagaagctttatcgaacgtggtctgattttgaggtttagcaatagctagctatatatggtaggtgccgctacagtttttatttagcatggggattgcagagtgaccagcacactggactccgaggtggttcagacaagacagaggggagcagtggccatcatcctcccgccaggagcttcttcgttcctgcgcatatagactgtacgttatgaagaatacccaggaagactttgtgactgtcacttgctgctttttctgcgcttcagtaacaagtgttggcaaacgagactttctcctggcccctgcctgctggagatcagcatgcctgtcctttcagtctgatccatccatctctctcttgcctgaggggaaagagagatgggccaggcagagaacagaactggaggcagtccatctagggaatgggactgtgaggccatacttgtgaaacgtctggactgctattctagagcttttatttggtgtgttcgttgcacagctgtttgaaatgtttaataaagctttataaactttaaaaaaaaaaaaaaaaaaaaaaaaa

SEQ ID NO: 765 - DNA, 569 bp, Homo sapiens
cgagaagaaaatagtgaatcactgtagcaatggctttgattcagaccttaaaatcacataagaagaattacaacatgttatggatttttaagtggcaggtattgtaactgttttttgtgtgcaaaatactgagtaaccactgggaaaatatttcagatgaaagggatgacaaaagcatgttgcgctttgcatcagcaaggcattgacttctgaaaaaatgatctgaaaaaagtttcaccgtttgtcttcttacctcattttaagaagcatgtgaaaatgggatactatagactactgagaatttcagaaattgagaacaatttcataataaaacggctatatttgaagagagaatacattttatataaacaggaaaatacatttgacactttatggaattttatgagactttttgtgggaacagaaggtcttcaaattgtaaaatgtaaagattgctctttttattaagtctttaacagggatgtatttcattgtatgttttgggtatggctttggaataaatcattttatattttaaaaaaaaaaaaaaaaaaactcgaggggggggc

SEQ ID NO: 766 - DNA, 1123 bp, Homo sapiens
  SITE (1067): n equals a,t,g, or c
ggcacgaggcgcgatgcagcacaggctagaggctgcgcaaggcggggcccgcccctgggaccctccgggccgggcggtttggccccttagcgcccgggcgtcggggcggtaaaaggccggcagaagggaggcacttgagaatttcggacccaagtttcttcaccatggggatgtggtccattggtgcaggagccctgggggctgctgccttggcattgctgcttgccaacacagacgtgtttctgtccaagccccagaaagcggccctggagtacctggaggatatagacctgaaaacactggagaaggaaccaaggactttcaaagcaaaggagctatgggaaaaaaatggagctgtgattatggccgtgcggaggccaggctgtttcctctgtcgagaggaagctgcggatctgtcctccctgaaaagcatgttggaccagctgggcgtccccctctatgcagtggtaaaggagcacatcaggactgaagtgaaggatttccagccttatttcaaaggagaaatcttcctggatgaaaagaaaaagttctatggtccacaaaggcggaagatgatgtttatgggatttatccgtctgggagtgtggtacaacttcttccgagcctggaacggaggcttctctggaaacctggaaggagaaggcttcatccttgggggagttttcgtggtgggatcaggaaagcagggcattcttcttgagcaccgagaaaaagaatttggagacaaagtaaacctactttctgttctggaagctgctaagatgatcaaaccacagactttggcctcagagaaaaaatgattgtgtgaaactgcccagctcagggataaccagggacattcacctgtgttcatgggatgtattgtttccactcgtgtccctaaggagtgagaaacccatttatactctactctcagtatggattattaatgtattttaatattctgtttaggcccactaaggcaaaatagccccaaaacaagactgacaaaaatctgaaaaactaatgaggattattaagctaaaacctgggaaataggaggcttnaaatgactgcccrgcccacatcatacagtttgaaatgaaactttgccacaaccagc

SEQ ID NO: 767 - DNA, 1255 bp, Homo sapiens
gagatgaaatgtctttcctccaggacccaagtttcttcaccatggggatgtggtccattggtgcaggagccctgggggctgctgccttggcattgctgcttgccaacacagacgtgtttctgtccaagccccagaaagcggccctggagtacctggaggatatagacctgaaaacactggagaaggaaccaaggactttcaaagcaaaggagctatgggaaaaaaatggagctgtgattatggccgtgcggaggccaggctgtttcctctgtcgagaggaagctgcggatctgtcctccctgaaaagcatgttggaccagctgggcgtccccctctatgcagtggtaaaggagcacatcaggactgaagtgaaggatttccagccttatttcaaaggagaaatcttcctggatgaaaagaaaaagttctatggtccacaaaggcggaagatgatgtttatgggatttatccgtctgggagtgtggtacaacttcttccgagcctggaacggaggcttctctggaaacctggaaggagaaggctcatccttgggggagttttcgtggtgggatcaggaaagcagggcattcttcttgagcaccgagaaaaagaatttggggacaaagtaaacctactttctgttctggaagctgctaagatgatcaaaccacagactttggcctcagagtaaaaatgattgtgtgaaactgcccagctcagggataaccagggacattcacctgtgttcatgggatgtattgtttccactcgtgtccctaaggagtgagaaacccatttatactctactctcagtatggattattaatgttttttaatattctgtttaggcccactaaggcaaaatagccccaaaacaagactgacaaaaatctgaaaaactaatgaggattattaagctaaaacctgggaaataggaggcttaaaattgactgccaggctgggtgcagtggctcacacctgtaatcccagcactttgggaggccaaggtgagcaagtcacttgaggtcgggagttcgagaccagcctgagcaacatggcgaaaccccgtctctactaaaaatacaaaaatcacccgggtgtggtggcaggcacctgtagtcccagctacccgggagggtgaggcaggagaatcacttgagcctgggaggtggaggttgcggtgagctgagatcacaccactgtattccagcctgggtgactgagactcttaactaaaaaaaaaaaaaaaaaaaaa

SEQ ID NO: 768 - DNA, 1965 bp, Homo sapiens
ggcacgaggagaaacccagaaacatcagtaactcagagttcctctgctcaggatgaacctgctacaaagaaaaagaaagatgagctggatcctcttcttactcgcactggtggagcatatattccccctgcaaagctcaggatgatgcaggaacagattacagataaaaacagcttagcataccagaggatgagttgggaggccctgaagaagtcaattaatggccttatcaacaaagtcaacatttccaacataagtattattattcaagagcttcttcaagaaaatatagttagaggaagaggactgctgtccaggtctgttttgcaagcacagagtgcttctccaatcttcacccatgtttatgcagcattagtggcaattatcaactcaaaatttccacaaattggagaattaatcctcaaaaggttaattcttaattttcgaaaaggctatcgaagaaatgacaagcaactttgcctgactgcttcaaaatttgtggcgcatcttattaaccaaaatgtggcacacgaagttttatgcttagagatgctcactttgctcctggaaagaccaacagatgatagcgttgaagtagctattggttttcttaaggaatgtggcctcaaattaacacaagtgtcaccaagaggaatcaatgctatatttgaacgccttcgaaacattctgcatgagtctgaaattgacaaaagagttcaatatatgattgaagtgatgtttgctgtacggaaagatggattcaaggaccaccccattatcctagaaggtcttgatttggtggaagaagatgatcaattcactcatatgctccctctggaggatgactataatccagaagatgttcttaatgttttcaagatggatcctaattttatggagaatgaagagaagtacaaagctattaagaaagaaattcttgatgagggagatactgactcgaacacagaccaggatgctgggagtagtgaagaggacgaggaagaagaagaggaagagggagaagaagatgaagaaggacaaaaagtaactattcatgacaaaacagaaattaacctggtctcatttcgtcgtacaatttatcttgctattcagtcaagtttagattttgaagaatgtgctcacaaattgctgaaaatggagtttcctgaaagccaaacaaaagaactctgcaacatgatacttgattgctgtgcccaacagaggacatacgaaaaattttttggcttattagctgggcgattttgcatgctaaagaaagagtacatggaatcctttgaaggtatattcaaagaacagtatgataccatccatcgcttggaaacaaacaagttgcgaaatgttgctaagatgtttgctcaccttttatacactgattcacttccatggagtgttcttgtatgtatcatactgagtggagtaaccattacctcatccagtagaatttttgtcaaaatatttttccaggaactgtgtgaatacatgggtcttcctaaacttaatgcaagattaaaggatgaaactctgcagccattctttggaggattattaccccgagatgatccaaggaacactcggtttgccatcaacttctttacttctataggtcttggaggtttaacggatgaactgcgggagcatctcaaaaatacaccaaaggtcattgtggcgcagaaaccagatgttgagcaaaataaatcctccccatcctcttcctcttcagcgtcctcctcttcagagtctgactcatccgactctgattctgacagcagtgatagcagttcagagtcttccagtgaagagagcgactcttcatccatcagtagtcatagctctgcctcagctaatgatgtaagaaagaagggacatgggaagaccagaagtaaagaggtagataaattgatcagaaaccagcaaacaaatgataggaaaaaaaaagaaaaaaaa

SEQ ID NO: 769 - DNA, 1901 bp, Homo sapiens
  SITE (1425): n equals a,t,g, or c
  SITE (1447): n equals a,t,g, or c
  SITE (1497): n equals a,t,g, or c
  SITE (1504): n equals a,t,g, or c
  SITE (1515): n equals a,t,g, or c
ggcacgagttaggctcgtcagacaccgagtgtcccgagcaaaaacaagtgtttgcaaacccaagtccaacccagaaatcccccgtgcagcctgtagaggacctagctgggaacttatgggagaagttacgtaaaaaatcaggtcttttgtggcatattctatcgcaatcgatgagatcacggatataaataataccacccagttggccatattcatccgtggtgtcgatgagaatttcgatgtgtccgaagaacttctggacacggtgcccatgacgggtacaaaatctggcaacgagatctttttgcgtgttgagaagagcctgaaaaagttctgtatcaactggtcgagattagtaagcgtggcctccactggcaccccagcgatggtgatgccaataacgggcttgtcacaaaactgaagtccagggtggcgacgttctgcaagggtgcggaactgaagtccatctgttgtataattcatccggaatcactctgtgctcagaagttgaagatggaccacgtcatggacgtggtagtgaagtccgtgaactggatatgctcccggggactgaaccacagcgagttcacaaccttgctctatgasctggacagccagtatggtagcctcctgtactacacggagattaagtggctcagtcgcgggctcgtgctaaagagatttttcgaatccttggaagaaatcgactccttcatgtcatccagagggaaacccctgcctcaactgagctccatagattggatccgagacctggccttcttggttgacatgacgatgcatctgaacgctttgaacatctctctccaaggacactcccaaatcgtcacgcagatgtatgacctgatccgggcgttcctagcaaaactgtgcctctgggagactcatttgacgaggaataatctggcccactttcccaccctgaaattggtttccagaaatgaaagcgatggcctgaactacattcccaaaatcgcggaactcaagaccgaattccagaaaaggctgtctgatttcaaactctacgaaagcgaactgactctgttcagctccccgttctccacgaagatcgacagtgtgcacgaggagctccagatggaggttatcgacctgcaatgcaacacggtcctgaagacgaaatacgacaaggtgggaataccagaattctacaagtacctctggggtagctacccgaaatacaagcaccattgcgcaaagattctttccatgttcgggagcacctacatctgcgaacagctgttctccattatgaaactgagcaaaacaaaatactgctcccagttaaaggattcccagtgggattctgtactccacatcgcaacgtgatggagagaaaactcctggcagggccgctatggtgggaaaggctggagtcttctagtcccnagggattgggagatgcccaatnaattttttttttcttttttaagatggagtcttgctctgtcgcccaggttngagtgcngtggcgtgatntcggcttactgcaacttccagctcctgggttcgaacgattctcctgccttagcctcccgagcagctgggactacaggcatgcgccaccatgcccggctaatttttgtattagtagagatgaggtttcaccatgttggccaggctggtctccaactcctgacctcaggtgatccacctgcctcgacctcacaaagtgctgggattacaggcatgaaccactgtgcccagctgacaaaatgagttcttaaacttttttttttttcagttttttttccactttgaatcagaaatataatctgcagtatcatacttgtttatattacattgtatgcctcactattcattaaaaatcaagaaagttttattgtaaaaaaaaaaaaaaaaaa

SEQ ID NO: 770 - DNA, 2354 bp, Homo sapiens
aaaaagtcaccttgtaactcatctctttttattgtaagtttattaaaaatgaagaggacaacaatgagaaggaacataaagggttagctagcactgtctcctggtgcatggggctgtgcagatgtcccggccacttcttccttcatacttcccttagagaacttgctctgctacaagcagtgggcttggactaaaagtgattaaaataccacaggcataaggagaaaaggagtatatgtagtagtaataattactagtataaattattttcttcacatgctatgagtaataatattaaaaaactcattttaccattaagattccttatgctgaagctcttccatttagaatactgtcaatgtcatttactggtatgaactaaaggtcccccttcttttccacttcactgggaaccttagtaaaacaccagcatatcttacctctctttctgactggccgatgcttccagagactgaatgttgggaaaacctagtagccaaacaattytaggacagaataacatttttatatttggttccaccatcttattacatttagttatagttttaaaaaagaaattcaagcccattaaaatatgtctggtcaatgaaatgcttccttttattgtgttgtgctattgtactttgtttttcaaaacattgtaaaaatagtatctttggtttagtattttggattatatattataatctgaggagtgttttgcttatgtagaatccagatatatttctgttacctaggagatgttacttacatatgtaatactgtatcctgcacgtggaaatattcagaattgtagatagcataactctccctgctcctattcttttgagcctaggtataattttttttttttttttttagaaaaagacatatttagctttaatttctatttatgctaaacatatttataagtagtctgtcaatataataccaactatttttatttttacataattcaattatttcatttgacatgtctggcagactcaagacattaagtaaaaaattggaactatgatttttctttgtcattttttaaaaaagaattattttattaacctgctggcatataatctggagttcttttcacaaccttactttttctgatttgctttattgaatgattgaatactcatttctttctaaaaatatgttgtaaattctcccttggcaagatttctccctatgagggtagttattatttgagtctgccaagtggttaccatggggcaaggtgccatgatgtattcttgggtgcattggttttttgcgcattgtaaatttaagacacttatagtaagtggactcattcatagatgagtttcagaaccttttacgttctcggtagaggcttctgtcggacaggcagaagagtgtattcctcacttttttttttgtcttcaaattccagtaaggcatagcacttttaagaaattagaatttttctatcatctatgcaaatgatatttatgttaatattaaatatcttatgttacactgggagtaatttgaggtgcaattatttttattactactttgaatagaggaccattatccttctttcttcagaaaactaagaagtaagtgtaacttttaaagtaagtatatatcagtgagagtaggcttgttttacaactatttctagccagtgagttgtgttttcatgtctcatcaaaagacaataccacattgcatcattttacaaaatatgttgtcattttcatttcagttgtaacataggaaaatagatatttcctagatgatttctgagtttcttactgcaaagaacagttataaattggtatacatgtgtctctgtaatagggataatattgatatatctgttgctacatatttaagaatcattctatcttatgttgtcttgaggccaagatttaccacgtttgcccagtgtattgaattggtggtagaaggtagttccatgttccatttgtagatctttaagattttatctttgataactttaatagaatgtggctcagttctggtccttcaagcctgtatggtttggattttcagtaggggacagttgatgtggagtcaatctctttggtacacaggaagctttataaaatttcattcacgaatctcttattttgggaagctgttttgcatatgagaagaacactgttgaaataaggaactaaagctttatatattgatcaaggtgattctgaaagttttaatttttaatgttgtaatgttatgttattgttaattgtactttattatgtattcaatagaaaatcatgatttattaataaaagcttaaattctcaaaaaaaaaaaaaaaaaaaaaaaaaaaactcgag

SEQ ID NO: 771 - DNA, 2298 bp, Homo sapiens
caggaactccaggttctgctggccgtggcatcctctctccaagtctgctcccttaccggagctacgataacgtagcatgaatgacacctgagattagaggctggggctcactgcaggctgtggagagtcatgctggtccacatgaacacttggcagtgctctcgtagacccctcggtgatgtggaatggacaggtgcctcgcaagagaagcaagcacgttcataacaaaacagcaacacaaagacatgttaagcatgtttatttatttggctgtttttgtttatttactcgagctgtggtcacagctgccaggtacctaagcaagtcagttgggtacagcaggacacgccaccattccagggtactggtaccgccagaaacaggagtgggtcttgtcctgttgcaggcacactgcagtggttttttcctcggcagctctccaacaaacgcctgagtcacaggccagagctgccttggtatgttgttaagtccaaaacttcttctctgggctacctatcttccttcatgaagcaggtgctcaggacccggaagaatcatctacctcccagctttgtgagacagaaccaagtaaaaggaaacatgctagaaaacgtgcctagagaagacacttcaacctttgccttatccaacccctcttcagagaaaggtgtcccatggccccaaaaagaactgccaagttttggtgaggagtaacaccctggcatgacattccttctctttcctggccctcaaccacttccttcctttggctcttaagacctagcaggttctgtgaactctcaggccttggccagcactagttaggggaggtcaggtggtcaatgtcctggtgattttatgagactgccccactgagaaaacttacttacttcaggcatccagtgcccccacccagggttcaggccctgtctaaggtgttgcttaaagacaaaaaggcaacatgtgcctcactggtggtgtgccactgttctcatgctgcctcctaagtgactccgattttcagccctggtagaataaggaagacagctgatgcctccttagccccttagcacatgttcctaaggtgtgttgtcaagccaacctgaagttctgcctccctgttatagtccctgtctcccccacagagacctgtgggtgctcccagcagagttgagactggctccgttgagttaatgactagaatatagtgctttcactacttgattgttaacctgttttcttctgatgccatcaagtaccagcagtcagactattccactggttaagtgtttactaccattaaagcgaggcatgaagcaaagagctgagtgagtcctctgctctccagaggaccaagaaatacctgtgtgacacagacccacttcagtgtgtacagcaaattctatagtgcttctgagcccagcagggctttacctgcccctggagagttttagccgtcttgtgtttcttgtttacttcacaaccaaatttgtcccctcttctctctgttaagggagagaagtcactttagctggataatacctatgtaacaaactgagcagctgttatttgggcaaaatcaaaggaagaaagagactatggtcttctatttattgtgggaaggaaaacagggtggggcgggtgagtgaaaaggtggaaatccctggtaccttgcctggtggttacacagtttaaccataggccaattttaggggcctctgaagtatctttctacaaacgcagacaagctccactacccctaacctgccaggatgctcaagtccactgtcacaatccctttcagaaaacattagtggccgctgccccagctacagagacggccgaaatgctttcactccttagctttgccaactccatcctccaaaacttcccagaatacctccctttccagttctaccaaatctgtacttgggagcagcctgctggatccagaacatgacaacagagagctgcgtccacagggaacaaagccctgacctctctctccacattacccttacaaaaacaggccctccccatgagagagctacacggcaggggcagacactgtgagtataagctactttcctccctggagtgctctatgtgggcagaacatgctctccttgcctctcctggaaggtgtcttctctatggcctggctagagctgcaaaaaagggacacaccccacttcggtaaaagaaaatagggaaaggccataaacaaagacagacttgtagtttattttgtattttttttaaataaatacactttacattaaaaaaaaaaaaaaaaaa

SEQ ID NO: 772 - DNA, 1296 bp, Homo sapiens
ggcacgagcttccccattctgttttcctacacaattaaataattttagttccgtaaattgttctttttacaacgctttcttgcattttctctctttcctgtgctttatccaattttgtctttggttcatcatgcccctcaggcatggagtttgaaaactaggtagataggatgtctaaaccaaaaaagtataccatagtattggtcttactcccatacagagaagccattcaaactgtgggaatgaatttgagttattagagaaatgataatagtagtttaagtatgttcattcaggtttacacatatctgttgttaaatttaggatggcccgtactttggaaccactagcaaagaagatctttaaaggagttttggtagccgaacttgtaggcgtttttggagcatattttttgtttagcaagatgcacacaagccaaggtaatcataattcagaagttaatgctttctaaaggggtatagttttgctaatccattttatgtgttaaatggcaatggcatgtttggagaaattggttcttcagattcaagatattagacatttttaggggcagaacaggaatcaaagtattcattattgtggactagatcactctcacttctcccttaaaaatgttgtttgtgggctaaggaaaaaatttcatacctccatggattttactattgtggaggatatagcaagtgtccttggtctggcttagtttgggagcacagatggaggaaacttagcctgcccattatacttcattgtttggtagactaagaaagtaactggtattgctgttttctgagtaaccagttttctcaggctatagtattcttcctgggcatcaacagtgggcactaagactttcacatgctatggccgaaagtgctttaacatttttcttggggaaattttatattagagctctcaactttttaaattaggaagtgattttccctaaaacagggaatagacctggcatgatagccatctttgaaacttgccacagtcttcctcagcatacttggttggaacgctgtaccaagatgctactggatactcaaaaaatcccttttcttttaaactctaaggaagggtattaaaaaaacatcccaacagtatttaaaaacaaattaaagcttgggatcagttttaaaaagtgtcatggctgggtgtgatggcttgcacttgtaattccagcacttcgggaggccaaggtggaaggactgcttgagctcagtctgggctaaacataacaagacactgtatcttaaaaaaaaaaaaaaaaaa

SEQ ID NO: 773 - DNA, 3147 bp, Homo sapiens
tttttatgggaattaaaaaattaaaaaaactgaaacttgtgaaaaaaaatgttatttaattgtaaaatctccaccccctgagcatatgttttcaggtctgggtgactaattagactgggaaacaagggcaggaacgatggccctgtgcttgctctgcccgctgcctctgtggatgtgtgggccgctggcttcagtcctgcttttttgatggccgttgtttacgctatgtatttttgcaggaggcctgaggtgggctgggttctcctcctatggcagggcttcactctcctcctccgttggggcttcgctgtcccttgagaatccttcttcatcttcttgtaatgaccttcggtgacaacagatctcaatgaggcagagaagtataatcaaaatcgttagtattccagtcacaattaacgccaagatgagttttttggtatagccatatcctggaagttcttttgtgaactcaagcgacttctctttctgttcactctgggcttctgtgctctcattaatgtagttctcagtcttccattggtccgtatcccattctatcttggatgcctttacttcctgctgcccactgagaagcttcatcaggtggcctgtcctggagacgagcttggcacaggtcacttgcacatgggccccagagcagtccatcttcaaggtccggataacatgagcaatgagccttctcacattgttgttggggataagggactgtagctgctgggttagctgaatttcaaactgatcacctggggacgagagcaatgggtaattgaagcttttgggctcgggggacaggtcagtgcccacgttgttgtattcccattttgtctcagtttgtttaacagttggccctaagttgaatgcagtcccagcggaatctgcctcaggaggatgattgtagtttgtgttttcagagatggtgacttctggcatgttagtgttttccataaaaacattttcttccaaggcatttcttgcagttgtgtcttttatattagtggtttctataaaatgttctgaaggagcagatacttccagaaaagggttttcttgaggactcaggtctcctaaggatgaaaaagccccttgtgaaggggaatttatgaggctcttcgctgcagagaacggaggcctgtttgcgagcatcagtctactcagataacttttctttctgaactttggactctttttgaccttgggtgttctgtgggtcatgcgggagcgagttttgtgaaagcggtatttttttctggaatgtgaaattggtttagaagccttcatatttgtaactctagcctttgcactttctaaaatggaaatagcgtgtgtgtgtctttccatctgtctctcacctgtggtagggcttttgcagggctggaggtagaaggcgcgcccttggagaagggtttcagcacagagactgctgccttatgctcttgggtgaacgaaggcttggtgtagacggcgtttcccgctaacttctcaggcccctgctgtgtgtgaggctgttccagctcccttggggctggactcccgagccttttttcttcggcagcgttctccacagatgcctgggcaccctgttccctcctgatgctctgccttcccacctctttgaagtgccttttctggatgctccttgggcccatgaggactctattcactttttgctggttttggcctacagtttgaatctttgccaggctgtttcctgtggttggcagtttaatgaacggtagtaacagtgatttcacatctaggtttactgctgagaaatatggcaaatgtaacttagtgtactgataaaatcactctcgtcattggtgtctagctgctcactcccaaagcctgacaagttgatgccactgctgtctgagggctcctctggctcaacaatcagctcagtgcttgttagttcttccgggcttgtaacaccttcatgaacgctccttctggattcccgaccgatgcttcttcagctgtcaaaaaagaagagactgctttgatcatgaaagatgatgggatgggatgcatcagtccatagctgtacaccccagtcacacagagtaggagtcagcaaacattcgagtgccattcagagaggagaaacacacacccaatcctaaacctatgaaatggcaacaacaaaaggagaaaatacatcttttgaaaacacggccacctacttggaacattccatagtgtgacatagagtaactctgtttaggattatttcgttgatccccagaggccaattgcccagtgctcagtcaaagcccaaggtggaagacaagtgcttccctgatgagctggcctctctgcagactgctccgtaccctgtgctgtcctgcctcagatgcagagagagcacaaggctcctgctctcctcgtcctcggtgcacctgtgttcgtgctaccatcacagctgaatgcaatgaaaggcggtcctctgagaggagcagggtggagatgctaaagtggaggccccgtcccattgctgatagatcctcatctggcatgcgctccaccctccccattctctgctcccacgtatcgtagccccatcacagaagatgcgacatggaaaaacgcactgtgtccaccctagttcttaaatttgggcagggatttggggtgtatgttaagagtttttcaaatttgccagattgtatgcctatgttgttaaatacacaatgaatccctggtatgatagcagtttctggataaacattacttgaggtcctaaaatgcagaagggaaaaagcaacttttgtcagatgcctactttgctttcatttcatctctaatattttggatggggaatcatccaaagcttctgactgcatgaaggtcaggtgtgccagtgtgcagctgggtttcttttctggaattaaaagtactttgggtggtggtgagggtcagaggaagaagtaaagattgtgagaaaggggaagaaacatgggcttggggagaacccagaattggggccagaagacctggcactaggctacagcacttagcacctctgatcttgtttttcctcatctgtaaaaggaggttaacaaagcttttctgcccacttcttggggagaagggaataacataattggtaaaaaaaaaaaaaaaaaa

SEQ ID NO: 774 - DNA, 1432 bp, Homo sapiens
  SITE (1399): n equals a,t,g, or c
gaattcggcacgaggaaagattgaagatgtgggctagtcaaaagtttactgataatttctcactcttctacagattgataatattgtcctgatgaaggactcagatacaggccgctctaaaggttatggtttcatcacggtgagtctctagtcttttaatttttttattttactttgggtttgtccacttgtctgattttgcagcttagcttcatcctcctcctttaggaactgtctaaatgacccataaaccctggtgcctgaagcttggactagccttctaccccttgagatgagtgcattgcttgagatcttggctttgctcctacactctgtcagtggccctggtatgggggtgttcaggagttcacccagcttccctggtgctgcaacttggctctttgggtaatagtaaccaggctgcagctaaaaggtwgggggtgtgagggasgttaggtatgggcttttaaagacatgctttatagaattgatgtttctcataacagggatgggaataggaaattatacttccctctggtgctaccccatttgaagcaatttctgcaccgagaaggatcagttattaacgtagcactatggggagaatagtgaggccacctaattatgggcaagcttcaccttttcctgacattccaacaaaatggttgccaattcctataactggttcttccagctccatgtgactccaggctgagaactggctgccagccacaaagtctgatagaagcttgtattttctgggcttaaaccaggcagcatacactcccacagtgacccacagggcagagggcagtaggttgtattctgtcattggaattgctcacctcaaaaatatccagtaaaggcaagccatgtataacacctgcctaggaactgtgcagtaccacatgccaggccctaaggcaggtaatgctgctagctagctaaacaagctagctgtggtgttgacaattctgtggtggcaagtaacttttgtaaccttttctcgctctctgtgtgactgagatatggaaaggcttctgtggggcatttttgcccttgcattgttgccttttgggtcaacaaccttgacacttaaacaaacagcagactgggaatcctctttgtaccagtgtgttgctgggtgctgctgataaaagggactagagagtaaaggccttctggtcagcaggtcacttagtcaacagctcttgtgtgtatgtgggggtgtgggttctgccttgctgtcagcactagggtgtgttccctcttaagcctggaattaggagttccagattcctagkacttaactaaaatttggccaggcgcggtggctcacacctgtaatcccagcagtttgggaggccaaggtgggtgaatcgcctgaggtcaggagttngagaccagcctgaccaacgtggtgaaaccccat

SEQ ID NO: 775 - DNA, 1483 bp, Homo sapiens
gaattcggcacgaggaaagattgaagatgtgggctagtcaaaagtttactgataatttctcactcttctacagattgataatattgtcctgatgaaggactcagatacaggccgctctaaaggttatggtttcatcacggtgagtctctagtcttttaatttttttattttactttgggtttgtccacttgtctgattttgcagcttagcttcatcctcctcctttaggaactgtctaaatgacccataaaccctggtgcctgaagcttggactagccttctaccccttgagatgagtgcattgcttgagatcttggctttgctcctacactctgtcagtggccctggtatgggggtgttcaggagttcacccagcttccctggtgctgcaacttggctctttgggtaatagtaaccaggctgcagctaaaaggtwgggggtgtgagggasgttaggtatgggcttttaaagacatgctttatagaattgatgtttctcataacagggatgggaataggaaattatacttccctctggtgctaccccatttgaagcaatttctgcaccgagaaggatcagttattaacgtagcactatggggagaatagtgaggccacctaattatgggcaagcttcaccttttcctgacattccaacaaaatggttgccaattcctataactggttcttccagctccatgtgactccaggctgagaactggctgccagccacaaagtctgatagaagcttgtattttctgggcttaaaccaggcagcatacactcccacagtgacccacagggcagagggcagtaggttgtattctgtcattggaattgctcacctcaaaaatatccagtaaaggcaagccatgtataacacctgcctaggaactgtgcagtaccacatgccaggccctaaggcaggtaatgctgctagctagctaaacaagctagctgtggtgttgacaattctgtggtggcaagtaacttttgtaaccttttctcgctctctgtgtgactgagatatggaaaggcttctgtggggcatttttgcccttgcattgttgccttttgggtcaacaaccttgacacttaaacaaacagcagactgggaatcctctttgtaccagtgtgttgctgggtgctgctgataaaagggactagagagtaaaggccttctggtcagcaggtcacttagtcaacagctcttgtgtgtatgtgggggtgtgggttctgccttgctgtcagcactagggtgtgttccctcttaagcctggaattaggagttccagattcctagtacttaactaaaatttggccaggcgcggtggctcacacctgtaatcccagcagtttgggaggccaaggtgggtgaatcgcctgaggtcaggagttcgagaccagcctgaccaacgtggtgaaaccccatctctactaaaaaaaaaaaaaaaaaacycgagggggggcccggtacccaatc

SEQ ID NO: 776 - DNA, 1443 bp, Homo sapiens
ggcacgagcagaatttatatataaatatatgcacccatttttttgagtgcatataatttagacctaaaaatccttatgattaggtgaaacaccaaaaatataaggaaaataacacagcagaggaatagctcagcctgaacagtgtgatggtcccagctactacatcagatgcggtttttttgctcccttatgttcttcggatatggttatggcatttgtaggcttggaggtaaagaactgaagataactggtgctggatagaggagccttattttttattatggcagcttgctatttttataacatggtgattgagttgaacacaatcaaagtacagtagtaactgatgtccccttcttcctggatgaatgagcagataaatattgatgtcagcatccttgaaccatatcaaagtgagcagtgtttggctactgcttctatttgaaatggtgctgtgttttggttgtggtctgaagctttgaagcgctacttagcatctcctttcttccatggagctctcacgattcaaacatgacagatttggtaaaatgctggttaggttgagtcttccttgcccccactcagtcatctttgtatgaatcccatgatttgggggtttttttctttttttttttataccagtttttagctggtgtttatgaagaacagtgagtacctagaactgtgccactaattaaaggaaatcctaagaaggtgcatttctttacagagctgtgtcatgccatcctttgggccctctgctggaaaagtagaatcaagtctcaaataatgcctttttaattgtatcctctagtattatagatataggacagtactgtatcatacctctgtgaatgtaaaatatcttgtacctgctttatgatacgtagtagtgaccgtgctttatcagagctgtttttaatgatgttattctagaatgttttctttccagatgatgattcagaagctaattttaaaaaacggtgccaggtaccacaacagtaacagaactttgcaattttctggggttttgttttttacctttttccccccttttttttaaatggagtgtgctggatgtctctataattttattcagatgactgcagaacctggaaaagctgttgctgctattgatgcataacatactgctattggtctttttatataaatatatatatatatacatatatatatataatttgaatttttggaaactttagctgtgctgtcaactttggaaaaagtatcccggtttactgtgttgagttggcattgtacagaaattaacagccatattggtctagaaacgttaaacttaatttttttccatttgtacaggggtaacgcactgtattaaatatgtaaggtcttatctacatgggtttgattacagaaactaataaagtattctctaaataatgaaaaaaaaaaaaaaaaaaa

SEQ ID NO: 777 - DNA, 1213 bp, Homo sapiens
  SITE (66): n equals a,t,g, or c
caagctcgaaattaaccctcactaaagggaacaaaagctggaagctccaccgcggtggcggccgcnctagaactagtggatcccccgggctgcaggaattcggcacgagaaattatatttaacagatcttcaagagtaaaaaaaaaaagccatcttagtttaaggattagtttatagtgaaattgtaatttttaagaaagctgggcgttctataaaaaccttcaagaacttattaaaaattggtattttttaattctctagaaccacatagtagaatgaataacttgctaattttattcttaaaaacctcatgtttatgttttttgatttgtgtttgtatatttaaacactttgtgcgactttcagctactctgggcagttgaaaagtagaaagtcatacatgatacctgaaaatgagtttcatcacaaagacccccctccgaggaatgcagttgccagtgtgcaaaatgggcctggtggtgggccttcttcatcatcaataggaagtgcatctaaatcggatgaaagcagtactgaggagactgataaatcaagggagagatctcagtgtggtgtgaaagctgttaataaagcttctagtaccacacctaaagggaattcaagcaatggaaatagtggctctaacagcaacaaagctgttaaagaaaatgacaaaaaaaaaagaaaaaaactcgaggtcgacggtatcgataagcttgatatcgaattcggcacgaggagaggtcagattgctgtcagacatggcccatgaacatggacatgagcatggacatcataaaatggaacttccagattatagacaatggaagatagaagggacaccattagaaactatccagaagaagctggctgcaaaagggctaagggatccatggggccgcaatgaagcttggagatacatgggtggctttgcaaagagtgtttccttttctgatgtattctttaaaggattcaaatggggatttgctgcatttgtggtagctgtaggagctgaatattacctggagtccctgaataaagataagaagcatcactgaagataatacctggaagcatcatagtggtttcttaactctccaaaataagatttcttctctgtagcctacttgtctggtttatcccttacagaatattagtaagatttaatcaattaatatatatatatatatgccaaaaaaaaaaaaaaaaaaaa

SEQ ID NO: 778 - DNA, 2667 bp, Homo sapiens
  SITE (2652): n equals a,t,g, or c
  SITE (2659): n equals a,t,g, or c
  SITE (2662): n equals a,t,g, or c
gcaaagacttctggtactctgtggtcaacggggtcatctttaactgcttggccgtgcttgccctgtcatcccacctgagaaccatgctcaccgaccctggggcagtacccaaaggaaacgctacgaaagaatacatgggagagcttgcagctggaagcccggggaagtcatctacaagtgccccaagtgctgctgtattaaacccgagcgcgcccaccactgcagtatttgcaaaagatgtattcggaaaatggatcatcactgcccgtgggtgaacaattgtgtaggagaaaagaatcaaagattttttgtgctcttcactatgtatatagctctgtcttcagtccatgctctgatcctttgtggatttcagttcatctcctgtgtccgagggcagtggactgaatgcagtgatttttcacctccgataactgtaatcctgttgatcttcctgtgccttgagggtcttctgtttttcactttcactggcagttatgtttggcacccaaatccactccatatgcaacgacgagacggagatcgagcgattgaaaagtgagaagcccacatgggagcggaggctgcgatgggaagggatgaagtccgtctttggggggcccccctcamtcctctggatgaatccctttgtgggcttccgatttaggcgactgcccacgagacccagaaaaggtggcccggagttctcagtgtgaggcgtggctcatcagactgaaacttgctcacagacttccagttatttatttggggtctgaaggatatcaacagctcatctgtgaccaacagggcaactggaacctacacaaaccaattgcttgcagcaagcagagttttatatatttatagtcacagatggcagaggaagaggctctcagtccccacctgtacaacaacggaaaggtgtgtggccacacgaagaagccaaacgccgtggcctcctgcagagctggggcttctgtggaraatacttcgggttattacatgggttattcaaatcctgggtcctgagctgctgtttccaatcatgaagaaaaacagtgaatccagtgaacagggattctccaagcagtcatttcagggggctcctgctgaccccgccactcagcagtgcactccccggatcacagcagggcgtttacatagaaagacgttttggtctcgattagctccgatgctttgcactgaagttgcaaaagatctgtgcactgaacagtgaaggtggcttccggcacactccccgctgccccggaagagacatcctttgaccctctcagcaagtctgtgtgtgtgcgtgtctgtgcgtgtgcgcgcgtgtgtgcatgtgtgtcaaaattgccagtgttgtttaggcaatgtaacatttaccggctgtgtacagcaaacaagctattttttagaaaccgacgtttcagggaagaggggagagagccgcggggtcctgcccgtggttactatgaatgtattgctgttggaggacatctcgatccaaagaacagccgttcctgtgcggcccttcgttgccctcctgctttcattttttaaagaaatcttgagtgcttgagggccttggaactgattttttttttttgttccagccaaattagcagtgtataaatggcacctaggtaagagcagagctgcggctcggtgacttgatacttggggcagcccgatgctgtgtgtggggcaggggaggcatccttactggagaggcagggcccagccattgggcacctctgggaaggggaggggaccatgaggcagccagcccctggcaggggcgactgtgccaccgcaggcagcgctccagtcgggaatggccaggatggcgccctcttgttggagtttttggttagcttttacgttttcttctccacccacggcacaggtgataaaataggatccttggtgcggagcttaaaattatgccagaaagccaacagctcccctcgtggggccttgccttaaacttgcctggtttgtacattttttgccggacgcatcaagaagcaatctgtgacaaagtctgagggtcttcctttatgcttgccctccacactaagagaagttggcgtctccctcctgggaattgttttgcctttctgttcatctgtgaactgttttttgtttttaattactctgtaccccatccgaatcagggcttctaccactgctgatgcaaaacccacaaagggacctacctgagccaccgtcctagccaagcgagcaaacctgcagggggtttggaagtggacttggtcaccgcagaagcgtgtgcgccgttgggggaagagctgcgtcacagccagagggacaaagtgtgggtgatcctggagacgccagtttccgagattgttctgcatattcatttgcacattgttgtctgggttggacatgcgtgtgggcttcagtgtgaggcttttaatatgtatatcctgttatcaataaaacaattatccaagtggttgaatcctgtgagacttggcaagtgtgtgcaaatcaagtatacttgacttttcaacctcttctttcaatgtaacttttatatgaaataaagtaatcaattaacagttctcaaaaaaaaaaaaaaaaaaaaaaaaaaaccccggggggggggccccgggaacccaattnccccccnaanggggg

SEQ ID NO: 779 - DNA, 1356 bp, Homo sapiens
ggcacgagatcccactcaatcttacctgtactatttgccatctcctctcaatcaagttcattccataatgatgttttcctgagtaaaccagaaaaaaaagaatccttataaataggcaaagattacttagtaaaataggcaaaggctctcagagccttttttctcatgtgacatgcatgtatctgaataggaacttcttgtttctggctgttgaattatccaaaaggatggctttagtggtaagttttgtgcataaaggaaaggaaggcatgttagccagtggagaatacatttaggccacagggaccttgtggtgcttcttggaattacgctgggctttatgcatggatagcagatgaggccaggggaggaaaaactctagagatggaaggatggatggacaaaggaagaagagaagaaagagagaataaatagcatatgcaatatgttgaatttgcactgctagcaagcaagaacttaagtcacacacatacccagagccaggccctcaggaatatttctcaacctttatgctttactcttctccagatagtaaaacacctacaaaatatcatcaggccttgttcttcagcatgacaaaatgtcctgcttcttgcctctgtgaacaagggggactgagattgtatctcctttccacaagagcccttgggatcaacacctatggaagggaagggaggaatggaaaaaaggggagctgagctgggatgcagatctgctagatgcctcagacaaccctgcggggagttatggagatggaatgccctttagaattgtccagggttcaggagacaggggaggcctttttatacctgcatcacctagtcactgggtatgcttgatggggaagaatcatgacgttaggagagggaggtggctctctgaagctgtagcaatccccaaagggggcagacctttgcagatgaggtctttcttctggcagcactcccagaaactaaggtaaagtctctgttattcctgagggggatccggatggcttatcatgtccatcacactccacaatgctatataataccataaaactttgcaaatagaatgaaggagaaaataaatattgcaaaagcatactgtcaaatttctacataacagaatattaggtttgaaaatattacccattagttaaatttctcctccttttacaatgatgtttgcctttaaaggggtcaccagagaataatttgtttcacagagcagccatgctattaatactactgtttagagatatagaaacgactttgcaactgtgaattgctaagaattgtagaaataaagggaaaataaaattttcttttctaaaaaaaaaaaaaaaaaaaaaaa

SEQ ID NO: 780 - DNA, 850 bp, Homo sapiens
  SITE (18): n equals a,t,g, or c
gctgacctcatgatctgngcgcctcggcctcccaaagtgctaggwttacaggcgtgagcactgcgtgcttatttaaagtatgtsctgtctctctccttatgaatgtttttttttttccctgttggtcactcattttcatgatcgttttccaattcttagatctgacttcatgcatgagaagtacagaaagtacacaagaataaagaataaaagtaggggagtcaggaatgttctattttaaacgcaactattagattcctcactgtctcccttcaattattcctgatctttactctttgagtcctccctgaaataacatgctattagattgatgcaaaagtaattgtcgtttttgccattacttttttttttttcttttctttttttagacggagtttcactcttattgcccaggctggagtgcaatggtacaatctcggctcactacaacctctgcctcctgggttcaagcgattctcctgcctcagcctcccgagtagctgggattataggcatgcgccaccacacccagctaattttgtatttttagtagagatggggtttctccatgttggtcaggctgctctcgaactcctgatctcaggtggtcctcccgccttggcctcccaaagtgctgggattacaggcatgagccaccacatccttgccattactttcaatagcaaaaaccacaattactttttcaccaatctatataatgattagaaatatatcccctactctggagggtgaggcaagtgatcctatcgcgtgaacccaacagtttgaggccagcctgggcaacatggggagattttgcctcaagaaaaaaaaaaaaaaaaaactcgag

SEQ ID NO: 781 - DNA, 1018 bp, Homo sapiens
gaatattttaggtgaaactaaatcatctaggagcgatgtgataagtttcacatgtctaaaatgtaacttttcaaacactttgtactacagcatgaagaagcatgtgctggtagcccattttcactacttaattaactcctactttggcctaagaactgaggaaatgggtgagcaaccgaaaactaacgatactgtttctatagagaagatcccaccacctgacaaatattactgtaaaaagtgcaacgcccaatgccagcagccaggatgcgttaatgtatcacattttgacatcagacatacacagagatttggagaataagcttagatctgtgatttcagaacatattaagaggrctkgactcttgaagcmaacgcacattgctccmaaaccagcagcacatttggstgcaccagcaaatkgcatgctccaagcgctycaggsagctccttgcttccatcttgctttgccacagaacagtccaagcccagccgcaggacagccagtgactgtggcccagggtgcccctggaagcctcactcattccccccctgctgctggccaatcccacatgactctggtctccagccctctgcctgtgggccagaacagcctcaccctgcagcccccagcacctcagcccgtctttctttctcacggggttccacttcatcagtcatggagaccagccagtttagatggtaagtcatatttctggtggtacacagcagaggaaccccttcactctatctttaggtagaaatatttggaggatgtgacagcctctgagaaacataatgttactatgtggattttaaaaaatataatacttgcatgtaattgctataatgttcatatttgaggcagttgtgaaactggtttatgattgttggtgtactctgttgtaaattcaaagagagcttgttgaacattttttttttttacctattgttttcagagtgtctattttgaattaaaatttgttacaccgctaaaaaaaaaaaaaaaaaactcgag

SEQ ID NO: 782 - DNA, 1693 bp, Homo sapiens
ggcacgagcaaagttgggcatataggcacacatattacgttgagccctggcctttggatctacaatgccatagatgaatgcaacatactcctgacatatcaagaggttctatcattttttcataattttccaaattggaaaaattctccttaattattttatttgtattataaacttttttccactagttccccacttactgttgactacagatgctttagtagttttaaacaatgaatgggaggagactgattttcccatatgttttgtaaattggcctttcttcttcccacttcactgaagataatctgcccttgcagattatcttttatgattcagggagctatggactggatagtgatggactttgtaatgaaagcacaagctactatttttgcagctgctgaagataagaataagctagaaaacatgaaagtacaatgatcggagatgctgctgcatattcctgtgtagtaaaagatctgctttgttatctggacagtctcttccagaagaagagacttcctgagtcaaaataagataagaagtatgcaacacaaagaagtgaaatgacattcttacagttgaaatattcatactatgttagttggtaaaactgcttagcttctacctcattgaggcaacattggtgtgagaaacactgaaatatgactgagagcctacactagcaagaagatggggggaagatacctttaaaaagatcacttggagttcaataattatggatgcataataacattttgagtactcttaatatagtcagcctagttctttctcaaaaaataaattcaaggacataacagttcagttgatactatggaattttgtttgtttgtttgtttgttattcaaaaccagcaaagggatatgatgcttatttggtagagaggacatgctcttcagctctttctgccttcttgatccaagaaagcattcacaaatttaccagtttatttactcaggaaaatgtggctataaatgaatttacccaggaataaactaaattctattatttactaagttcaaatagtatacttttcataaagggatgaaatcagttattgaaaagaagctaaattaattgtaagctaaacaacagcaactgaaatcactgaaagaaattaaaacctactatcatgactgtaaaggattttaaccattctcactttttatatttctagctattaatactgaagggaggacagaatattaacactttgaaattaactctccgccaggcacggtggctcacgcctgtaatcccagcactttgggaggtcgaggcgggcagatcacctgaggtcaggagttcaagaccagcatggccaacatggtgaaaccctgtctctactaaaaatacaaaaattagctgggtgtggtggcaggcacctgtaatcccagctactctggaggctgagacaggagaatcgcttgaacccgggaagtggaggttgcagtgagccgagatcacacctttgcactccagcctgggggacaagagcaaaacttcttctcaaaaaataaacaaataaataaataaataaactcttgacctgaaagatatatgctccgttttgactaatataaaattgattagcagagttagttgaaatcattacagcacccaggggcagctggattgctttcatgaccaaaaaaaaaaaaaaaaaaaa

SEQ ID NO: 783 - DNA, 1136 bp, Homo sapiens
ggtcgacccacgcgtccgagatgcttgctgctgattggttggggtgggtgaaatcacagggagttgaagctgtcctcctgtgggctgaattgcttctaggtggggccataggagtggggttgctgggtccaggtagaaccacgggtgtcagacatgcaaaaataaaataaaataaaataagataaggtaagataaaataaaataaaataaaataataaataaaataaatataaaatttccctgaaaagatatttcaaaaagccagtcttagattctacaataatgatgttatttgctggagtaattgatggagttgcatgtcttataacctctggaataacggctgacaatctctcaagtctgcgccttagctggactcaggttcctcttctccccacagcctgactgcctccattagcttcacaaaagtggttgggkttcagggsaaggcccattgtcatttaaactgtagccgaaatgacttccaaagttagcttggcccaatagcccaggaatatttaagtggaaggcaagatgggggatgggttagmttagctctctttcactctcatagttttctcactggtataatttttgcaaaggcggtttcatgcctgccatctctttcgtcgctacctctcccagttcccattcttagctgttttatgaaatgcttctagtttcatcctcttataccaagttctgggagactgatttgrgtaataataaaactccagtttcccatacagccggctctgcgtgaattaaactcattttctattgcaatttccctgtcttgataatcagttctgtgtaggccgtgaggaaggagaacccgttgggtgattacgagactgtgttactgcccactacctaatggatacatttagcctggtatccaaacccatctaattatgaccataactatatttatcaccttgctctgctttcaaacgatatgacacacaatgaatgaaaactttcatttttcatcttcatttgtgctgttccctttgcctcaaatagccctcaacttgcctacagtaactgtaaaatttgccacctaaaaaaaaatctcaaaatcctctctatgctttgatgtccagcaaaaaaaaaaaaaaaaaaaaagggcggcc

SEQ ID NO: 784 - DNA, 2405 bp, Homo sapiens
acccacgcgtccgcccacctcagcctcccaaagtgctaggattacaggtgtgagccactgcacttggccaacaatttttaattgtataggaaactagcatttttgaagtacttctgaatttagcacctaggtcaaattacgttggatatgttttcatggaaactgttgtattctcttattttgcatggtttggctcttaattgcttataattctggtacatattgagtacaaggaaaatatattttaaatatgcataagttagacttgctacaaacattgagattagaagttgcaaactgaccactaggtcatatctgctccacaggcgtatctcacatagtttgagaactattttgaactagttgctaaagcttaaaaatagaggaatttctcttgaaaagtggaattttggataataatggattttatatatatatatatatgtcagtcatggactgtcactacatagtagctattatttttagacagagtaagtgctctccaatttgccagagctcctgtcattctttaatatattacagctggcctacttcactcatgtaccttatgtagattcctctttcgttatttataggtatatatatacataaaggcagctatataaagaaatttcttagttttttcattaataaattcaagacatccgaagcttctttgctttattatttttctggtacattcgtctccttaaaaggagacattagaagcagtaaacatcccagagatagtaactttcttcttcagaactttttccaacaaatcactccattggctgatgaaaaagaagatgactgaaaaggtttatacttcctggagttccactatcttgcgctgtaatttctttaggtctttctgtactttatatttctctaaatccatctttgttttctgtatttgttggagggagctgagagagtcatgaattgatttaaatcctgtaagagggtaaaagaataggtcacttaaacaatgcattagagcttttttttaaaaaagttgctaatcggcagtcctgccataattgattatcatttaattccaagcgcattaaattctatgaagaccagcttaaaattgtacataatatatttcttgtatgtcatgaagatccattcacaatagtgtttcaacttatatctggttatctggtttcattgtgaaatttatttttctcctcctcaaatatattgcataattctatattgcaagagagaaatttaaaatattttattctttctgaatgctttgatgagagacttgtgtgattttttttcagtcttgttaccaaattgaaggtaaagatcacagatgagattttaaatcttctctgaaagtagcctatttgagggacctaacagcggccccctgctgccctcctccctcctagcactttgtatctctcttatgcatgtctagtcactcctgaccacagacctatcaaacctcaaggccttagggcacaacccatttgttattcactggggcctttcacagagtcgtttctcaacacatttttattaaaggcataaagcagcaaaccattaatttgaagttccccctttttagaactcctcctcattagtaaaatgaaagaacttgcaggtggtaaattccttttcagttcaccctgaagttttactaatggaataagtaaaattaaacctctgatagttaaacagaaagcagagcctttaaaagaagggccagttaagtttgggacatgattcctggccagataattcattattttgatatgacggtgggaggggtatattgtgagggttgaatttccaggcagcaaattctacttatatgccaggaacatctggcagattgagaccctcatgtcctcccaaggcacctccaaggtatctctatacaggaccaaatttggtagaatttacacatgaatttttctgagatctagaagacaaaagaaaaaaaattacttgggactttctctaggaaagaaactcttctgagtcctggtaattccctcagaattatgactcaaggcagatggctgcaccacagcacctattccatgtccttccctttgagaaattagatgagcctttcaaattaatcctctttgatgttagctcagcttgacactgctgccattagcctcttcaaaataaaagcagtcattatactggactctgctaattcatccctctttctcacttctaaaggtcaggtctccagtctgacatctgtccaagctcattacttgtagttcaatgagaagggcatttgatttaggctcttaatttcataacatacccacaagtcacgtcttgggtatgtccaaggattttccaagtctgacaattccatgaattagtaaaaattccatgatcttagtaaaaaaaaaaaaaaa

SEQ ID NO: 785 - DNA, 2937 bp, Homo sapiens
ccacgcgtccgctgagaaacagtccatgtgcaccccaaccttaatggcctgaggtgggcagaggggtgtggagcagcctggagtacagggccctgggggaggagcccactgatgaggggcgctctcccatagccatgtgttgaatgctaactaggctggggtggacgaactctgccaactgctgtcatcttagaagatagatgcagcagtaaggaatgtttgttttgcttttttctgaaattttcttaagcactgtggctgggaaacttcgaagcggaccctgtgctgcatgtctgctcctcccctgagcctgtctgcttgggggtggtaaaaataaaaatcccagtttattttcagtaccttacctaacagggttggctccaggcgtgggtggcctagaagatgaggggagtggtcttctcccagccttttaccctcttgcctcctgcctccgcgcttacacacgcactttaccacccggtcattccctggcctcttgctgccacttgtagtcttccttccttcctctcagggtaagggcagtgcctgctgtgcctgttggccactcccacacttcccctcccccaggagccctcatctgctgtgctgagtccaggaaagcatagttaggtaggagctggttggagaagtgctagaactagaaggcagatgagactagcatgggcccacctggagggctgtccctaatggccccagtcgccttacctcacccacagcagtgcccttgtcttcctccaaaacagaaagcagtgacaaaagggggaggggtggtaatctgaagtctcactgctgagccttcagcttttatttttcactgtttcaaaacccgcattctattctagaatggtttttaaaatggaagatcttacctttttctatcttgttactctggggttttgtccccctaagaaattgcactttttgtttggggtttattcagctgcatagatgaccagcttgatccctggtgaaatgaaaagccttccttctcctgaagcctctttccgccctgccctccactaacaacactgaggagcacaagcccaggcttgcccacctggtaggaaaggaagaaattagaacaatgggagccttggctcccctctcgtctcctcccctccttcttgtcactggctttgatgaggcccacttcccagaggctcctgggcctgtgagtgcaggagctcattctcccctcactgctgaagtctgtgacagcttcttcctccagttatgtctttcttccaaagcaatttcttaaccatcagccatgtgctgctatttctagggcttctgggctttgtcccttactgagagattagggactccacagctgccttgaggtaggcctggctgaagacaagggtagcagcaggtggcaggctgttaaaagacagctgcctgaggagcctggagcagtggaaacaggtggaagaaaccggccacagccctgctttaccgggctcacctctagggcattccagcaagaggctgatgcaggagaatggccagcaccaaaggacatttaaaagagtttttgggtttttttgtttgtttgttgttggtgtttgttttttttttttttttttggcacacttgagctgactcagtgcaggtttaatatcctggtgacttgcagtcacattctaatgactttcaagggccagaatatggtgaaaatcacttaaaatatccgtcccttccatgccttagtttagcaggtaggctctatcttttgccatttctgtattttatgtgctgtgttcccgtttcactgggtatgaactgtgaaatggactgaatcctggccactttatgagtttgtttggttttataaggcatttcaatgtacattctataaatacaagcactccatttgcaaacagatcttaagctaatattttctttcccattcatcttgccctccccctcctcccgccagctttaaagttcagtggagaagccagatggcaattcagacaaaggtatactcttcctgcttcatgggtggtggcacgggaatagatagcccttagccctttccctcccagtcccagctgagccctcagaccacttgcttcccacataacaatgtcgcctccatttccgaggaacatccttgcgtagagaatgaaatatgctgcaatcatttctgcatccttactcctcacccccaaagaaaaaaaaaaggcctagcagggaagcagcatgcaggcttcacagcttaatgccaaggacagcgagtgaggctgggagcttctcttgggcctgctgggtctgtcagctctcggaatagggacagtccttactggtgccccaaggtgggacttggagaatattttgcttggcatatgtttggtctgaatggtgtagttgctggttccctagagaggaaaaggtggcaggcccagctttgctgggaaatggctcttaatttccagttgaaaccctagtagaattgtgaatgaaaacctcaaggttgagcccctctgccaagcagcagagctagtagaaggggatgcaggggcaaagcactcagttgccaagcaaggaggagagatgtacgtgggctgtgtggcagtccccacaccctgccctggcttcttcaggttatcgcaccactatggaatcctttgcagaatggtactcatataatggtttaaaacaacacattcataattgactctgtgcaggatgtcactcaatcagtttgggtttgctttattttattttatatatatattttttggtatcctgtacattgcagtgggtgtgaagatagtattttaatatttgtacaaagtttaatttaattttaattgttctatgtatataactgcatttctaaataattaaaaaaaagttcttatgaaggcaaaaaaaaaaaaaaaaaaaaaaaaaaaaaaaaaaaaaaaa

SEQ ID NO: 786 - DNA, 1709 bp, Homo sapiens
  SITE (365): n equals a,t,g, or c
ggtcgacccacgcgtccgctttttttttcatgattggttgcagttttcctacagttctcattaacaggtgctccttgatcactatgacacgcgatgatactttatctctctggttagggttggttatcttaattaattgcttatatttatatttaactgaaactagcctcaagatgccactttattaaagtttgagagtggtaagaaattacaaaactattccattaaaaaaaatagamaagaaaaccaaataaaccagaagaacatataaactatgattagtcaaatcaaatctctgcatttaaaagtaamcatcatttactagatgtctactggactagaaatatgtgtcttctgamcagtanctgagragtttctgcaaattattctgcaaattgtaaataggcatctctacctttttattccattaattttatcacmcagtatgaagtttttttaaaaccaaagccaatgatgtacatatattcaaaagcmcaagattctctgaaaatatagaaaatactgctaggcttattttacgaagacaaaggmcaataggaagctgggaagaataccagcaaacagctatacgttataaggcctctgtatcacaaaaatgaagggaaaataaagccaatctaaagtattacgtacttaaattaataaactggattggaagcaatcattccattataaatttcctttcatacatagcaatcccactgagatgatacctttgtaaaatcaggcaaaaatcaattgttaatattctagagatggacaaaccacagattaagtacctaaataatcatgtttccaatcaccaattaactaagtagaattctcttaattgtatctattaaggcctactaattgacagaaaaagggcagagttgaggacttggagaaagaagacagaagcattcctctgcctgattcataaaggtcagaatcccctggccgttgttgtaggaacccagccatcaccagtcacaaagaaaaaggcagcagcacactttgagtatccaaagggcctctttactgaggctgcatggctgttgtgggcttagtccaacatgatgatgtaggacaagaacctaccagttcaatcaacatgcaattaaaactcctgatgaaggacggcccagggcagtccattggtttggggcaggggacgcagagaagcaaagcctgttttaattaagaawatactaggcactcctctttaaatcctcaaaaaaatgaggatgaacaagattccaaaaccaacaatcacaatgtgtgtgaaagtaccagcaacaagaatgaagtgggactgaatatgtgctttcctacaaatgaaacctgtttgatggtgtaaggaaaatggatgagctgtggtcaagaataggccgaggcagacatctagtccagcatgactcagcgagtttggagtgcaggcacacagctctgcctgttatgtaaccatgccatgtgaggtgcattaagtaaccactcatgtgtgctcatgcttgactcggagccactattgtctgtaaaaggtataattaccctgctaatgctgtatgtaacggcttgcacctgtggctcatcctcaggcttgtacccatggcttgcttgtgcccatggcttgcttgcacccacagctcccgtgtgtccagagaataaagccatgttgaaatgccaaaaaaaaaaaaaaaagggcggcc

SEQ ID NO: 787 - DNA, 1885 bp, Homo sapiens
acgcgtccgttcatattttgtttgctcctttatattctgtgttacttaaatatgctctaaaaagcagtggtaaaacagctatttaggaattgaggctgttattcataacttccatgtgagactgccacatattgaactcatattgaactcatattgaaaatatgtcattttatccactgggttttgtttcctactttttttatttgtgttaagaaagggaaaaaaatcacaagtttgtctaaccattcagtagaaaaatcgacaaagcatttgcagacaacttggcaaggttacagagaaacggatatactgtttttcagtatttggggaggttggtttgagcagcatttattgagaatttcattagtggggatgtttctattgaaaacacagagttagaaagtcataaaatgttcttgcaatataaggtaataataccaccagcgtttatcttactgttttcatgttctaagtgcatgcacctgagtaaaagcatctgggctgcagtccagtctgagagatgccaggaaaggctgcctaggccagttcagtccagtaaatccctcttcgatcttctcttccacacagacagcggtgatgagcatgcccatgaactgacatgattattttggggaaaatgaaagacttgtattctttttgagatagtaattccactttcaggggcgaatacattttgtttattttatcacccttcagtgagttgtttttgttctttaatcaaggatgtatgtttgaagtaagaagtaaagcataaagtatatgattttgtgtgtgtgtgtttttatcttgctatacctgtagggaatgtttaattctgccttggaagtggccaaatttgaaggtgctgtgattcgaacagtcagtgggataagggggcagatcaagaaagcactccgagctccagaaggagctttcagggccagctttgaggataagctgctgatgagcgatattgtcttcatgcgaacttggtatcctgtttccatcccagcgttctataacccagtaacatctttgttgaaaccagtgggtgagaaagacacctggtcaggaatgcggaccacgggccaactcaggctcgcccatggcatcagactaaaggcgaacaaggactctctgtataagccaatcctgaggcaaaagaaacattttaattcactgcacattccaaaagccttgcagaaggccctgccatttaagaacaagcccaagacccaagcaaaggcaggcaaggtgccaaaggacaggcggagaccggccgtcatacgcgagcctcatgaaagaaagatccttgcactgctggatgctctgagtacggtgcatagtcagaagatgaagaaggccaaggagcagcggcacctgcacaataaagagcacttcagagccaagcagaaggaggaggaggagaagctgaagcggcagaaggacctcaggaagaagctcttcagaattcaggggcagaaggaaagaagaaaccagaagtccagtttgaagggggctgagggccaattgcagtgagcctttggactggagggactgtccctggatctgcggaggtagacagtttcaaacatcacagtttgaatgcctgtgaatgacacgtcagtgggaaagagctcaagagatgtctctactcaaactgtgcctgcaggaggaggaacagagaagcctgggctgctgggactgggttcattctcatgacttggggctgtcgagatttaaagtgatgtaagctgtggttatgtggattctcttactttcctctgcctgcctcagtttaattattttgtcctacagaaatatcattaaaatatttttttgttaaaaaaaaaaaaaaaaaaaaaaaaaaaaaaaaaaaaaaaaa

SEQ ID NO: 788 - DNA, 1078 bp, Homo sapiens
tagctatattgcccaggcttctcctggtctcttaatgtctgccccatcttagaatcttgtgtttctcaccatctatgtctctgagattttgtttttgtcttcctgtatgtccatctctccccatctctgtctttcatgtctttctctctgtctctgaccacccagtatctctgtgtctcactgtctctggtcatgaaatgtctgtcattgtggcccgtttcacactgtctctatatctgtttcccctgagatccgggatcagttgaaggaagaggagatccacatctaccagttccccgaatgtgactctgatgaagatgaagacttcaagaggcaggatgcagagatgaaggaaagcatcccttttgcagtcgtgggatcatgcgaggtggtgagggatggcgggaaccggccgtggagaacccacatcactgcgatttcctgaacctgcgacggatgctggtgcagacacacctgcaggacctgaaagaggtgacgcacgatctgctctacgagggctaccgggcccgctgcctacagagcctggcccggcctggggctcgcgatcgagccagccgcagtaagctttcccgccagagcgccacagagatcccgctgcccatgctgcctctggcggacaccgagaagctgatccgcgagaaagacgaagagtgcgccgcatgcaagagatgctggagaagatgcaggcccaaatgcagcagagccaggcccagggcgagcagtcagacgccctctgaggccacgccccgcccggccttacctcggctccgccttcagtcggcctcttgtccaatccccgcgccccacactgcccagcgccccccgggacctccgcgggtgccgccctcgcgcgggctagggggaggttctcccagcctgagtccgtagccccgccccggcgctggtcccgcccacccagacaccgcccacttcccggcccggggcctgcacaatctccgaccgcatcactgtcttccggagtcccccttcttctcccagactctgtcttcaataaaaactgagcttcccgcgaaaaaaaaaaaaaaaaaaaaaaaaa

SEQ ID NO: 789 - DNA, 1553 bp, Homo sapiens
cccacgcgtccgattatgcaaactttctaacattttaaattgctttattcttttttttattacatgcatcgtaagttttgcatatttacattgcttctggtttttagccgttctgaatctgaacaccttccttttttagcagcagcaggcgctctttagtcatttctcccccagttcgaacagctacagtctccagtcctcttacctcacctactagtccctctacactttccttgaagagtgagagtgaatctgtctcagcaactgaagatctggcacctgatgcagcccaaggggaagacaattctgagatcaaggagctcttagaagaggaggaaatagagaaggaaggatctgaagcaagctcctctgaggaagatgagcctctaccagcctgcaatggccccgcccaggcccagccctctcctaccactgaaagggccaagtcccaggaggaagttctccccagctccacaactccatcaccaggcggagcctggagcccttcagggcagccttcatcatctgccacagaagtagtcctccgaacccgcaccgcaagtgaaggatctgaacaaccaaagaagagagctctatccagaggactcagcaccccctagtaggctcctccacccagagccactgcaagccccaggccctcctcagggaacataccttccagccctacagcctctggagggggttcacccaccagccctagggcctccttggggactgggactgcaagtcctaggacctccctagaggtctctcctaatccagaaccaccagagaagccagtaagaactcctgaggccaaagaaaatgaaaacatccacaatcagaaccctgaagaactttgtacttcccccaccttaatgacatctcaggttgcttcagagcctggagaggcaaagaagatggaagacaaggaaaaggataataagcttatctcagctaactcctcggagggccaagaccagcttcaagtctccatggtaccagaaaacaacaacctcacagcacctgaacctcaagaagaggtatccacaagtgaaaatccacaactctgaagagaaactaccaagactcctcctgccccaaacctcgccagagaagctcttcaaccagagggtataggtcagagggatataagagccagcatccatccctgggttctcagtaggaatgctggtgctgtctaaagacctggcattaatggaggcggaggagcagccttacgggagggatggagggaggcaggctggggagaagagaacattagactcagggaatatttaattctggttttagcattattagaataagactttatacattaactaaagtggagctttaatcactataaaaagcaaaagtatctatagacacagacacttgcctatacagagacataaccacacacactcagaggatagtgaacaaatctgtctttgacttacgacccattttgcaagacttaaagccggaagaacacattttcagattgttaaataaagtctgattctgactaaaaaaaaaaaaaaaaaaaa

SEQ ID NO: 790 - DNA, 1258 bp, Homo sapiens
  SITE (1180): n equals a,t,g, or c
  SITE (1240): n equals a,t,g, or c
  SITE (1243): n equals a,t,g, or c
acgcgtccggaaagtttcaccagagcccttttccaccatgacagtgctcctcctgctcattcctctcagcaaacgagagccattttccaagagttttgatgggaaatcatcaggcatccactttgcagtcctgattgggcttcttctgactttttgtttcctaatcttaaaaagctgtaaagggcacccatttctcttcagttcacaatgcagagactacactgacaaggtgaaatttccaggagcctcagttctttagggatagactgaatggttggtattatgtcttatagtagtatcttgaactgatggaacttatgttgagaaataaagtttatatttaaaaatttcttttaattccattttccatgaacttttaaaagtcccctcatacatgtttacagatgtccatagaaacgttattcagatactgaataaacaaccaaaaaaacattgttttatcaatgaggaacctgttaaatctacataatacagctataaaaataattatgtagttctataattaccgacatgaagacatctgagtaaaaacctatttctgatgttatagaagaacaagtatagtacactcttgaatgtaaatttctctgtgtatgcattcatatatactgtacattcagaatcctggaaaggggcttgcacagatgttaccagtgtatgtctcagagtgacagaaggacatatgagttttccttttcccttatacttctttaaaaacacactgattttttttgcacaatgaatatcaatcatattaacatataaagatttaattttttccccagaagaaaacaaaaagattgagctttgtgtaccatccacggacaaaaatgctatgtgttttgcagactcaggtagtagtccctgcgtgtgctgggggtgagatggggaggagccgctcatttctcagcaggccacaccactttcttccctaccaaagctgcacaatgttttcagcagtgtctgcaatgagagctaaatgacctccatctacaacaaatgtaacctgggcacttgctcttccacggatgctcatgagtaaaaggaagctggagttctttacaaaagaagctttgctatgagaaataaaaacaacaaactgttttttacaatttttatttggtgttaactccacaagaaaaaaaaaaaaaaaaaaaanaaaaaaaaaaaaaaaaaaaaaaaaaaaaaaaaaaaaaaaaaaaaaaaaaaaaaaaaaaanaanaaaaaaaaaaaaaaa

SEQ ID NO: 791 - DNA, 346 bp, Homo sapiens
ggggattgacagccacctgtgaagactcacctgctaggatctggctggctgtcttggtcgctgatcatgtccgaagaagtacaccactttcttaatcatgcagcttttaaaaatctcctcagccccacacttgagggtctctctcctagattctaatgtctagccctacacgaatgcagtatgctgcccttgatgtgataggacaacagaggacctgcacacatgctactggtcctgactgtgttttccttccataaacactgttctggcaagctggttttatgtgctgctggaccatttgcttatgtttgsacaataaaccagraattaaatttaaaaaaaaaaa

SEQ ID NO: 792 - DNA, 541 bp, Homo sapiens
  SITE (141): n equals a,t,g, or c
gaccaaagtacgggtaatgacacagtcctaaatgtggccttgctgaacgtcatctccaaccaggagtgtaacatcaagcaccgaggacatgtgcgggagagcgagatgtgcactgagggactgttgkcccctgtggctgtngagrgtgactacgggggcccacttgcctgctttacccacaactgctgggtcctgaaaggaattagaatccccaactgagtatgtgcaaggtcgcgctggccagccgtcttcacgcktgtctctgtgtttgtggactggattcacaaggtcatgagactgggttaggcccagccttgacgccatatgctttggggaggacaaaacttgtaagtacagtcaaggacaagacttgtactcaargttgagatttaataaaattaatatttttactacttcaccaaggactttcttaaatgaaaatggtttttccccctacaagtaaacagtaataaagaagagaattattcctagtgcagtttgttttcatggtcttaatttttgctaagactccactgttttt

SEQ ID NO: 793 - DNA, 464 bp, Homo sapiens
tgattgtatgactggtacactctggcccagccagagctataattgttttttaaatgtgtcttgaagaatgcacagtgacaaggggagtagctattgggaacagggaactgtcctacactgctattgttgctacatgtatcgagccttgattgctcctagttatatacagggtctatcttgcttcctacctacatctgcttgagcagtgcctcaagtacatccttattaggaacatttcaaaccccttttagttaagtctttcactaaggttctcttgcatatatttcaagtgaatgttggrtctcagactaaccatagtaataatacacatttctgtgagtgctgacttgtctttgcaatatttcttttcygrwttawttaatttyctkgwattatakgtaaaaccaaaatgttaaatcaakgraataaatttgcagttargtcttaaaaaaaaaaaaaaaaaa

SEQ ID NO: 794 - DNA, 453 bp, Homo sapiens
ggcttctactttctatatactttctcccacttgagaaaggggccttgaggctgggtcccttcatggtatacctttagactgaacggtttgcaacctagggcttgggcattacattccctgggattcacatgccctaactaaacctaccttgattttctcagacagcacaggcaggcaataaagcgtcacagattgtcccctaaccccatccagccatgtgtatgggtgtgttttattcaatgggatagtactgagcacatgaaagaaatgaatgacttctgtcaatctcttttcattcagtcttctcattctgtcaattgttttctcatccgcagtgcctctgccagaactgtgctcacatccattatttaagccagatcttttctaagtattatagaagtgtagaggcacatagaataaataaaaccagacttcaaaaaaaaaaaaaaaaaa

SEQ ID NO: 795 - DNA, 2212 bp, Homo sapiens
  SITE (975): n equals a,t,g, or c
  SITE (1255): n equals a,t,g, or c
  SITE (1337): n equals a,t,g, or c
ggaatctctggcaggtctgtgtgttctgtcacttgctcgcccgagcagtggctttgctggtcatcccggtcgtcctgttacttactgttcttctacgtccacttgattctagtcttccgctctgggccccacgaccaaatcatgtccagtgccttccaggccagcttagagggaggactagctcggatcacycagggtcagccactggaggtggcctttgggtcccagrtcactctgaggaacgtctttgggaaacctgtgccctgctggcttcattcccaccaggacacctaccccatgatatatgagaacggcgaggcagctcccaccagcaacaggtgacctgttaccccttcaaagacgtcaataactggtggattgtaaaggatcccaggaggcaccagctggtggtgagcagccctccgagacctgtgaggcacggggacatggtgcagctggtccacggcatgaccacccgctccctgaacacgcatgatgttgcagcccccctgagcccccattcacaggaggtctcctgctacattgactataacatctccatgcccgcccagaacctctggagactggaaattgtgaacagaggatctgacacagacgtctggaagaccatcctctcagaggtccgctttgtgcacgtgaacacttccgctgtcttaaagctgagcggggctcacctccctgactgggggtatcggcaactggagatcgtcggggagaagctgtcccggggctaccacgggagcacggtgtggaacgtggaggagcaccgatacggcgcgagcaggagcagagggagcgggaacgggagctgcactcacctgcgcaggtggacgtcagcaggaacctcagcttcatggcgagattctcggagctgcagtggaggatgctggcgctgagaagtgatgactcggaacacaagtacagctccagcccactggagtgggtcaccctggnacaccaatattgcctactggctgcaccccaggaccagcgctcagatccacctacttggaaacatagtgatctgggtttcgggcagcctcgctctggccatctacgccctgctgtccttgtggtacctgctccgacggcgaagaaatgtccatgacctccctcaggatgcctggctgcgctgggtgctggctggggcgctgtgtgccggtggctgggcagtgaactacctcccgttcttcctgatggagaagacactcttcctctaccactacctgcccgnactcaccttccaaatccttctgctccctgtggtcctgcagcacatcagcgaccacctgtgcaggtcccagctccagaggagnatcttcagcgccctggtggtggcctggtactcctccgcgtgccacgtgtccaacacgctgcgcccactcacctacggggacaagtcactctcgccacatgaactcaaggcccttcgctggaaagacagctgggacatcttgatccgaaaacactagaacaagagtgtggcaaagaacacccgtgctggggtcgggacgaggttgaagggtcttggtcaatgtacgtaatgagcagggtgggccccacgctgggaggacacgggctgggctgagcagggcctctagtggaacacatgggggtctcattgaaaagctctctgatgagcacctccttttgtgcaaagttaattttttctcgacaataaagatattccgtgtcttcacccctgaactaagacacagggagtatttcagaggccagcgtaggagtcatcgacaacgaaaagccgagaacccagggccagcagtggagcctcagcagaccagggcctggtccttgctaattgctgcagggtggagtttgatctggcagacccgatcctccttcatgaacacccagcaacctgagcaagtcccggccctgccctcagcgagcccggcaggcgtcccgggacagctcagtgttggagggccacctgaaccacgagccagggctggggcttgcatgtcattgtctatgacagcgtcaagactggcccttggcaccgtgctgtgtggaaaccctcccctctgagactccactgagacgtggctgagtgaaatcttcctcgtcagtggtcaaggtgtgtcatccatacagctccatgcctttgtcttttttaaatgtaattaaaaaaggaaccaactggaaaaaaaaaaaaaaaaaaaaactcgag

SEQ ID NO: 796 - DNA, 1518 bp, Homo sapiens
ccacgcgtccggactcactgaatgagctccagaccactgtggagggccagggcgctgatctggctgacctgggggcaaccaaggaccgtatcatttctgagattaacaggctgcagcaggaggccacagagcatgctacagagagtgaagagcgcttccgaggcctagaggagggacaagcacaggccggccagtgccccagcttagaggggcgattgggccgtcttgagggtgtctgtgaacggttggacactgtggctgggggactgcagggcctgcgcgagggcctttccagacacgtggctgggctctgggctgggctccgggaaaccaacaccaccagccagatgcaggcagccctgctggagaagctggtcgggggacaggcgggcctgggcaggcggctgggtgcccttaacagctccctgcagctcctggaggaccgtctgcaccagctcagcctgaaggacctcactgggcctgcaggagaggctgggcccccagggcctcctgggctgcagggacccccaggccctgctggacctccaggatcaccaggcaaggacgggcaagagggccccatcgggccaccaggtcctcaaggtgaacagggagtggagggggcaccagcagcccctgtgccccaagtggcattttcagctgctctgagtttgccccggtctgaaccaggcacggtccccttcgacagagtcctgctcaatgatggaggctattatgatccagagacaggcgtgttcacagcgccactggctggacgctacttgctgagcgcggtgctgactgggcaccggcacgagaaagtggaggccgtgctgtcccgctccaaccagggcgtggcccgcgtagactccggtggctacgagcctgagggcctggagaataagccggtggccgagagccagcccagcccgggcaccctgggcgtcttcagcctcatcctgccgctgcaggccggggacacggtctgcgtcgacctggtcatggggcagctggcgcactcggaggagccgctcaccatcttcagcggggccctgctctatggggacccagagcttgaacacgcgtagactggggtcccgcccgacgtgtctacgtcggctgaagagacagcgggggcggcgggctcctggggtctcgcctgagacggggcacctagccctgggcgagcgccgcacccgggcccgcagcggcaccgcgcccagagcggcctctccccacgcccggggcgcgccggctcagggaggctcggggccgcccatgcagacttttggcctggcgcgatcccccaagaacccctccagggccggcctgcggaggagccgatcctcgcaccctccgctccctccactggccctccaggtcgattccctgggctccaggctcccccgcgcgggcgccgcccgccgccatactaaacgatcgaggaataaagacacttggtttttctaaaaaaaactaaaaaaaaaaaaaaaaaaaaaaaaaaaaaaaaaaaaaaaa

SEQ ID NO: 797 - DNA, 1498 bp, Homo sapiens
ccacgcgtccgctgtacgtgtaggtggttcagatcctgcgtaatggcagcatgaggacttaaaaggtggttttcattttgaagatggctatgtagcttgtaaggtgtatcacagcagtacctctcatggctttttggttccagcagtgagggcattggtgagatcaatggtaaactgtgcaagctttctttttatcattaggaaatgtgaaacgttggacaaattttgagttttaacaaggacaaaaagttgaaagaaaaggcacagttaacaaaaaagggtggctagatttatcttgggtgatggaggaaatgagagaggaatgctcttgaaaggtggtctgtggatctgtctgaatagaaagagcacagtaagtatgcattgccggagaaaacgtccttgaagctgcttgtctcatgtgtatgatgtgctttttaaatcatgcccctcgttgcctgcctaatctgtgactccctaaaaactaactgggcccatgtagatggggctgcaaccagagctgaataacatgttaggctcacacatgcatcagcactgcacactggaatcattgctcttcctggactttgtagaaatcagtctcaagtgcttcaagagtctggctcctgctacttttatctgtcaggtagcacataaggtttgcagggttatattttgtatagaatcacagttgtggagaaaaagtaataatttctcaatgaattttaaaaatgggcctattttctatccccgtggttcatctgatataattaatgttccctgtgaattccccccctctatgggaaggatgcctttactctttatcagtaataaattatgacctgttttcatattgccttagggttatttccctgtgtaaaccattgtcttttgttttggttttctttagcattatgaagctttggtattgtacaaggtcagtagtaagatgctcactagtctcagggcttgtgtaatattctgggaggtcatttaaatgccagaaatggtcaagcaattatacacagtatttatgactctgttaagcataccgtttgtctgtcacattagtagattctgagattaaaaaaaatttttaaagagtgatcatttaaataatttctaaaagggtcttttcaagctctaacaaagtcactaacaaatgcattattttctacagaattagatgttagtagtacagtactgcatattcagggaaaaagtgtgaggaattgatttcaaaatagttcgttcttgtgtttgacctaagaatgattgtcgcatgaagtgtttgtttttacagtttagcatatataaacaaacatgataggattccttaagatgttaccacccagggggccacaagccagcctgctgtctcaggaagctgtagaaggagtgtttgtcaatttcttgtcactggtttgctgacttactgaggattaattgttgccttacaatgttactgaaataaactgtttaatataaaaaaaaaaaaaaa

SEQ ID NO: 798 - DNA, 1626 bp, Homo sapiens
ggcctggggcccctcgtcccaggcaaggtggccgccaccagcgtcatcacaatagtaaagtccaagacggatgcccgatcgtagggacgcgcgtctgcccaggcgggtctttgcggggccactaggcacatggcgaatttggctgccctgtccctctgtttccttctcttctctttcctccctctcttccccacccttctctcttccctgcaaagcacaacctgtaccccaggggcgccgggctgagcccctttgatctcgtcattgtcgtcgtgtgttttgtatgttgggattggtcagttcggcggtgacgtggggtcgccccaaccccttttgtaccagggccatgcaggcttggagtccagagttggtgctgtgggaacggactagagagagttgcgggagagagaaggagcaggcacgctgggcctcgcgtgtccccgagcagtgagggtcccagtgttccctccactcccgagtggccacaggctcgcgggctgggaaggattcactctctttagccccaggggagcagctcagcttagcccagcatgaagagatgggctctgctctgagagtagggcgggcttgaaggccctgatgggtggaccaccagcctgggcgcagtggtgctgggggcgtgcagctgggcccaggggctgtgcactcaggcctgacccgttgcactgaacaagaccaaatcgctggttgtgcgcttaacgtgagggtgggtccagtgtgccctgcgatgggtcccgtgtcactgtttacatgacctatttgtgtggttatatagccctttatttaaaagagagaagttccttttacaaagttattaaattaattatatgtttaaaagttaaagaaaaaagagctgcagagtatttataaaactgtcttttagaaaaaaaacaagcaagaagaccatttgaccatatgaatggaaaagggaagaaagtataatagaaactttgctagttaaaaaaaaaagaaaaaaaaagaaaaaaaatccctttcttgtaaacttacggacacctctttgtggctgttggagtttagtttttatatacacagagttatcagacattatttataaaacttagtttaaaaaaaagacaaaaaaaaaaaagccaagccgtgagccgaccagaaggccgtcctctttgatatcttttgcaattgtaccgaaagtgacttactcctctgcccttcctgcttccgtctcttgccggtgccgtggtgtcgtccgtgcctggtgaggttttgtgcagcggtaaagtgctggtgcttctggtgacctttgacctgtgggtgtcacttcttgtgtctgttttcccgtgttcgttttttgggtttagttgtgcttttgcttctgctggcttgctggacctgggctggggtgccaagtggcgcctgctgcgtcagagctcaaggaatctgtgcccaccaccagctcctggtccgtagaggtgagacatggggktctgycatgcccccctccactgagccttggctacatctgtgtctaaggcttgggctgatctagtggcggggtaagtgaaactggggtcccttggggcgccccacgctgcttccacaaccaacaactctggccttgggtggtgg

SEQ ID NO: 799 - DNA, 669 bp, Homo sapiens
  SITE (23): n equals a,t,g, or c
  SITE (37): n equals a,t,g, or c
  SITE (75): n equals a,t,g, or c
  SITE (97): n equals a,t,g, or c
  SITE (108): n equals a,t,g, or c
  SITE (202): n equals a,t,g, or c
tgggaggttcttttataagcagngctcgtttagtganccgtcagatcgcctggagacgccatccacgctgttttnacctccatagaagccaccgggnccgatccagcntccggactctagcctaggccgcgggacggataacaatttcacacaggaaacagctatgaccactaggcttttgcaaaaagctatttaggtgacnctatagaaggtacgcctgcaggtaccggtccggaattcccgggtcgacccacgcgtccgccctggggagcttgttcttcaccagcaacgaaactcagacagcaatggatgactttcttctggctgatctggcctggaacacgatggagtctcagttcagctctgtagaaacccagacttctgcggaaccacacacagtctccaacttctaaaactaacggtggagtccatgtgtgaaatggcatctaccatttcctctggattaaaactacggactggggacaacagtattaattcgattgaatgtggctgatgatgcagttgcttagcttctttgtgtttctttgccttttgtacttgtaaacagaaatttgcgtataaatgtgagtgtattataaagtttgagatgttgatctaaaaaaaaaaaaaaaaaaaaaaaaaaaaaaaaaaaaaaaaaaaaaaaaaaaa

SEQ ID NO: 800 - DNA, 2791 bp, Homo sapiens
gtcacctgacacctcaccggtccggaattcccgggtcgacccacgcgtccgcccacgcgtccgtaatccgtggttttctggagcatttcacagcctaggaacatacaaggggggcatctccctggaatgtaaattgactaagaggaattcaataatggtcaaatgaatgcagaattttagagtcttgcttagtattctcaccacatttcgtttartctactcatactctttttctcttactgctgacactagatggaaaaactcttaattaaaagtatttcacaaaatgtgctcgttttcagtcattccgtttccactccagcctgttgtgttgtttttttgaaataataatttaaagtaattttccttttgcaggatggcatagtcaatccaacaataagaaaagatttgaaaactggaccgaaattctactgctgtccaattgaaggctgccccagaggccctgagagaccgttttctcagttttctctcgtaaaacagcactttatgaaaatgcatgctgagaagaagcacaaatgtagtaagtgcagcaattcgtacggtacagaatgggacctgaaaagacatgcagaggactgtggcaagaccttccggtgcacatgcggctgtccctacgccagtagaacagcactgcagtctcacatctaccgaactgggcacgagatacctgcagaacacagggacccacctagtaagaaaaggaaaatggaaaactgtgcacaaaaccagaagttatccaacaagaccattgaatcattgaacaaccaaccaatccctagaccagacactcaagaactagaagcttcagaaataaagctagaaccatcttttgaagactcttgtggctctaacactgacaagcagactcttacaacaccaccgagatatcctcagaagttgcttttaccaaagcccaaagtggctttggttaaactacccgtgatgcagttttctgtcatgcctgtctttgtgcctacagccgactcctcagcccagcctgtggtgttaggtgttgatcagggctctgccacaggggctgtgcacttaatgcccttgtcagtaggaaccctgatcctcggcctagattcagaggcttgctctcttaaggagagcctacctcttttcaaaattgctaatcctattgctggtgagccaataagtactggtgttcaagtgaactttggtaaaagtccatctaatcctttacaagaactagggaacacgtgtcaaaagawtagcatttcttcaatcaacgtgcagacagatctgtcttatgcctcacaaaactttataccttctgcacagtgggccactgctgattcctctgtgtcgtcttgttctcaaactgatttgtcgtttgattctcaagtgtctcttcccattagtgttcacactcagacatttttgcccagctctaaggtaacttcatctatagctgctcagactgatgcatttatggacacctgtttccagtcaggtggggtctccagagaaactcaaaccagtgggatagaaagtccaacggatgaccatgtacagatggaccaagctggaatgtgcggagacatttttgagagtgttcattcatcatataatgttgctacaggtaacattataagcaacagtttagtagcagagacagtaactcatagtttgttacctcagaatgagcctaagactttaaatcaagatattgagaaatctgcaccaattataaatttcagtgcacagaatagtatgcttccttcacagaacatgacagataatcagacccaaaccatagatttattaagtgatttggaaaacatcttgtcaagtaatctgcctgcccagacattggatcatcgtagtcttttgtctgacacaaatcctggacctgacacccagctcccatctggcccagcccagaaccccggaatcgattttgatatcgaagagttcttttcggcctcaaatatccagactcaaactgaagagagtgaacttagcaccatgaccaccgagccagtcttggagtcactggacatagagactcaaacggacttcttactcgcagatacctctgctcagtcctatgggtgtaggggaaattctaacttcttaggccttgagatgtttgacacacagacacagacagacttaaactttttcttagacagtagccctcatctgcctctgggaagtattctgaaacactccagcttttccgtgagtactgattcatctgacacagagacccaaactgaaggagtctccactgctaaaaatatacctgctctagaaagcaaagttcagttgaacagtacagaaacacagaccatgagttctgggtttgaaaccctggggagcttgttcttcaccagcaacgaaactcagacagcaatggatgactttcttctggctgatctggcctggaacacgatggagtctcagttcagctctgtagaaacccagacttctgcggaaccacacacagtctccaacttctaaaactaacggtggagtccatgtgtgaaatggcatctaccatttcctctggattaaaactacggactggggacaacagtattaattcgattgaatgtggctgatgatgcagttgcttagcttctttgtgtttctttgccttttgtacttgtaaacagaaatttgcgtataaatgtgagtgtattataaagtttgagatgttgatctaaattgtttttgtgttgcctacatttgccttttcacagctagtcttttcawgttaaaaaaaaaaaaaaaaaaaaaa

SEQ ID NO: 801 - DNA, 2791 bp, Homo sapiens
gtcacctgacacctcaccggtccggaattcccgggtcgacccacgcgtccgcccacgcgtccgtaatccgtggttttctggagcatttcacagcctaggaacatacaaggggggcatctccctggaatgtaaattgactaagaggaattcaataatggtcaaatgaatgcagaattttagagtcttgcttagtattctcaccacatttcgtttartctactcatactctttttctcttactgctgacactagatggaaaaactcttaattaaaagtatttcacaaaatgtgctcgttttcagtcattccgtttccactccagcctgttgtgttgtttttttgaaataataatttaaagtaattttccttttgcaggatggcatagtcaatccaacaataagaaaagatttgaaaactggaccgaaattctactgctgtccaattgaaggctgccccagaggccctgagagaccgttttctcagttttctctcgtaaaacagcactttatgaaaatgcatgctgagaagaagcacaaatgtagtaagtgcagcaattcgtacggtacagaatgggacctgaaaagacatgcagaggactgtggcaagaccttccggtgcacatgcggctgtccctacgccagtagaacagcactgcagtctcacatctaccgaactgggcacgagatacctgcagaacacagggacccacctagtaagaaaaggaaaatggaaaactgtgcacaaaaccagaagttatccaacaagaccattgaatcattgaacaaccaaccaatccctagaccagacactcaagaactagaagcttcagaaataaagctagaaccatcttttgaagactcttgtggctctaacactgacaagcagactcttacaacaccaccgagatatcctcagaagttgcttttaccaaagcccaaagtggctttggttaaactacccgtgatgcagttttctgtcatgcctgtctttgtgcctacagccgactcctcagcccagcctgtggtgttaggtgttgatcagggctctgccacaggggctgtgcacttaatgcccttgtcagtaggaaccctgatcctcggcctagattcagaggcttgctctcttaaggagagcctacctcttttcaaaattgctaatcctattgctggtgagccaataagtactggtgttcaagtgaactttggtaaaagtccatctaatcctttacaagaactagggaacacgtgtcaaaagawtagcatttcttcaatcaacgtgcagacagatctgtcttatgcctcacaaaactttataccttctgcacagtgggccactgctgattcctctgtgtcgtcttgttctcaaactgatttgtcgtttgattctcaagtgtctcttcccattagtgttcacactcagacatttttgcccagctctaaggtaacttcatctatagctgctcagactgatgcatttatggacacctgtttccagtcaggtggggtctccagagaaactcaaaccagtgggatagaaagtccaacggatgaccatgtacagatggaccaagctggaatgtgcggagacatttttgagagtgttcattcatcatataatgttgctacaggtaacattataagcaacagtttagtagcagagacagtaactcatagtttgttacctcagaatgagcctaagactttaaatcaagatattgagaaatctgcaccaattataaatttcagtgcacagaatagtatgcttccttcacagaacatgacagataatcagacccaaaccatagatttattaagtgatttggaaaacatcttgtcaagtaatctgcctgcccagacattggatcatcgtagtcttttgtctgacacaaatcctggacctgacacccagctcccatctggcccagcccagaaccccggaatcgattttgatatcgaagagttcttttcggcctcaaatatccagactcaaactgaagagagtgaacttagcaccatgaccaccgagccagtcttggagtcactggacatagagactcaaacggacttcttactcgcagatacctctgctcagtcctatgggtgtaggggaaattctaacttcttaggccttgagatgtttgacacacagacacagacagacttaaactttttcttagacagtagccctcatctgcctctgggaagtattctgaaacactccagcttttccgtgagtactgattcatctgacacagagacccaaactgaaggagtctccactgctaaaaatatacctgctctagaaagcaaagttcagttgaacagtacagaaacacagaccatgagttctgggtttgaaaccctggggagcttgttcttcaccagcaacgaaactcagacagcaatggatgactttcttctggctgatctggcctggaacacgatggagtctcagttcagctctgtagaaacccagacttctgcggaaccacacacagtctccaacttctaaaactaacggtggagtccatgtgtgaaatggcatctaccatttcctctggattaaaactacggactggggacaacagtattaattcgattgaatgtggctgatgatgcagttgcttagcttctttgtgtttctttgccttttgtacttgtaaacagaaatttgcgtataaatgtgagtgtattataaagtttgagatgttgatctaaattgtttttgtgttgcctacatttgccttttcacagctagtcttttcatgttaaaaaaaaaaaaaaaaaaaaaa

SEQ ID NO: 802 - DNA, 1025 bp, Homo sapiens
ccacgcgtccgaaagaaacctgagtcaacatcattttctgcccctcggaaaaagagcccggatttatctgaagcaatggaaatgatggagtctcagacactactgctgacgctactatccgtaaagatggagaacaatcttgctgagtttgaaagaagggcagaaaagaatttattaataatgtgtaaggagaaggagaagctacagaaaaaggcccacgagctgaagcgcaggcttctcctctctcagaggaagcgggagctggcagatgtcctggatgcccagatcgagatgctcagccccttcgaggcagtggccacacgcttcaaggagcaatacaggacattcgccacggccctggacactaccaggcacgagctgcccgtgaagtccatccacctggagggagatgggcagcagctcttagacgccctgcagcttgaactggtgaccattcagcgcctcctggggagaacttgatgttggtgattcggaagaaaatgtgcaggtgctggacttactgagcgaactcaaggacgtgaccgcgaaaaaggaccttggagctccgaaggagctttgccccaggtgctggaactctccgcagaggcaagcaaagaggcagccttggcaaaccaggaagtctgggaagagacccagggcatggcgccccccagccggtggtatttcaatcaagacagtgcctgcagagaatctgggggagcacccaagaacacgcccctgtctgaggacgacaacccgggtgcctcgtcagcccccgctcaggccacgttcatcagcccaagcgaagatttttcttcaagcagccaggcagaagtcccgccctctctctctcgttcagggagggacttgtcatgactcatggttacattcaggatacttgagcactttatatactaccgtagcactgtagctattttttatgtgataatcttgtttgataaaaaagtaaacctgttttgcaattgaaaaaaaaaaaaaaaaaaaaaaaaaaaaaaaaaaaaaaa

SEQ ID NO: 803 - DNA, 920 bp, Homo sapiens
cccacgcgtccctgtccactccatgtaaatgcctttagcatttcagttattgtatattttgtttaaggtgacacttcagcatgccgctaatgtctttgttagtgacagtgcattttgtagtactgtccaagtgttgtgctaacagtaagccatttcttaagttttttgccttgattagggtgccctaatttgagggttttaaaaaaaactatatttttgttaattataaaactgtaaagagctataaaagctattcccatttggttagtcaaaagggttttattgctaaatgtttggtgtaaagttgagacccttttccattttggtgacagatttctttggggaaaaaaggcagctttctgttttataaatgcagacttctgtttattgaatgaagcatatctcagtgtttatctgtcaggttttgaaacatttcatatatgtccaaatacttggcaggatttaaaaaaaaatagtgaatttggtgtaaagttgctattttatggaaatgcctctaactttacattttcattccatctgtagatttttctatctttataaaatattggagttattttttaaggaaaaatagaaaagtagcttgtgaatagctcaaactaagcttacaaatcgcatgtaaaaaagcaaaaaagttatttgtgtctgtttatattgcttccttttttgtagcctttgtacctgtacagggtgacagtaagggccaagcaggagaggcgtaatccttgtataaaataggatccagcgacactcttgtatttatctgttctctttttagtcagtcacttcaaaaaaacaaaaaacaaacaaaaaaaagctgtacattttaacataaaataaattatgatgagccaaaaaaaaaaaaaaaaaaaaaaaaaaaaaaaaaaaaaaaaaaaaaaaaa

SEQ ID NO: 804 - DNA, 815 bp, Homo sapiens
ggcacgagaatgaatttgacattgtacagatcaggagaaagaaagttcattaacagtttcaagatccctgcgttttcacccagcaggaaacaaattaccatgagttaaggtggggaaattactggcaattcattgccttcttttaaagactttaaaaaaaaaatgagtaaataattttagactattaccccctttccatgagagatacacagctagttaaactgccatgcatattaattttttgttttcattttattccacctaccaactacacagtgtctgctttccaaaattagtttgaaagccaatgacctgtgtttgaactgggtgaaatagcatagcagttcacacctggaataaaagaatgattgtgtgtgagtctgttaatggctgtgtagagctatatctctatatggagctatataaaaatatattttatacatgccagattcatttagacttgaattgaccctgtggtaaagcagcaggaataaaatatttttttgataaagcactcactcaaatagagaaatgagctcttgcagttaccatttaatctgtgacttctttttgagatgcagaaaaactccattataaagtgctcagttcatccagggacacagacacactgtgggttataacacaccctcatctgcatggtgaggtacatgagtcagctgctcttctctcaggagggtggctttaaagctccacagtcatgcatgctgccaattccagattgtccaaacctgtaggttagcaaggacacaggtgagccataggtatgacatgttcataaaaaaaaaaaaaaaaaa

SEQ ID NO: 805 - DNA, 586 bp, Homo sapiens
ggcacgagaaaattattttacatactagcatcactttgtatccatctactctaatctctccagatgtaaatcctcccatcacaagcttcttcctatggattctcttgcctggggaggcatatttgagttgcatttcctccaatgtgcgtcaccttcccaaagaatccaaggatgccatcaacttctgttagagggagcattatgtttggtatagcacatccggtatttggcagagtcaggagtccttcaccctcccaggaactgtactttgaaacttcccataatcctccactgtgatcataatgtttcagctcaccttccaggcaggcctaggaatcacatgtctgggacacacacatgccattatcaccaaatagatttcttgatagtcatttaaaggacccttcactgtgcagtttacagtttcaaagtattttcacacatctcatttgatcctggtgacaatcccattaaataagcaaacaaggttgctacctctgtttcacagttaagaggcctaaagattagagaactgtagatacttgcccaaagtttgacagcagtacagggaataatgccagacata

SEQ ID NO: 806 - DNA, 246 bp, Homo sapiens
ggcacgagcagtttttaaatctgggataagtatactgagtgtgctcaattttggggactaagctgctataatttagattttataagtaatgaaatgattttttcatatctgcattactatttgttctttttcctaacttattcaggacaggagagagaaagggaagtattattggcccactttgaaaacctcaaacatttgcactgtgagattgggaaataatgttttgacggtatagaaagaaag

SEQ ID NO: 807 - DNA, 1701 bp, Homo sapiens
ggcacgaggaaaggaaggaactgtggaaggggtgatgggagctgggatacactccagtttcatttcttctgggggattttcgagaatctccaattcaagagtcaatggcaatacttcctgttttactatttccacaatgctctccgtggctgataatttttcgctaactccatttatttcattaattaggttagtactagaaaccagtggaatatcattaggtgctacactacagggtttcttgcatatatcatcatcattttcatttgttggtaaagggtctgatgtttctgtgcaagatgtgaggctgggtataggaattgtgtcttctcttggggatgagagttcacatctgtcatctatagcagtggtgaatattggttggctactaagagcagaagaggtgggggctgcaattgtacttcgagcaacagaagaaacagtggtaggtgatggaggcagaggaagctctgctatggatactattgcagtagtttcagatgtctggccttcttgttctttcttctctccactgaggactagcctaaggactggggaaggagactttaacactggatctggttttggcttctcctcttgcttctggtcgctagctgcagtgacaggggtgctggcagcaagatgagcgctctccacagtcccataaaccacagggctgtgctcggggacctggctgggcagctgctgaggaggagtaggtgtggacgtgggtcttcctatgggtggagtaggatttctgctgccacctccagacataatctcctctgttatgtctttacctccctggtttggatcccgaattcttatagtttttttctctctcttggctggaggcggctgttgctgcgtaggcactatgataggtgctgactgatacaccggctgacttgggtaaaaaggcgttccataagcattggggaagtccccaggtcctggtccaggataaaaaggacctggccccggtggttgaactggatattgttgggggggcccaacataaggagggccactatgacggtactgtggtatacagtactgaggcccctggggcactgggtacggcatgggcagatggttaaccatcatgatgtgctgattagcctggtacactgcagtgggtgtctgtgcaccaggacgaatggaaggactgctgttcgggatggtagctctaggaggctgtatttgaggcctctggaaaaaaatgcagtattttatccagcctcttccagccaaggacctgtaaacgggagtctgttccaaaaccttcctcctcttccagttgtctgtgcaatgtattggcactgttctgctgggcggagaacgggtttgaggttgtgaattcattgtctgaggggtttgagggtataccagcgtggttggacctgcattctgtccagagggataaggggtttgagagagtccaggggacgatgcatgtcccgggggcgttgccgcaagatttggatgccccttgtttatttcatgtgctgaataaggggatggggtaggggttcccggctgtcttgccacttgtgttaccgtgctgtagactgctgagacagcgggagtgaagattcgatcctcaagaggttgttgcacaggtcctctaggaattaggtacgcctcttccaccaggtgtctgccttccaaaatcagcaaaggctggtgtaaagtctggtc

SEQ ID NO: 808 - DNA, 2593 bp, Homo sapiens
  SITE (16): n equals a,t,g, or c
aagatggcgctgcganttcggtgaggacagccgccccgcccccgacaaggagctcgctcgttcacctggtgtctgggaacttgaatgtgtgaagggcgcttattgttctgaacccttgattgctccctcctcgggctgcatttcaaaaatagtcatatttttaaaggagttggaggagagggagggggaggacatggcaccattccagaaaccagcattgttacaacaccatagccagtatatttagtttggcttttcctaacatagaaatcttcaaagctggggaagtggaaataaagttttaaaaatgagagagcagttttccaactatgtcaacaaagcctatcgtgttgatgtttttattgaccattttagcaacaggctaataaaatttcaaattgaaatttttattttcatggctttaatccatgatagtttaaatactgggggccattaagagtggatgtagctaagagcttagctaacattgccttttcactctatttttctcagatattgtaagcattctgtttttcaatattgtagttaattttttggctttcaacagcagccctagtaatggtggagttgttaattaatgtgtatattgtactgaatttctgtcagttaaggggttcactgctttggtggaaattggtggaaattgctagcaggttccacgatgtttatttttttctccatgttgtatatcattaccatttcacatacgcgtttctatttttcttcctctcctcctgatctccttaaaaatgaatctagagttggtggctttttccccctcctctttggccagttccacagttcagttcttcctgaaaacagggatgatgaacttgtaggatcaggacaaatgtgtgtttttcaaaaacttaaggctgggtgtgaaacacyttctgtggacaaggatttgtaaacttctctcctccctccagctgcggccccagcctaactgatagttacttgattcagtgtgctagacacttaaatagcatctatgtctctttcaagggaatttgtcaaataatgctgtttagctaattgttgcaagcaattgcatattaacagctgtgattttgttggacagcaagtattatggccaaagccagtttcttggcatttcaaaaataatgcaataaaaactagttgaggttagctgaggctggaaatgcctttttcatggtaaatgattcacttctatatttttctttctttttctttttttttctttggttttcatcctggattcatcccctgatcttaaatcaaaacgtcagatcaatgaactatgaactaaagtatttttcttaagcctattgagtgatttattttttaaaaaatgtttaaatgcatatgcttttctttcagcacaaacaacagcaaaaacttttgtaataactaacttacctttgcatgtatgaagaactgagtcatttatttccctaacttactcctctttcaagtaacaggtggcagatcataaaatgaattctttattgtatctacacactccacattctttactgtgtcctactactgtatcttggctccctgctgtattaaacaccatcttaagcacttgttcctgcaggactccttcttgacattttgtctcccccttcaaagtcactcaaagagtgggacttcatcaaaagaaatgaattagtctctatcacaccgaatactaagatttatttcctctgatggtacatagatttctctctcactaagagggtcactctcatagaggaatgtcttgtcagttttatacttgctgaggctagactgacaataaaaatgagctgggcagttaaattagcatttgttactatattggcctataaaggatcaggttgatgataatacctctaaaaatatgcaataataaaacaatagttatgaaagaaacttgaaaggtttgcaaggtttctcctatccctgttaaaattatcatttattatctctttgtcagtgttagtaaggtaacccatgacagaataatttgagtgatagttcatcatgcagaggatatgatcaagatattacctaatggttttatcctgaaaaaggtgtatacttttagggcactgttaacaatgcgagtgaaaccaagatggtgcaagttccctttgcagatggcgtgggcacacttgatttttattatgagtgaatgtaatctttctgtattttaccagagttacagcaattacctgaaaagtttcctaacattttaataatgttagggatttcgttttggttttagttgtcctcaagagacaacaggttcacagtaatttccatgatgttgggtgtggctaagctggggattggttctgttccccctgctcccgtgtagagaaaagctatatttatactgcattctttctcaactttcaggtaaaacaaactatgatttaaaaaaaraaaaaagaaaagacaggtacttttacttcaaagagtgctttgctacatttttatttaaaccaaaaatcaaataaaataaggaggggggctgggtatactttaaacaaaaccagtcctgaaatgctgttaytctcaaagtacattccaaaaa

SEQ ID NO: 809 - DNA, 728 bp, Homo sapiens
aattcggcacgagaccaattgtacttttattatatcaggctgattcactgtttctaatgcaatgaacttgacacagattttaaattttttctcaatctgtcccattgtgtagacaaattaattcaaagttctttttcttccttctctttttcatctaagcctgtgcttatgagtagaaaaagagaagaggctaccttgaaatgcctcgggcccaaactcagaaggctctgcactcaactgagcctcccttcctactaagaatggaatagtgttgcttataggggtgttggtccaagtatcagctgtggatgattaattcccagggctgctatcacctaaggtaacttcagtaatcttatgtgtttggaaaggaggatgaggattatttttcaaatacataattttgttttattttgaaacaatctcacacctacagaaaagttgcaattataatacaaagagcttccccctcgcctgaactgtttgatagtaagttgccaaactgatatacccacgatccccaaatgcttcagtgtatttcctcccagcaaggacattctcctgcataaccacaatacaaccataaaagtcaggagattaacaccagttcattttgaccatctgaaattcaggtgtcattcatgttttgccagttgttctttgtatgttcttcatagcaaaaaaaaaaaaaaaaaaactccaagggggggggccccggtccccaatcc

SEQ ID NO: 810 - DNA, 1697 bp, Homo sapiens
ggcacgagcgggtttagcggcagcctcttcgggattgtttccattgccaccctaaccgtgctggcctatgaacgttacattcgcgtggtccatgccagagtgatcaatttttcctgggcctggagggccattacctacatctggctctactcactggcgtgggcaggagcacctctcctgggatggaacaggtacatcctggacgtacacggactaggctgcactgtggactggaaatccaaggatgccaacgattcctcctttgtgcttttcttatttcttggctgcctggtggtgcccctgggtgtcatagcccattgctatggccatattctatattccattcgaatgcttcgttgtgtggaagatcttcagacaattcaagtgatcaagattttaaaatatgaaaagaaactggccaaaatgtgctttttaatgatattcaccttcctggtctgttggatgccttatatcgtgatctgcttcttggtggttaatggtcatggtcacctggtcactccaacaatatctattgtttcgtacctctttgctaaatcgaacactgtatacaatccagtgatttatgtcttcatgatcagaaagtttcgaagatcccttttgcagcttctgtgcctccgactgctgaggtgccagaggcctgctaaagacctaccagcagctggaagtgaaatgcagatcagacccattgtgatgtcacagaaagatggggacaggccaaagaaaaaagtgactttcaactcttcttccatcatttttatcatcaccagtgatgaatcactgtcagttgacgacagcgacaaaaccaatgggtccaaagttgatgtaatccaagttcgtcctttgtaggaatgaagaatggcaacgaaagatggggccttaaattggatgccacttttggactttcatcataagaagtgtctggaatacccgttctatgtaatatcaacagaaccttgtggtccagcaggaaatccgaattgcccatatgctcttgggcctcaggaagaggttgaacaaaaacaaattcttttaattcaacgggtgctttacataatgaaaaaaccacttgtggcacacgatgggcatctaacatcatcatcttctaatgtgttggagattttcatttcaaatatattttttaattctctattccaaacacgttaatgctttttctcgaaaataccttactgtaaaaataactgtcgcgtacacatgtgtgaagtagctagaacatactgaattttttttgtactgttggactctattcagtgtcatgtcctatatctgatcaagttatcaaggagataattctagaatgaaaaagaaaatcctcttgttggaaacaaaagacgttttatatgtgcagtatgacaaagaggagtttcagagacaactttgaatccttgtcagcctggagaccagcaccagaggaatctacaaggcaaactcccatatatttgcttcccccaaattgctgcccctacagactcaaagctctttttctttgttttgttgtttctctaaaaatttactgttctttgtcgatgctatataagcccagggagttctaagacgccagctctttgagatttgctcattcccctgtatttcccacatatatattacatatacccgtaataaatttatgtttgtttttcaaaaaaaaaaaaaaaaaa

SEQ ID NO: 811 - DNA, 2047 bp, Homo sapiens
ggcacgagatgaaatgggccacaactttggaatgtttcatgacgactattcttgcaagtgtccttctacaatatgtgtgatggacaaagcactgagcttctatatacccacagacttcagttcctgcagccgtctcagctatgacaagttttttgaagataaattatcaaattgcctctttaatgctccattgcctacagatatcatatccactccaatttgtgggaaccagttggtggaaatgggagaggactgtgattgtgggacatctgaggaatgtaccaatatttgctgtgatgctaagacatgtaaaatcaaagcaacttttcaatgtgcattaggagaatgttgtgaaaaatgccaatttaaaaaggctgggatggtgtgcagaccagcaaaagatgagtgcgacctgcctgaaatgtgtaatggtaaatctggtaattgtcctgatgatagattccaagtcaatggcttcccttgccatcacgggaagggccactgcttgatggggacatgccccacactgcaggagcagtgcacagagctgtggggaccaggaactgaggttgcagataagtcatgttacaacaggaatgaaggtgggtcaaagtacgggtactgtcgcagagtggatgacacactcattccctgcaaagcaaatgataccatgtgtgggaagttgttctgtcaaggtgggtcggataatttgccctggaaaggacggatagtgactttcctgacatgtaaaacatttgatcctgaagacacaagtcaagaaataggcatggtggccaatggaactaagtgtggcgataacaaggtttgcattaatgcagaatgtgtggatattgagaaagcctacaaatcaaccaattgctcatctaagtgcaaaggacatgctgtgtgtgaccatgagctccagtgtcaatgtgaggaaggatggatccctcccgactgcgatgactcctcagtggtcttccacttctccattgtggttggggtgctgttcccaatggcggtcatttttgtggtggttgctatggtaatccggcaccagagctccagagaaaagcagaagaaagatcagaggccactatctaccactggcaccaggccacacaaacagaagaggaaaccccagatggtaaaggctgttcaaccccaagagatgagtcagatgaagccccatgtgtatgatctgccagtagaaggcaatgagcccccagcctcttttcataaagacacaaacgcacttccccctactgttttcaaggataatccaatgtctacacctaaggactcaaatccaaaagcatgaagcaacagctaagcaagaactaatggctaaattatcaacttggaaaactggaaaatctggatggcagagaaatatactatctcaccagtatttgctctcgactcaagaaggttaacattttctgattcatgttagactttgaagagactaaagaaaattttcaagaggaacatatgcctgagaacctttgcatgaatttaaaatttcaattatccattcttataagaaggaagatgattgtaaagaaatatctccgaagttaaaatctgtaataggaattgattcattctctaatgaaaacaaaacataaaaacatcacactaatcttggaggaataagaaaaattgtacatccattaaatgtacaattgattgcaacatcttgattgttttaaccattaacttgtcaaattacaatcacagttaagaaaatgatgtaaaattctgttttgtggatctctttcctagattagcttctgaaatcattattagctatatcatttgaggttttctacaatttggtataactaagaatttaaaaatgttttatcatatatatttgtataattaattactggcatggttaaagtggttttcactttttaaatggagaaaatttcagttaaattaataggataaaccaggttgcgaactggtgacctgtaggccatgtttgcactgcaaatatatttggtctgaatgatattgaaaaaaaaaaaaaaaaaaa

SEQ ID NO: 812 - DNA, 1805 bp, Homo sapiens
agctgatgtgcactctaggttagtaaccatttttgtgaaaaatttagagaaattctttgagcagcttccactgaaacactaaaacccaatagggccaaaggccmaaacctgaggaaaccttatttattgcttaatccaacataggctatgaaagttttgagtttcctcttgtgtattagaatttcattcctatttgttgtagagagtatagtacggggaatcagtaaattaaatgaagtaaactaaagattacaccttttctgctggcactaagcgaaaagcaaaaccagtggctgtctattatctcctgtgttttagacagtcaagtgttgagcacttgctcttattcctttattctctaggggaagcaagcacttatttggctacttggtgtccatggggaaagaattcctaatgctccttatgtgttagaggactttgttgagaatgtgaagtcggaaacatttccagctgttaagatggagctgctcactgctttgctgcgccttttcctctcccgacctgctgagtgccaggacatgctaggacgtttgttgtattactgcataggtgggtttttcagaaggaaatagtatttgccatgacccatagtaaaaattcttaatagctttcattgtttggtgagtcacgtctgggacccgagaagaaaatgtgaatgcttcctaggttttcctctctccttcatttttttctcctattatggttggcacaagagtaggaggaaagtggttttgtttttaatgaagtcaatctgttgtcttacctcagaggaagaaaaagatatggctgtacgggaccgaggtctcttctattatcgcctcctcttagttggcattgatgaagttaagcggattctgtgtagccctaaatctgaccctactcttggacttttggaggatccggcagaaagacctgtgaatagctgggcctcagacttcaacacactggtgccagtgtatggcaaagcccactgggcaactatctctaaatgccagggggcagagcgttgtgacccagagcttcctaaaacttcatcctttgccgcatcaggtaaaaacagtccttaccttaaatcttgtcatgataaatctttaccttttcaatgattggtggaaagtagagtatcttagcactaaacctcagactgttgcctgaatttgaagcatttgtgagcaagaaaagaggttcgtcactggttatttcagccatttgtccaaaaataaaagtcacattgtgtacatttgggaatttggataaaaaacttagctcctacagattaagaacatctttcacacaagttttctgtctcttttaggacccttgattcctgaagagaacaaggagagggtacaagaactccctgattctggagccctcatgctagtccccaatcgccagcttactgctgattattttgagaaaacttggcttagccttaaagttgctcatcagcaagtgttgccttggcggggagaattccatcctgacaccctccagatggctcttcaagtagtgaacatccagaccatcgcaatgagtagggctgggtctcggccatggaaagcatacctcagtgctcaggatgatactggctgtctgttcttaacagaactgctattggagcctggaaactcagaaatgcagatctctgtgaaacaaaatgaagcaagaacggagacgctgaatagttttatttctgtattagaaactgtgattggaacaattgaagaaataaaatcataacagagtcttaaaaaaaaaaaaaaaaaaaaaaaaaactcgag

SEQ ID NO: 813 - DNA, 1804 bp, Homo sapiens
agctgatgtgcactctaggttagtaaccatttttgtgaaaaatttagagaaattctttgagcagcttccactgaaacactaaaacccaatagggccaaaggccmaaacctgaggaaaccttatttattgcttaatccaacataggctatgaaagttttgagtttcctcttgtgtattagaatttcattcctatttgttgtagagagtatagtacggggaatcagtaaattaaatgaagtaaactaaagattacaccttttctgctggcactaagcgaaaagcaaaaccagtggctgtctattatctcctgtgttttagacagtcaagtgttgagcacttgctcttattcctttattctctaggggaagcaagcacttatttggctacttggtgtccatggggaaagaattcctaatgctccttatgtgttagaggactttgttgagaatgtgaagtcggaaacatttccagctgttaagatggagctgctcactgctttgctgcgccttttcctctcccgacctgctgagtgccaggacatgctaggacgtttgttgtattactgcataggtgggtttttcagaaggaaatagtatttgccatgacccatagtaaaaattcttaatagctttcattgtttggtgagtcacgtctgggacccgagaagaaaatgtgaatgcttcctaggttttcctctctccttcatttttttctcctattatggttggcacaagagtaggaggaaagtggttttgtttttaatgaagtcaatctgttgtcttacctcagaggaagaaaaagatatggctgtacgggaccgaggtctcttctattatcgcctcctcttagttggcattgatgaagttaagcggattctgtgtagccctaaatctgaccctactcttggacttttggaggatccggcagaaagacctgtgaatagctgggcctcagacttcaacacactggtgccagtgtatggcaaagcccactgggcaactatctctaaatgccagggggcagagcgttgtgacccagagcttcctaaaacttcatcctttgccgcatcaggtaaaaacagtccttaccttaaatcttgtcatgataaatctttaccttttcaatgattggtggaaagtagagtatcttagcactaaacctcagactgttgcctgaatttgaagcatttgtgagcaagaaagaggttcgtcactggttatttcagccatttgtccaaaaataaaagtcacattgtgtacatttgggaatttggataaaaaacttagctcctacagattaagaacatctttcacacaagttttctgtctcttttaggacccttgattcctgaagagaacaaggagagggtacaagaactccctgattctggagccctcatgctagtccccaatcgccagcttactgctgattattttgagaaaacttggcttagccttaaagttgctcatcagcaagtgttgccttggcggggagaattccatcctgacaccctccagatggctcttcaagtagtgaacatccagaccatcgcaatgagtagggctgggtctcggccatggaaagcatacctcagtgctcaggatgatactggctgtctgttcttaacagaactgctattggagcctggaaactcagaaatgcagatctctgtgaaacaaaatgaagcaagaacggagacgctgaatagttttatttctgtattagaaactgtgattggaacaattgaagaaataaaatcataacagagtcttaaaaaaaaaaaaaaaaaaaaaaaaaactcgag

SEQ ID NO: 814 - DNA, 1238 bp, Homo sapiens
ggcacgaggaagatatatggatacagattatatatatatatacatattttccttaatagaggaatgcttcatattattcaaaaattatatcctgatcacctttttttgttttttattgtaaagtatctctgctttatccattgctgaattcgataggatgttgaaatgctggtcaccaaaaaaggaaactgagcaaattcatttcaacaacatcaaaacttcagcttctcatagtaaaaagctgaatgttactaatatttttcatatctaaaaaaaaattcttagcaatgaaattgctgttaaaacacaaatttcaatcaaatacttttgtgtatagaaaatatgtatagtaggtagatagaaaagtataaaatgtttgttgaagtatcttattttagaatgaatggagaaatgccaaagatgaatccttcactgcattatgaaaatatttcacatgttctcttggactttatataaatctgtaatagattttagaattgaaaaattctttgtgaaggtcttctaaaagtgttccaatttatctcaaaatctccatatataggatcagcttaaaacataaagaaaaccttgaatttctcaaatgtttgagatgttcaagacagtctcttaatccgttaatgcttttggaaacaattgacaaaatagggcaggcagctcatctcatgtcctgaagttggaatttaaataattcctatttgcaaattagaatgacagtgttggaatttggaggcagtagttgagcatattctctagtatatagctacacctttaataaaatgaaggaatgtcttcaatcatattttagtgggctatttataaatagtcttgaagtcaatttagtttatttatttaaaagataatgcatcctgaaagggatcatttatgaataacaatctgaagtcttttcataaaaaaaattaataaactttagttgtacatttagccagtgttatttgaagtatgtaacttttaaaatattaagtgtcttgtatgattagaatatgtgaatgagtaacttattttgtatcaggaatgttttggtactgtgttttcactcaaaccactgacttaacagatactgctgtgtataacatgtactaaatattacagttattgtgcataacagattgttcctcttatatttgtgtgtatacaggcaattcatgttttaatgtaaataaataccattttgcagttaaaaaaaaaaaaaaaaaaaa

SEQ ID NO: 815 - DNA, 2272 bp, Homo sapiens
ttgaggttctgggggtcctggagacgaacaatgaacagcaacgatcttgactgtgcaactcagacattcctgcagaaaagacatatgttgctttacaagaaggccaaagaactatggggccttcccagcatttgactgttcattgcatagaatgaattaaatatccagttacttgaatgggtataacgcatgaatatttgtgtgtgtgtgtgtgtgtctgagttgtgtgattttattaggggcatctgccaattctctcactgtggttccttctctgactttgcctgttcatcatctaaggaggctagatccttcgctgacttcaccattcctcaaacctgtaagtttctcacttcttccaaattggctttggctctttcttcaacctttccattcaagagcaatctttgctaaggagtaagtgaatgtgaagagtaccaactacaacaattctacagataattagtggattgtgttgtttgttgagagtgaaggtttcttggcatctggtgcctgattaaggcttgagtattaagttctcagcatatctctctattgtcttgacttgagtttgctgcattttctatgtgctgttcgtgacttggagaacttaaagtaatcgagctatgccaacttggggtggtaacagagtacttcccaccacagtgttgaaagggagagcaaagtcttatggataaaccctcctttcttttggggacacatggctctcacttgagaagctcacctgtgctgaatgtccacatggtcactaaacatgttatccttaaaccccccgtatgcctgagttgaaagggctctctcttattaggttttcatgggaacatgaggcagcaaatctattgctaagactttaccaggctcaaatcatctgaggctgatagatatttgacttggtaagacttaagtaaggctctggctcccaggggcataagcaacagtttcttgaatgtgccatctgagaagggagacccaggttatgagttttcctttgaacacattggtcttttctcaaagttcctgccttgctagactgttagctctttgaggacagggactatgtcttatcaatcactattattttcctgttacctagcatgggacaagtacacaacacatatttgttcaatgaatgaatgaatgtcttctaaaagactcctctgattgggagaccatatctataattgggatgtgaatcatttcttcagtggaataagagcacaacggcacaaccttcaaggacatattatctactatgaacattttactgtgagactctttattttgccttctacttgcgctgaaatgaaaccaaaacaggccgttgggttccacaagtcaatatatgttggatgaggattctgttgccttattgggaactgtgagacttatctggtatgagaagccagtaataaacctttgacctgttttaaccaatgaagattatgaatatgttaatatgatgtaaattgctatttaagtgtaaagcagttctaagttttagtatttgggggattggtttttattatttttttcctttttgaaaaatactgagggatcttttgataaagttagtaatgcatgttagattttagttttgcaagcatgttgtttttcaaatatatcaagtatagaaaaaggtaaaacagttaagaaggaaggcaattatattattcttctgtagttaagcaaacacttgttgagtgcctgctatgtgcacggcatgggcccatatgtgtgaggagcttgtctaattatgtaggaagcaatagatctcggtagttacgtattgggcagatacttactgtatgaatgaaagaacatcacagtaatcacaatatcagagctgaattatcctcagtgtagcttcttggaattcagtttctggaactagagatagagcatttattaaaaaaaactcctgttgagactgtgtcttatgaacctctgaaacgtacaagccttcacaagtttaactaaattgggattaatctttctgtagttatctgcataattcttgtttttctttccatctggctcctgggttgacaatttgtggaaacaactctattgctactatttaaaaaaaatcagaaatctttccctttaagctatgttaaattcaaactattcctgctattcctgttttgtcaaagaattatatttttcaaaatatgtttatttgtttgatgggtcccaggaaacactaataaaaaccacagagaccagcctggaaaaaaaaaaaaaaaaaaaa

SEQ ID NO: 816 - DNA, 2811 bp, Homo sapiens
gcgcggcggccccgtggagcagcgcagtatggcgggcggggcccgggaggtgctcacactgcagttgggacattttgccggtttcgtgggcgcgcactggtggaaccagcaggatgctgcgctgggccgagcgaccgattccaaggagcccccgggagagctgtgccccgacgtcctgtatcgtacgggccggacgctgcacggccaggagacctacacgccgcgactcatcctcatggatctgaagggtagtttgagctccctaaaagaggaaggtggactctacagggacaaacagttggatgctgcaatagcatggcaggggaagctcaccacacacaaagaggaactctatcccaagaacccttatctccaagactttctgagtgcagaggtgagggcctctgtcctgaactttttaacccggtgccacaacccgagggtytccataggggcagggartgctgagtagtgatggtgtctggagggtcaaatccattcccaatggcaaaggttcctcaccactccccaccgctacaactccaaaaccacttatccctacagaggccagcatcagggtctggtcagacttcctcagagtccatctccatccccggagcatctgtatgattcagaagtacaaccacgatgggtatggggaccccagaggctttgarggaagcargtcggctggargcttttggccaaggggaaagtgtcctaaaggaacccaagtaccaggaagagctggaggacaggctgcatttctacgtggaggaatgtgactacttgcagggcttccagatcctgtgtgacctgcacgatggcttctctggggtaggcgcgaaggcggcagagctgctacaagatgaatattcagggcggggaataataacctggggcctgctacctggtccctaccatcgtggggaggcccagagaaacatctatcgtctattaaacacagcttttggtctcgtgcacctgactgctcacagctctcttgtctgccccttgtccttgggtgggagcctgggcctgcgacccgagccacctgtcagcttcccttacctgcattatgatgccactctgcccttccactgcagtgccatcctggctacagccctggacacagtcactgttccttatcgcctgtkttcctctccagtttccatggttcatctggctgacatgctgagcttctgtgggaaaaaggtggtgacagcaggagcaatcatccctttccccttggctccaggccagtcccttcctgattccctgatgcagtttggaggagccaccccatggaccccactgtctgcatgtggggagccttctggaacacgttgctttgcccagtcagtggtgctgaggggtatagacagagcatgccacacaagccagctcaccccagggacacctccaccctctgcccttcatgcatgtaccactggggaagaaatcttggctcagtatttacaacagcagcagcctggagtcatgagttcttcccatctgctgctgactccctgcagggtggctcctccttacccccacctcttctcaagctgcagtccaccgggtatggttctggatggttcccccaagggagcaggtatgtaggaggtgaagaaaactgagatttcaagtatgggagagtttttactatctccattcctggattaaaagtgctgaaaaagtccacagttaaacattcctttattcaccctatggctcccaagaaaagcattcttcctctggagtactggtgtactaaggggacaatacaccaaatttgttgagtttacaatcaagtctactaaggttggacttccttatcagtttggcagagtcccagggcagaataatcatccatctacaggtctctgtttcctctccctccacagcagtggagagcatcccagtgtttggggcactgtgttcctcttcgtccctgcaccagaccctggaagccttggccagagacctcaccaaactcgacttgcggcgctgggccagcttcatggatgctggagtggagcacgatgacgtagcagagctgctgcaggagctacaaagcctggcccagtgctaccagggtggtgacagcctcgtggastaaagttcccagtgtgggagaaaggagctagtttgcaataaaaacagctggatgcaggagcccagtgtcttcatgcagaggagctcaatgtcgcgggactagctacaccaacatatgcactttttacatttagaaacactgtgattagaccacagaacaataaatatgtgccatcagaccaaaaaaaagtagagaaaggagctgaactccactctcgatgctacttacagaggacatctgtaaagtcttcataaaagaccttgaatgatgcctaggatggcagagcccctgggtcctactccatcctccagcctttgtccttgtcctggcctcctgctctccagatctgtaaactgggctcaaggactgtacaagcagagtacaactacccgcctccccggtgccagggcgcctgttgggtttggtcctgtgtagatgattcccagagtctcattcatccagctcctcttcagacagaaggtccccatggtcagacagctggtctgcattgctggtactggttgcatcatcctcatcctcagagctggcttcacaggcagtgtggaagagctgcatgagttctcgaaaatggtgggaaacctaagaaaggaggagggctgtattcactgatccttagtaacatgttaacatttatgaagcactataaaaaaaaaaaaaaaaaaaactcgagg

SEQ ID NO: 817 - DNA, 1758 bp, Homo sapiens
gcaagtacttatgtggattggaaaccatactgaatttctggatgagaagattcagccaatattagacaaagtaggctctttggtaaacgcaaggcttgaattttctcggggccttatgatgctggttcttgagaagttagccactgatattccttgtctgctatatgatgacaatctcttctgtcatttggtggatgaagtactcttgtttgaaagggagctacacagtgttcatggctatcctggcacttttgctagttgtatgcatattctatcagaggaaacctgttttcagagatggttgacggtggagagaaaatttgctcttcaaaaaatggactcaatgctttcctcagaagctgcctgggtatcgcaatataaggatatcactgacgtggatgaaatgaaagttccagattgtgcagaaacttttatgactctactcttggttataactgacaggtataaaaatcttcccacagcttcccgaaagcttcagttcctggagttacagaaggacttagtagatgattttaggatacgattaacacaagtgatgaaagaagagactagagcttcccttggctttcgatactgtgcaattcttaatgctgtgaactacatctcaacagtactagcagattgggctgacaatgttttctttctacaacttcaacaggctgcactggaggtgtttgcagagaataatactctgagtaaattgcagctaggacagctagcctctatggagagctctgtctttgatgacatgattaacctcttagaacgtttaaagcatgatatgttgacccgtcaagtagaccacgtttttagagaagttaaagatgctgcaaaattgtataaaaaagaaagatggttgtccttgccatctcagtcagagcaggcagtgatgtccctgtccagttcggcttgcccgttgctgctgacgttacgagaccatttacttcagttggagcagcagctttgtttctccttatttaaaattttctggcaaatgcttgtagagaagctggatgtatacatctaccaagaaataattcttgctaatcacttcaatgaaggaggagcagcccagctscagtttgatatgactcggaatcttttccctttgttttctcactattgcaagagaccagaaaattattttaaacatataaaagaagcctgtattgttttgaatttgaacgtcggttctgcactactgctgaaagatgtactgcagtcagcttcagggcagcttcctgccacagcagcattaaatgaagttggaatttacaaactggctcaacaagatgttgagattctacttaatttgaggacaaattggcctaatactggaaaataatgtctttcagaaaaaggtttctttggtttttgtttctaagaaagaggaagccaattggatttcaagttatatgatgaaattctgaattaatgaaactggaaaactttatagaattacttattatcttggatttatggtgttattaaaatgctgaccatatttccttcatcctcttgttcctaaggaaacaaaaacagaaaacgaaacaatgaaaactcaattctatttacaagtataaatgctgagtatgtctgttgaagacgagcagagatattaaattataaccaactttcaatttcctgtgctaattaagggaaattctgttgtggataatcaaacatagccaataaatttttttaaaactccaaaaaaaaaaaaaaaaaaaaaaaaaa

SEQ ID NO: 818 - DNA, 1918 bp, Homo sapiens
ggcacgagaaaaaaccaaataataatagttatccgtcttctacttcatggaagattgttttggtgccctgaccctctgaagtgcccagttcctgccatctgaaacctcggcctgatctgatctcatgttggaatctgcctgtctttcacacagggctggtcttggtcctttacatgccagttttgcttgtgaattcttgcttttttcctctcatcagccttaagtttaggcgtttgttgttctccagtgatgtagacagttcccttcacaagtcacagttcttcccataaatgaggcccgctgacctctgcgggactttaaaaatctattcagatatttccgagtaagtggcttgtttaaattcttcctgtgtctttctttattccttaattggttggtggaaagaagagatgcttgggaaccttgggttcttaggtttggaattcctttaaataaatatctaaaaagctaaattttaaaataccagctttacataaatgattgttgactctggtctgtttctgacacctttccagaaaaaagtcaaattgttcaggtacaccaaagaggaagaagagctgtggaggccaccctctacaaagctttatagaacttctggatctaactcacaaacaagcttccagaagagactagagaccttaggccaggagatgaaggagttcagtagcaaagtcacacctgtccaattccctgagctttgctcactcagctaatgggatggcaaaggtggtggtgctttcatcttcaggcagaagcctctgcccatccccctcaagggctgcaggcccagttctcatgctgcccttgggtgggcatctgttaacagaggagaacgtctgggtggcggcagcagctttgctctgagtgcctacaaagctaatgcttggtgctagaaacatcatcattattaaacttcagaaaagcagcagccatgttcagtcaggctcatgctgcctcactgcttaagtgcctgcaggagccgcctgccaagctccccttcctacacctggcacactggggtctgcacaaggctttgtcaaccaaagacagcttcccccttttgattgcctgtagactttggagccaagaaacactctgtgtgactctacacacacttccaggtggtttgtgcttcaaagtcattgatgcaacttgaaaggaaacagtttaatggtggaaatgaactaccatttataacttctgtttttttattgagaaaatgattcacgaattccaaatcagattgccaggaagaaataggacgtgacggtactgggccctgtgattctcccagcccttgcagtccgctaggtgagaggaaaagctctttacttccgcccctggcagggacttctgggttatgggagaaaccagagatgggaatgaggaaaatatgaactacagcagaagcccctgggcagctgtgatggagcccctgacattactcttcttgcatctgtcctgccttctttccctctgcgaggcagtggggtgggattcagagtgcttagtctgctcactgggagaagaagagttcctgcgcatgcaagccctgctgtgtggctgtcgtttacatttgggaggtgtcctgtatgtctgtacgttggggactgcctgtatttggaagatttaaaaacctagcatcctgttctcaccctctaagctgcattgagaaatgactcgtctctgtatttgtattaagccttaacacttttcttaagtgcattcggtgccaacattttttagagctgtaccaaaacaaaaagcctgtactcacatcacaatgtcattttgataggagcgttttgttatttttacaaggcagaatggggtgtaacagttgaattaaacttagcaatcacgtgctcagaaaaaaaaaaaaaaaaaaaaaaaaaaa

SEQ ID NO: 819 - DNA, 1817 bp, Homo sapiens
  SITE (23): n equals a,t,g, or c
  SITE (29): n equals a,t,g, or c
  SITE (60): n equals a,t,g, or c
agttggccacgggccccagggcncggggnccgcaaaccgcacttctgaggagaccagcantcatgcatcgtgcaccacagtgtcaggcctcccaacccacgctccttccctgtggccaacctgtgggcccggccttagggtggaggctttagtgtacagggacagccatggccacacagcacacatgtggagcagcggctctccctggaaagctccaggcctgaatggatggactcagcgactgcaccagtggcagctggtgactgtggacagtggtggaccctgcttctgtgcacctgctgcaggctctttttatgaaggctttcatgaattttagtatgtaatacgcactgacgacacatgatgcttggatgacagatgagaggggatggctgagtcctgtggctggcccgtgatgccaggtggcccatgtgcccagggcgcctgcagggctgctacagggacctggtcaggaggtgcacatggtgccctgccctcacccaccctctgtgtttccccttctttgaaaaggtagaagagaaaggaatattttaaacctttttggcttaaacagaattttagcatcagaactagctttctgggattggaggcaaaccatcaaggtggtccctctccagtctggacacgatgccagcaaggatgacgtcctgccacctcctggagttaccctggcctcctagggtccctttttctgatgaagtcttaatkccctaaaagcgcctctttggacactgaggccctctctgcctttcctggcctccggcaacagttttttacaaagattttttgcagtcgagtccatatgtccacccattgatttttaaagcttttgtgatattttagcattttgaaagactttcacagtgagagtagaaggtagatttggaatcatgcattttagcaagtggacttgttgaaacaggaagcaagggccttcagtgtagcccattcttgatccagagctgttgcctgtgacagcggtttctctggatgtcaaaggcagctgcctggctgcccagcttgcttctcgactggtggcccctatgggtgggtgtgcgatggaaatgtgttcctgccggagtctgaggcaccagggtgtgctcaaaggctggccctggtggtggactggcacctgtgcagagtgccgtgtgcttgtggtgcgccatctgaagcaagagtccagcgttctgccgtgtctgtcccccaccatgccccctacaggcggtactgayggcgcttttttttttttttctgtcaggaaaacaatgttggcctgtgggccgcccacaacatatccttccctcactacctgtgtgaccaaggttggcttctgttgacctttaaaaaagaaaccctcaactcaaattgctataattagacacttgcttctgtcttgcctcctgtctgcagctgtgaatagtcatttgactgtgactgttgcccttagccagccagatgcgcctgtgaaccaaagcttcgtgcacatgtgttcccctaaaggttggggagcctcgctgtgtcttgctgttcccaggcaccaccacagcaggtgctgccatactcttgtrgkmwctgtgcgccccccccccccccacccgtctgccaagcatgggtatgaatcgtgcacacagccatgcttcaaggccggggcaggggagcctgtgctgatgccatccagagcactgggctgtgcctggaaggcgagccttgattgtctgaacacataaagcaaactgtccagaaaaaaaaaaaaaaaaaaaaaaaaaaaaaaaaaaaaaaaactcgagcggcacgag

SEQ ID NO: 820 - DNA, 960 bp, Homo sapiens
ggcacgagggctcactcagcacgctcactaacccagcatgccacttccagcaggcatgcagtcctggcccagctctatgggaaacaaggaggaaagttagccactgaaggccaaaacaccatgtggggtggacagagggtttgctgggctggctttgctttccctgctggggccacagctgtgttaaccaatgaggtctgctgccaggtgtgaacaagcatgtctctacgaatgaacgaaacattggggatctctgccgaaaccaccaaagggcatgtctgatgggcacagggtctcccaaacccagtggcttctgtctgtcctcagcccttgtccctgtttatctgcagccaggagacttgcaagggattggtgattgacagagaggactcgtgcgctgttttgtgttagcagaggatttgtgttttcacaggtaggcttagcgtcctctcagagtgtagtgccaggtcctggtgccacgctagctgagcactcaggagagttcatcagctcagatcccacagggcctcctctttagcaggaattcacaacagtttggatgccctaaacttctgtagctcaggaacatcactggtgtatttgtttttttgtttgtttgcttgggttcttgcaagagcgcgtggggacagttcttccagcaggcactggttttgttgccccagggctgctttgctgtgatgatgattgcatttcaacacatgccagatgcagattttttcccccttactgtttcaatgacctttattttaaaaacacatagcttgaaaatttatttttatactgatattagtttggatgtgccacttttggcaccaaacgtgtatgtcatttttatttccattttataaacatgtaaataatagtgataacttgttaataatagtaaacctttatacctaaagtaaatgtcttccctcccacaaaaaaaaaaaaaaaaaa

SEQ ID NO: 821 - DNA, 636 bp, Homo sapiens
ggcacgagctagtctcgagtttttttttttttttttttttttttttttttttttttggtggcaatcacagtctttaatcattaattgtcatatttctgatttgttagcaagtgccagcttgtaggctggttgaagtacagaactcagaggaaaaaagaaattaaattttagctttctggagagcagcccctctctggcaccatcaaacacttctttgtttcccttcaacttggaactcttcaaacatcaggggttgtgagggtttggccattcttttatcttgggtccatgtgagtgacagaaatggtgcggcctgggaaagatctccctcctttacattttctcttctccctcctcctccttattctaaaactgtgcctccaacagaggggcaggggctcttgtagagagatccctggcccaggacaggagatgccaaatctaatttatctcactgagggcctttgagaaaaacgcttcagggccaggctcagtggctcatgcctatataatcccagtactttgagaagctgaggcggcagatcacttgaggccaggagttcgagaccagtctcgtcaacatggcgaaaccctgtctctacaaaaaaaaaaaaaaaaaaaaaaaaaaaaaaaaaa

SEQ ID NO: 822 - DNA, 1095 bp, Homo sapiens
  SITE (14): n equals a,t,g, or c
aattcggcacaggncatgatccacctgggcttcttgttacctttgtctctggtgtggaggaggagagatggcatccagtggacagaggagttcatttttcagggatgacttggttgrtctgccttcctgggccarcgtgcaggcaaccccactggggccagagcatcctctccgtgagtyctcatagcttggatctaaccctggtcatgttggatttccattcctcctggccttaagttttttttttcttgtttgtttggttttttttttttggagatgaagtgcagtgcagtggcacaatctcagctcactgcaacctccgcctccagggttcaagcgattctcctgcctmagcctcccgagtagctggtattacagacgcytgcmaccgcamccagctaattttkgttttkgtttgtttkgtttttttaaattttattagaagtgagtttcaccatgttggcctggctggtcttgaactcctgacctcaagtgatccacccacctcagcctcccaatgaaggtgttttttgaccattcttataccttctcttctgtctcagggcatccctcccccattcagagaccaccatcaagggtcaagggtataactagtcctgattcccaagcaaggggccaaaggtgtcagccaggtagatcatgcttttcctttttgcacctgttgggtcttcaaattctttctttggtaatccccattgttttctgtgagctggtccttttcctaccatgcccaggttgaactctccatctgcctgcccagcttgctggaaaggggcatgtgtttatggtccctgtcccatcaggagctccagcctgttggcaatttctctcctgatcctgcgttggcgtcctcagggctttgctccccggggtcccctgagtggccttctgtctctccgtggtttggatgcagtgcccacgagcttgcctgagtgcacaggtatccctctcgctctcatggagcagcttgcagggggctctgtgaactggtccctgtgcctacttttggggatcctgtgataagcagtgtcttcctgagtgcccccttctcactgtggacatcagaggccccag

SEQ ID NO: 823 - DNA, 513 bp, Homo sapiens
ttggatcctggtggctttaaggcatttccatgactggagctgctggtctggatgctacctggaaggggattcctcattggatatcatttatggcccagtaagtgtcccataattttctttaagctccatctatgtaaatatttttgaacaattttgcacaagtacagggccacatacctatttgttataaacccgacgttgataaaatgcactcttagtataattgggtcttgttttgatcctggcagtttcatattgggatttggcagtgagttcaacagaataagcattatcctcttgaggcccatctaggattgaactaaagggcttctacaatatccacatgatcatacaattagttctctctctccctctcttttttttgtgctgtgatagtgtaactgaatatgagctggttgccagggtattgtggtagaataataccctgcagtaaacagttaatcatgcagcagaactggcttgatttaaaaaaaaaaaaaaaaaaaactcgag

SEQ ID NO: 824 - DNA, 796 bp, Homo sapiens
  SITE (755): n equals a,t,g, or c
  SITE (762): n equals a,t,g, or c
  SITE (773): n equals a,t,g, or c
  SITE (789): n equals a,t,g, or c
  SITE (792): n equals a,t,g, or c
ggtctgatttttaatagggaaacaatgatacaaacctgtctttaacaacagacaactcttaatttcaccacttaacatcctattattttgcctattcccgtcaaatctttatgcatgtgtatttacactgttataaacatggtgtgcaaactatttgttgttgggctattttcacctcacatcaagacttgaaaatgcccccaagtttctgtatatttctgtttctgttctaatgacttacatggtcgcatgatagtcattgtgttacagtggcatatcttatttgatcattcctgtcttctggaaccattacgtttgttctaatttttagctcctgggtaacacctcaatctgtgtcttttatgaatatgtcactttgcttcttgttgccccaggaatacataggcaccagaggccaccttgatagtgttttgtgtggcctgttaggctgagtctagggatcactgggaattagctttgggaaggtgggcatcttaggcccaggctgatgaacttcaattttactgtattcttcatcagccattggaccttcctttgactacagccccaatgcttttctaatttggctgaaaatatttacatttataaaaaattawtggctgggcacaatggktcacacctataatcccaacgctttgggaggttgargtgggaggatcacttgagcccaggagtttaaaaccagcctaggcaacatagcaagaccccaaagctaccaaaaaaaaaaaaaaaanaaaaacncgagggggggnccgggacccaattcgnccnatag

SEQ ID NO: 825 - DNA, 2238 bp, Homo sapiens
gagagaaagcaccctctcaacagtgcaacatcttttaaagccacctataatgaaagaataggtacaatggggacagtgtggcaaaaataaaatcacttcccaaagattttcagtcagaaagctgaaaaatcatttttcctaccttttgtgtatttgcctgccagagaattctgttctgccttccacctcacagatgtgctccagatccacagaaaagttggtccataggagaaaaatggcaattgaattttatgtatttgctttctttgttttgatagaaataattccctcctccttgtctgcatatctcatgactcctgccttccaaatacataggttcacattctcaatatgaaatcttataaactacatattttacagcagccacctcagcagagaagtgctcctgacatctctttcaccatcgatgcgaataagcagcaaaggcagctgattgctgagctagaaaacaagaacaggtgagactttgtagacgtgctggcttgtttgatcaatgtgcgcattccttaataaactatggtcgtgctttaaagtttcagggctttacaccctgtatggctactcaagggaagacatctacactcagtgatgctcacttccaaaaagctggtctttagatctttagaacttcagaagctccatgagaaaacggcgtgtgcatgtatgtgtatagttctgagatatcaatgcaattaatgttgcccctctagacggtctcacttccctttttctgagatacttaattttgttcaagagcttctagtacaggaggaccctcctgggtactaggtagaaggtgtctctaccacccagaaacaggtaggaggctcaccagagaggccccctggaaggaccctgagctaaagaggcatctggagagacaccaccatcacccagttactctccaaacatccaaagatctccacctgcagcccatcagcaggttcttcctctattcaacacagattgactcacagtctacctccacagcatacaccccaaaaattgtccagctcatctccaccaccacccagttcagcctgtccttttcaaaaacatcaatcttatgttattccaggtttaaaccctctaatgtgttcccatcacacttcagttaaatcctactcctcttaccatcacctgcaaggtcttacctgacctgattccctcctgccattccagcctcagctcaccttgctcagcacactcccacctcccatgtgttcctcctgtctacagcctttgaattagtcattccctcagcctagaaagctcttcctccaggtctctgtgtggatggctccttctcatcactggggtctcagctcaaatatcatctcctaaaagaccacctgtctgatcctacctaattgcccctagcccagaaactagtctcaattacatacccctgtgtgtgtgttgggggcaggaggttgtcacttatcactatctgaaataatcatgtgtgtttgtttcttcgtttattgtctgtcttcctggactgaaacggaagttctttgagaacagaggccatggctaaatggtccctggagcccagaaccaggcctggcaattgtagaagctcagtagatatacattgagtgagaaaacgatgaatagctgagttaaatctcagacttggttctgaggaaacccaacatggaacaacttgtactaggtcggtgcaaatgtaattgtggtttttgccattatttttaattacttttaatggcaagagaacgcaattacgtttgcaccaacctaacacattctagtaatatatttcttgaaacagcaccaaaacatttccatgcttaaccccattcttaaacactgatgtgacatttgaggtcaaactggaggagtaaaggaggaggttgtgataattatttcatgcctgtaaaatttgacctgagaatttggggataaatgatcaaagtattctttaaagttctcaagaaagaataaaaaggagggtgcaaactctggttggcactttttcatatttttttctagtaaggaaagcttttggcttagttgtcttgagacctggctgccatcattaggaaaccacaaattaggatagaaatagcttcataaatgtgacaccatgactccatcgcctttgaaactactgctctactctgacccccagggagatgtgctcacatcagagctggaataaaaaaatttaaaaataaaaaaaaaaaaaaaaaa

SEQ ID NO: 826 - DNA, 499 bp, Homo sapiens
acgagggataatggtggtaaaggatgtaccagacagtcatctcctgaagagatgccgaacaacctgtccttgttttatgtattttctctttctttcctgtccagttttattcctctcatagtaactgctaaaaaaatgtcagttcctgtcactcttccaccccttttctccctctcccctgcattgtggtctgggccttggtccactagcaactccccttaggtgttgcttaatctgcctcatggccaaagccaatcccattcctgtcccccgctacccaagggactcccagtctgtatgcacaaggcgggatgtgaagtctggatgtgcaagaaacccagctgtaagaaagagcttccctcggcttggcatggtggctcatgcctgtaatcccagcactttgagaggtcaaagtgggagaatcacttgagcccaggagttcaggactagcctgggcaacatagcaagatctcacctctacaaaaaaaaaaaaaaaaaa

SEQ ID NO: 827 - DNA, 788 bp, Homo sapiens
  SITE (3): n equals a,t,g, or c
  SITE (4): n equals a,t,g, or c
  SITE (11): n equals a,t,g, or c
  SITE (20): n equals a,t,g, or c
  SITE (41): n equals a,t,g, or c
  SITE (61): n equals a,t,g, or c
ccnntgccgcnccgctctanaactagtggatcccccggctncaaggatttcggcacgaggnccacagggggaagcactgggactcatcaggaggctgagggagagagggaaaaagggagcggggagaggcaggaaactttattgtgattttcatgcatcagaatgtgctaggcagagtaagctggcttaggattggcttgtttgaattatttcaatgggctctggggcataggggctgccccttgttgtcaggtgccagggcctggggtgatgagggcaggggatagtgggctgragtgtgagartcccagagaggaggtggctggggtgtaggctctggactggttggtttgcatatggaaggcaagtcccaaaccatctctaggaactggctagaatcaatctaggaattgggaagggccgtctccctggggtcagccaggccccagatgtcagagcatcagaaatacagaaaataagtcactgggcgcggtggctcacacctgtaatcccaacactttgggaggctgaggcaggtggatcacgggaggtcaggactttgagaccagcctggccaacatgatgaaacctcgtttctactaaaaatataaaaattagccaggcatgatggtgtgtgcctgtaatcccagctactcgggaggctgaggcaggagaatcgcttgaacccggtaggtggaggttgcagtgagccaagatcgcttcactgcactccagcctgggtgacagagcgaaactccatctcaaaaaaaaaaaaaaaaaaaactcga

SEQ ID NO: 828 - DNA, 3011 bp, Homo sapiens
ggcacgagtacattgtctgaaaaaagcagtgagactcgacagtaataatcacttatactggaatgctcttggtgtggttgcatgttacagtggtattggaaattatgcccttgctcagcactgtttcatcaaatcaatccagtcagaacaaattaatgctgttgcatggaccaacttgggagtgttatacctcacaaatgaaaacattgagcaagctcatgaggctttcaaaatggctcaatcccttgatccatcttatttaatgtgctggattggacaagctcttattgctgaggcagttggaagttatgacaccatggatctcttcaggcacactacagaactaaatatgcatactgaaggagcattaggttatgcgtattgggtctgcacaacattgcaagataaaagcaacagagaaacagagctgtaccagtacaacatcctccagatgaatgctattccagcagcacaagttattttgaataaatatgtagaaagaattcagaattatgccccagctttcacaatgttgggttacttaaacgaacatctacaactgaaaaaggaagcagcaaatgcataccaaagggcaattttgttgttacagactgcagaagaccaagatacttacaatgttgcaataagaaattacggcagattgttatgttccactggtgaatatgataaagctatccaggcttttaagtcaacaccccttgaagtgttagaagacatcataggttttgcattggctttattcatgaaggggctttataaagagagcagcaaagcctatgagagagccttgtctattgttgaatcggagcaagacaaagcccatatcttgacagctctggcaataactgaatataaacaaggaaaaacggatgtagccaagacattgctatttaaatgctctatcttaaaggaaccaaccacagaaagccttcaagccctgtgtgctctagggttggcaatgcaggatgctacactgtcaaaagcagcacttaatgagttactgaagcacatcaaacacaaagacagtaattatcagaggtgccttcttacatcagcgatttatgcactccaaggccgcagtgtggctgtgcaaaaacaaatatctaaagctgttcacagcaaccctggtgaccctgctctttggtctctgttgtctcgagttgttgcacagtatgctcaacgaaatgcaaagggaggtgttgtagcaggaaatgtggctcatattctggactcaaatcatggaaagaaggcattactgtacactgcggtaaatcagttggctatgggaagcagttcagcagaagatgaaaaaaatactgcactaaagaccattcagaaggcagctctcctttctccaggtgatcctgctatctgggctgggctaatggcagcctgtcacgctgatgataaactggccttaatgaacaacactcagccaaagaggatagatttatacttggcactgttatctgctgtttctgcttcaattaaagacgaaaaattctttgaaaattacaaccagtcccttgaaaagtggtctctctcacaagctgtcactggtctaatagacacaggaagaatatctgaagctgaaactctctgcacaaagaatttaaaaagtaaccctgatcagccagccgttatcttacttttgagacaagttcagtgtaaaccactcccggagtcacaaaagccactcccagatgctgtacttgaagaactacaaaaaacagtcatgtccaactcaacctctgttccagcttggcagtggctggcacatgtgtatcaatcccaaggaatgatgagagctgcagagatgtgttacagaaagagtctacaattggcatcccaacggggcagttggagtgggaagctctcaagtctgttgagactagcactacttgcattaaaagtctgtatggctaacatttccaatgatcactggccatctttggttcaagaggctacaactgaggccttgaagctttgcttttgtccactggctgttcttttacaagctttgttacaattcaaacgcaaaatgggggcaagagagacacggcgtcttttggaaagagtggtatatcagcctgggtatcccaaatctattgcatcaactgcacgttggtacctactgagacacttatatgccaaagatgactatgagcttattgacgtgctggtaaacaatgccaaaactcatggagatacaagagcattggaactgaatcagagattgtcctcacaataacattggattattttatagtaaggaagcaaagaaaaagctgtaagaatgaagcaatgaatcaagacttctacccaaagcaacatttttttaaactatatttattccttttctaaaggaatctagagaagttgaagtttttaagttaggaatgcaattttctgttaactccaaacctgattttaatctgaaaaaaaaaaaatttaatttgggaaaaccagaatgaaaggaaaaccattattgccttggttgcttaacattatttgtaaaccattattttctgcatcttgcatggtgcacaatagaatatcttttactgtaatcccttacaataaagccttaatagccattttctatgtaatatgcaaaagtagattagcacaatgcacaattttcttttgttaaaaatcaaattcaaagatttaattcttgctatgaattctaaagttcggcaaaccaattcatcataaaatccaaataatcttgtaacctatttatctagtgattcatctccaattctgttgaaaaagcataatataaatgttgatgagactagactctaatggatatgtttatataattccaaacactcaggtgtgtgaatgcatttaaaaacattaatggaaaataatgctgataatatttaattgatcatgcaattccttcaattatgatggaaagacttgaactttctgaaataaaacaaaaatacaaaaaaaaaaaaaaaaaaaaaaaaaaaaaa

SEQ ID NO: 829 - DNA, 1445 bp, Homo sapiens
ggcacgagcggagacaaagatggctgcgagagtcggcgccttcctcaagaatgcctgggacaaggagccagtgctggtcgtgtccttcgtcgtcgggggcctcgctgtaattctgcccccattgagcccctacttcaagtactccgtcatgatcaacaaggccacgccctacaactacccagcggctggggaaaagggccacaggatagagctcagctcccactccactcaacgccaaagctgtcctggagccagacggtcctgagctctggcactggaggcctgggagccatgcccttgaccagccttgagacctcgagcaagacaaggcaaccattctgaggctgagtttcctgctctgcaaacgacatgacaccctcggctggatgttgcagcggtgacactgaagtagtgacaccagacgatttctgtacttaatgtgatgtcagcacttagtaaacattcatatcccctgcctccagagttccttaaggttcaattgatggaatgcctcctctgcaccagcacctgggcagtggagacggagtttcaccgtgttggccaggatggtcccgatctcctgacctcgtgatccgcctgcctcggcctcccaaagtgctgggattacaggcatgatgagccactgcgcccggcctatttcaacttaagtgaaaatctcacctgtggccagcggctaccgtgctggacagcacagtgctcatctgaggaggcaggacgcagcctctccgcctctttgcttattctgctgactgaccgcctctccagccagagcatgagctgaaaaacgacagcaacttgtttctacatcccgtgccttaaccagagcctggcacgtagtacatcctccatgaacatttgcagaatcaatgactttgcaaagtgagaagtgcttggtgaataccaaagagtcagacatgctggaggttagggcaggaggtgcgactttagttacgacctgcagagaaggcccgtgggcccagacttgaataaggaggagacaaaggggtgacaggaggaaagtatgccaggctgaggggacagccctgcacgcagcttctgaggactccagcctagacatggagggagagatgtgactcagccaaacagggacccaaagacagtggctgaagcaggtgctgctcctgggtcagaaagacctgagttccgggcggggcacagtggctcacgcctgtaatcccagcactttgggaggccggggcgggcagatcacttgaggtcaggagttcaagaccagcctggccggcatggtgaaaccccgtctctactaaagatacaaaaattggccggatgttgtggcacatgcctgtaatctcagctactcaagagtttgaggtcgggagttccagaccagcccggccaacatgatgagacctcatctctactaaaaaaaaaaaaaaaaaaaa

SEQ ID NO: 830 - DNA, 1003 bp, Homo sapiens
ggcacgagcaacagagcaagactccgtctcaaagaaaaaaagaaaagagaaaaaggggagtcctagtaagtgtgcccagtctgtcaccatcaagatagtgagggtcagcacagtggcctgcaagtcagagtaagcctgggatgagacttcagagctgctcttctcagactgcagctctgctcctcagtttctacctcccagagtcttgtgcatcccagagtccaggctgaaccgggccctctggcccagcgagtcctttgcattcctaggcaaggctggtgcgtactagtgaacatctccctgatgtggtattattagggattgaagagttcccctgagcatgtttggttttctagatacaagttgagtattccttatcctaaatgcttgggtttcagtgtttggggtttcatatgttttcagattttggaatatttgccttacacttactagttgagcaccccaaatccgaaatctgaaatccatgctccagtgaacatttcctttgagcagcatattggtgctcaaaaagtttcagattttggaacattttggatttcagattttcagatttgggatgcccaacctgtaatagaaatttactcatttactcatttacataccaaacatttaacattttttggcttccttaaattagtatgctgaacttaataaataattggaaaatgtggagaaatttatgtatgtatttatttttaattgggcagcccccaaaccaaaataggttcagagaggctccatcattttttaaataagctataattttcagcctggggaacatagggcgaccctgtctctacaaaaactttaaaacttagccaggcatggtggtatgcacctatagtcccagctactcaggaggctgagatgggaggattgcttgagcacaagagttccaggctgcagtgaactgtgattgtgccactgcactccagccaggggcacacagcaagaccctgtctcaaaaaaaaaaaaaaaaaaa

SEQ ID NO: 831 - DNA, 1901 bp, Homo sapiens
ggtgcccacctaagggctaaggcctcttgctggtgcacatgacatttgtcctgcagagctggggggaaggcgatgtggtgaccccacccccacccgttaatttaaagctgtttctaaacagttgagtttcttctaaagaggaagccttgcccagcaaggaccagtgagacagccggatcttggagacaattacaagacggggagtgagactcctgattgctctggaagcctgctgatttctacaactgatcatttgcagctgctggttttggtttccaccttaccctactggctgtaaaaacacaaatgtgtactttattgattttctttctaattctcccgcattggtggcttgggacttgggagagggagcaagccttcctccatggcccatcactcggctgtggagaacaaagaccaatgtgaagacactacagaggattctgtcttccaggcccagtccactggggagtgctggaatggggacctggggtggggaggcagagggtcactttacataggattaagttcgaggtggctaccgatttcagcacatgcactactgaaatttacacaaaaagaaagctgtgaaattgaagtcccaatttaagagtcctgaggcagaacctggtggctggaggcattcccagaggtggggaagagagcctgcccggccggagaacatctgccttgctgcacctgaggcccagcagagccgttcctgggactgtcagataatcggtgcagcggtggaaggagcctgcggctgctggcacagacttcacacagcacctcctctctgctgggtttccacacagcctgtcttcagatcctgctgccgcgtgcgaccagaggtgggaggcccctggtggcatggaagagggagggtcagtgccaagtctcaggaggagggcgcatgtgtgtatcaccctcagctggcggaacctggctgcgaactgtgcagttacgttgcatccacaggattccagttgygtgtctgtttccttctctttctccgtatttatttttttattcttcggaggaggtggacatttcggaagtggtggggactaagggaagaactctctagttccctcagtgtgaagcctgtcgtgttctctccccttgcactggtcatcagtattgtgtaaaggaacaactgatatacttgagtgtgcaagcaaagaacccatttgccatgctgctatgaagactacttttagatcaacaataaaaaaaaacctacaaaaaaacctttattctttaattgttgcttttacggtgatattgtgcatgcaaaccaggagcattttgtgtcttaagaaaaataatcttagaacagatggctgtgaaaattacacccatgcacagaacaagccacaggaataatagttcaggatttggtttttctctttttcttgtaaacctggagggttgatatattctttccatgcagttattagaacttagttttgttccaacagttaaacttgcaatgaaaagaaaatgtgccatttttttcactcagaattattcatagctgtatatttgaaactgctaattacacacgtgtgatgtatgttggttttttagtgcaatttcttctgtagctattctttgaccaaactgtgggtattgttaatattaatttatatttgtctcattttgtatgtatgtgtagtgtgtttgtgagtatgtgtggtttataatctgacaaagtcatgaagctcagtttggctgtaatttaattccccttcccttatttttatttatttttgtactgtgctgattcaataaaatgcactgaccatccaaaaaaaaaacacaacaaaaacaaaagcagaaatactatatgtctacattttaaaatcagaattagtatatatacttacacacatact

SEQ ID NO: 832 - DNA, 1901 bp, Homo sapiens; identical to SEQ ID NO: 831

SEQ ID NO: 833 - DNA, 1901 bp, Homo sapiens; identical to SEQ ID NO: 831

SEQ ID NO: 834 - DNA, 1177 bp, Homo sapiens
ggtcgaatcatatgatctcctaaaagctgttcacattgttcagttcatttttatattaaaacttgggactgcattttttatggttttgtttcaaaagccattttcttctgggaaaactattaccaaacaccagtggatcaaaatatttaaacatgcagttgctgggtgtattatttcactcttgtggttttttggcctcactctttgtggaccactaaggtaaataaaaatgcatattttgaatgtgtgtttgtatttcttcattttgaatattatttttgttccactgtgttttacgtcaaatatttatctgtacaaatgtgtctagcacttttatagcatcagagagaattcaacagatagaacaaacctgtttagtttctggactagttctttagtgaataccattaatatatttattcatgatttgtcatagatattttactagttagaattccaagtttcagaaaatttttagcataaacggctttttaatcatttattcatgatccctgttaacagcttagaagctataataaaaggtctgaagtggtaaataaaattagccaataagaaggagaacaaaaatctctaaaagcactcattttttgcacaattttgcaaatactctcataaataaatgtctcagaagtagtatatcaattatcagattaaatgcgtggtggataaagtaaactactcccatttcatatttccctagatctatatagattagtctttttctgcaagtggactggtttaaggaggaaatgcttagggaccattgataggaattgtatcatgcagctgtgtatgagcattcttttaacatttccccatctgtaaaggattttacttagtgaataagtgtaagaaaaaatgccttgccgtgagaatgagaggtaaggagtgaaatgaagaatgttcttggccagcactgtggctcacgcctgtaatgctagcactttgggaggccaaggggtggatcatttgaagttacgagttggagaccaccctagccaacatagcaaaaccccgcctttattaaaaaatatacaaaaattagccagaaatcacttgaactcaggaggcgaaggttgcagtgagccgagatcacgccactgcactgcaggctgggcaacagagcgagatccgtctcaaaaaaaaaaaaaaaaaa

SEQ ID NO: 835 - DNA, 1731 bp, Homo sapiens
  SITE (1657): n equals a,t,g, or c
ggacactgtaaattctgcaatctctcagcacttgagtgcaccaaacgagtgaatgctgaactcacttgcatcccttcatgtttctgtttgtggattataaggatgatgaaatgtgaaagtctcccaacactctgagggtggtgaacgattgccacccgtttgattttaatgtgctgctgcatgagactgcattgttgctaatggccagtgtacccagatgtgaagtgtggtaggctggttcatatgtggaggtgggtgtgtgaagctagacacgaaggtccctaaggttctgaagagacttgaactgtggaaatgctcttagcaggcatcccgaacccctgcttcggtgctgttttgaggagtaggatcttggagttcagaccaactatgactatcatttccttcactatctagaaaaacgctattctactttggaagagaatagtagttattttcaagtctcctgacagtcactgggagtacaaggtttgctaatgtgctctctggacgttattaatggccagtattagttgctgctgtattactgactcgcttagctgtagaaagggtaatactctcctgattttgtatgattggactcttaagtagctgctgttagtcagaattaaaacccatctcagactaagaatataatgaataagattaataggccaaaatatgtatctaatcacattgataaaaattaatataactgacacaataaaacacatttcccccatctgtacaataaatacagcttcaaattcagtggagtctgtagggcagataactttaatcatcactactgtagtcagtataagaaatgctgaaaaaaatccaggagggcttgtctctttgtgggtggtcactgtgatgttgggccagctcctgttcaggtccagagctgctaacgtgggttctactcagtcccagtgacttggccagaatagagctttgccaggtaactgccctgtgctaggtgaaaggggaaaagcagtagctggatatatttcaaatgaggttttgaacaagttcagaaagtggaacttgattgaaaagtgaacaagtgtagtagtgtgtgagaaaattcagatggtgtcggatgcagaagttaatattccacttaatgttatctgagcattaaaaatcatcagcatttaactgagaccccactatagagtttccttatcaagactttttggttttaaagttgtttttaatgcattgcaagttacaatagctattttgcttttagatttttcccagcactttgtatttattagctttcattaacttgcctccagtatacattccacttcgtgcttttcttaggtcatttctacatcccttattccttgttttcctgcagtgtaatggccctgaatgtcctctgagccttcagctccattatggacccaaactagactatacttggataagttaagctcttcttcgtgtactggtctataattagaaaaactgttttaaattagatgttcccattatttatttaaacagctttttgctgagaaagcttagtggattaatgaggcagagggtgttttgaaatccaataaatagttcccacaggctgggtgtggtggcttatgcctgtaaatcccagcactttccggaggccgaggtgggtggatcatgnaggtcaataaaattggaggaccatcctggccaacatggtgaaacccatctctactaaaaacacaaaaatttagc

SEQ ID NO: 836 - DNA, 1098 bp, Homo sapiens
atacactgagcaactgcacaatgaggaggagaatgaggatgctcgctctatggcagcagctgctgcatccctcgggggaccccgagcaaacacagtcctggagcgtgtggaaggtgcccagcagcggtggaagctgcaggtgcaggagcagcggaacacagtcttcgatcggcacaagatgctcagctagatgggctggtgtggttgggtcaaggccccaacaccatggctgccagcttccaggctggacaaagcagggggctacttctcccttccctcggttccagtcttccctttaaaagcctgtggcatttttcctccttctccctaactttagaaatgttgtacttggctattttgattagggaagagggatgtggtctctgatctctgttgtcttcttgggtctttggggttgaagggagggggaaggcaggccagaagggaatggagacattcgaggcggcctcaggagtggatgcgatctgtctctcctggctccactcttgccgccttccagctctgagtcttgggaatgttgttacccttggaagataaagctgggtcttcaggaactcagtgtctgggaggaaagcatggcccagcattcagcatgtgttcctttctgcagtggttcttatcaccacctcccttccagccccagcgcctcagccccagccccagctccagccctgaggacagctctgatgggagagctgggccccctgagcccactgggtcttcagggtgcactggaagctggtgttcgctgtcccctgtgcacttctcgcactggggcatggagtgcccatgcatactctgctgccggtcccctcacctgcacttgaggggtctgggcagtccctcctctccccagtgtccacagtcactgagccagacggtcggttggaacatgagactcgaggctgagcgtggatctgaacaccacagcccctgtacttgggttgcctcttgtccctgaacttcgttgtaccagtgcatggagagaaaattttgtcctcttgtcttagagttgtgtgtaaatcaaggaagccatcattaaattgttttatttctctcaaaaaaaaaaaaaaaaaa

SEQ ID NO: 837 - DNA, 1122 bp, Homo sapiens
ggcacgaggagagcttcacctgtccccctgagccccctggccccttcctcagcagccctttgcggactctcaaccagctgccaagccagcccttcactggccccttcatggctgtgctctttgccaaactcgagaacatgctgcagaactccgtctatgtcaacttcctgctgacggggctggtggcccagctggcctgtcacccccagcccctgctccgctctttcctgctcaacaccaacatggtcttccagcccagtgtcaagtccctgctgcaggtgctgggctctgtgaagaataagattgagaactttgcggcttcccaggaggacttcccagcactgctgtccaaagccaagaagtacctcattgcccgtggcaagttggactgggctgagggccctgcagcaggacctgccccacgccgttctgatcccctagaaccctaaaggagaagtccaagaacctagggggttgggggaatctcccctctcacgtccaatggaggttccctgatcccagcaccttcatgatacccctgtttattcccagtagaagaccggaagccatccttgggggagttactcctgcggcatgcacacagtccaaccagggcccggcaggcggcacaattggtccttcagcctgggcgagacggagcaggacttggcctaagtgggggctcccctggggcttcaactccagttctactcacccggggcggggcccctgaacgccaaggtgaggctcttcgagtcaagaatgctgtctactgtgcagtcattttccctgaatttctcaaggagttggctgccatctcccaggctcatgccgtcacctcgcctttcttgttggagacttcaaggaaggatctggccctctcatctcaggctgtgggcccctcaatccttaactttcttccatggacaatcagggccatgggtggcccgggctggggctagggcacaggctcctttttatgtttggaggcagtggcaaaaggactttttaatttatttcagatgaatgttttatggagaacttgttgcaatatgtataaaagggaaatctctaaaaaaaaaaaaaaaaaaaaaaaaaaaaaaaaaaaaaaaaaaaaaaaaa

SEQ ID NO: 838 - DNA, 829 bp, Homo sapiens
  SITE (8): n equals a,t,g, or c
  SITE (20): n equals a,t,g, or c
  SITE (45): n equals a,t,g, or c
  SITE (826): n equals a,t,g, or c
cccgagcncaaccgattcantgagccgaggaaccggaagagcccnaatrcgcaaaccgctttccccgcscgttggccsgattcattaatgcagctggcacgacaggtttcccgactggaaagcgggcagtgagcgaacgcaattaatgkgagtagctcactcattaggcaccccaggctttacactttatgcttccggctcgtatgttgtgtggaattgtgagcggataacaatttcacacaggaaacagctatgaccatgattacgccaagcgcgcaattaaccctcactaaagggaacaaaagctggagctccaccgcggtggcggccgctctagaactagtggatcccccgggctgcaggatatctactttggagaaggagataatataattgaaaggagctagaggaatgtataatgtttaccattaacactatcctttatttacagccccatgggggaaattccctttatacccaggagccatgtcttaccaggtaagaagccagattgaactggagggacattcttccagtcctcttagtaacataaactcctgggatgtggtccaagtttgacctgtcattaaaaattccatactccagtgggttagaagctagattccaatgaaggcggttggttttgtttttctatttacaaccattcttagtcacattcttctctgggcttttgttgtatactttaaaaaaactgtttgatgtgcaatttgttacctgtaactttctaaatgaataaaagaagattgaaaaaataaaaaaaaaaaaaaaaaaaaaaaaactcggggggggcccggtacccaattcnccc

SEQ ID NO: 839 - DNA, 1227 bp, Homo sapiens
ccgggcgggggccgcggaagctgcgatgcggacagggcagcggcggtgacccgagctgccgcccgacatgaactcgctggagcaggcggaagatctcaaggcttttgagaggagacttactgaatatattcattgtttgcaacctgctactggacgctggagaatgcttcttatagtggtatctgtctgtacagctactggtgcctggaactggttaatagaccctgagacacaaaaggtgtccttcttcacatcattatggaatcacccatttttcaccattagctgtatcactctaataggcttgttctttgctggaatacacaagagagtagttgcaccatcaattatagctgctcgatgtcgaacggtattagcagaatacaatatgtcttgtgatgatacaggaaaactaattttgaaacctaggcctcatgttcaatgacaatcttcactcattgttatgggacttaaaatagcctttcttcgaataagtgatacagcaaaaagccataaaggattccttttgcggttggatatgtaaaggtcatagcagcaactgacaagaagtgtgcaatatttacctggattatcttgatgatggtgactcattatcagtgctttggtacttttgattacctgtgtttcagtattagtgtcactttagtacttcagatcctgcaaatatttttgcagatgaagtatgtatgtatgttactaagttaaacttagaaacagaacctcattcagtttttataatgtatttttgcaaactactgtaaatagcaaatcaatgccaatgttaaacaaagaggaaaacgttgtgtggactttgttctcttgcaccggtatttcaggaacatctgcttgccatccccacagctctttaaaactggcttattatgtgtgcctttcattcttacatttctaatcatactgcaggaaaaacattggattcagcttagactgaggaaaactctccattatgttgtaagaaattatagatgttttgagagacactttttgttaaaccagatattgaactccagcaactattgtggttatatttttagttcattgttctcatttaatgctaaatatcctttatattgctttaataattttcttttttttttttttttttttagacggagtctcgctctgttgccaggctggagggcagtggcaacagagcgagactccgtctaaaaaaaaaaaaaaaaaaaa

SEQ ID NO: 840 - DNA, 1513 bp, Homo sapiens
ggcacgagcttcgacattaccaagttccgttccaacaagcaataccgcatctgtctcaaaaccctcaaggaagagtttcagcaggacatgtcccgccgctacggctttgctgccctgaaatatctcacagccgagaacaacagctagcaccaagaagcccaccactagggggagacatgctgtaggggaagtgccactcgctgtttggggcccggccttcaaattcaaaattgagccatgctttttcggtttgtttttatttatctctttggcccagccaagctgccctcactacagagaccttggacaaggatccagccagtccctctctgccccacaaccctgcattcccagaggttagctatgcagcccacctagatgagtctcttcaagaatgggaaatcaaggggtgacagggagtaaaagggttatcatcttactgcaaagccacaagatcagggcagggctttaggatgttctggatgctttttaataattatgcttcccatcataactggggagaaagggaagtcagggttctaggggttattcgtcccaggaaatagaagtgaaattgtctttattaagtgaaaactttcccctttgccctgcaatgtagctgggcattcaaacggagggcaaaccgatgatctaaaccaaccacttggaaaaacccaatggggacattgtaaccagagggtcctggaggtggggttgatgggtttccttatccccaaagtcactcctgttttgttttgtttttctttgggggttttgtttatttttggggctggcaatccaaaataaaaatctgatcctttgaggctctaaaggaaaatcagctgcctctaccaaccaccctctatcaacagtggcccaggaaggaggtcaagcatcttcggccgatatttaaacatgggcagcttccttcaggatgatcaccgaggctcccgtgactttgaactccctactctccagaatccaggggctatagcgatggggactgcggaattacgagggctggctgttttacaccggtcacattttctattggcagtgactgattcatgggaaagggctttgaaggaaactacttcaggtgcacacacaaggtacgaacctctcaggcctttcgaagaactttcataattcatgaaagcccagttctgaagatttcacgtatccatctggagacctacaggaagaaagtgattgggttcctctggttctttgcctgcttcactgtggatgggaagaggtgacaacctcagtctccctttgggacctgtccaagggtaggcaaccaccttcaccttcacacagattgaggagacactggactttttacccattttctttaatcttcaatattaatattgtgtttacattgatgagaacaagagttaatgccctaccctctgctgggctgtttgtattgagttgcaatgtgaccagcgaaagctgcatttaataaatgaaagtacagactgttaaaaaaaaaaaaaaaaaaaaa

SEQ ID NO: 841 - DNA, 650 bp, Homo sapiens
cggcacgagtccaccagggctggaaaggttacttcaaaatgaatgtggccaggcagaataatgacagtgactgtggtgcttttgtgttgcagtactgcaagcatctggccctgtctcagccattcagcttcacccagcaggacatgcccaaacttcgtcggcagatctacaaggagctgtgtcactgcaaactcactgtgtgagcctcgtaccccagaccccaagcccataaatgggaagggagacatgggagtcccttcccaagaaactccagttcctttcctctcttgcctcttcccactcacttccctttggtttttcatatttaaatgtttcaatttctgtatttttttttctttgagagaatacttgttgatttctgatgtgcagggggtggctacagaaaagcccctttcttcctctgtttgcaggggagtgtggccctgtggcctgggtggagcagtcatcctcccccttccccgtgcagggagcaggaaatcagtgctgggggtggtgggcggacaataggatcactgcctgccagatcttcaaactttatatatatatatatatatatatatatataaatgccacggtcctgctctggtcaataaaggatcctttgttgataaaaaaaaaaaaaaaaaaaa

SEQ ID NO: 842 - DNA, 3652 bp, Homo sapiens
  SITE (306): n equals a,t,g, or c
  SITE (1412): n equals a,t,g, or c
  SITE (1519): n equals a,t,g, or c
  SITE (2101): n equals a,t,g, or c
  SITE (2102): n equals a,t,g, or c
acgagctgatgtctcccggaggaatctgcaattgcataatttagttggttgcttgtctactgtctctctctttggcaagaatgaaagctctatgagcaaacagaccttgtctgccttatgatccattttattactagagcctaggactgttaaattcattaataaagtctttccatcactttttgttctttatattcctttactcaattgatattcagcatgtgcagaacagttcttttccaaggctgcataaaagttttggaatgaggcacataaataatatccttctaccaataaatgctatcngttataaaatagtttttattttataatcactgaatatgtcaaaactttacagttcaggccttttgaatcaaatgcaaaatcaaatatgaaaaggttaatgatcttgtccactaaaattgtagtttgccatacaggaaaatagactcttaaaaatgataaaaaaaaaaaaatcattcttaaggaaacatattaataagacatttaaaaaggctaagatctttaatgtgaaaaataataagataaagatgacaaccactgaagagaagaaaaaacgttttatgttttttctaaatgtgtgtaaaaacaaaatcttgtacctaccaaaatgacacttttttcaaagaaaggtatcaaatgtgtatactttaacacacagcccttccttgtgtaaatatataggaaatccttaaaggagcataaaacaatttacttagaaattctatacttaaacttattcaaaggaaataattaaaggtgtgtaaataagatatgcatagcattgctctaaatgtcaaatagtagggaactaggtaaataagatatatctatttagggaattagtcaagtaagatatacctatttagctaattccatgtagccatcaaaaggataccatagaacagaacttattgatgtgaaaagatgattaaaatgtacttgttactaaaaacagcaggctgcaatactgtattaaataatgagcccatgctgtatatctagacaaacatatatcataatgataataataaatgtatgagacttatatttttgcttctctgtattttctaatttgtctgtgataaacaaatattattaatgtaatgaagaataagctaaaatatacaaaaacaataacaactataaaaagaaccccttcaatcaaaaagagatcatcagggatttaattcaactatggattggcactattaggaggccaaatatgattcgttgaactgaactgtagtaaagacaagatattaggaaaatgtttaaattatgtgagaactattctcaagcactttaaagatctatttgcaagataacaatgtgctaactttaagtaatgtctatgtattcttgagaccagctttgacaatgacagctgncattccatttgacttggacttacattatgttttgtctatattttcaaaaacagaacccagggactgattcttacaagcattttcttaaagattcactgggtggctgnaaatctgatcaagctgttctttgggagatcattattcaacacttatcacatactttatttctacagctatgactgtcactccccaagcttcacttcataatgaaaataaagaatacagcccttttggaaaagttggatggtaataccaagtgcgtaagtttttagtacatgccatatcacaaccttctacgtggctgacttttgactttttcatttcttttataactgacagaagacacaaaggcaaaaatgtcaacttcacaaaaaatcttagtgctttttggaaagaatgttatagatcatccagtctaaccccctgatgttataaatatggaaatttaggcctagaaaataggtaagtgatgaatcaaactagaagcaggtgtcctgcctctaagcccaatccagttgccatcatcatttactatttacatggaacatcaggttctactttagaagttaactatcaacctacagggttaaggaaaatagcaatgtgtatatacagaccttgcatctggtagctgtatggtgcctgtccaggttgaggggtactgaagcttgtgccatagctgagaaatnntgtctgtccaggtgactgagactgtgacaatccaccttcagtcttgatgcctgcccacaatgcacctaaatcagttagtgatagcttatctatctgtccattttcaaaagctggtaaatatacaaaaacatacacttccacaaccgtttaactacaaatgcttccccaatcttatctcaaaaataaagggtatacatgcattcagtgaaataccataaagtacaacttcagttttttaaatccaggattacagatttgaatgtctattcacattattctctcttgttttattgcacttcaagacatatcccttctataaaatgtaactccagtgatatattttcatacttaattttgttgttttaattatgtaagagttgaagatcatctccttcacagtaaagaaatagccataattaaattttagctaaatgttcccaaagttgctatattgactagtgttaaaaataaaatccttttttatattaaaaatattaattagatcctataccatcacagtatttttccctcctttactctttctactacaaagctgatttcagtaccaactcattttgaagtccaaagaagcaatactgggcacagaactaaacaacatggtggaaaggcttttcctgaatatctaggtcctatcagaaaataagcacaaaggaagcagaacactaatgagctgaatcttataaaacagcagtgatttataaacaagtgaggttgaccagcagtttccttttgtccctgttagtgtgaaatatttgactataattgttttcgatgtagtctaaagtacctttgtttttatcatatgataatataaaaatgatgtatctgtggcccccaaatacttccccaaacaccaggctaacatcgtaattttgggacttggatttggcagcactgaggtatggggctcagctctgtctttaattaattacaattaaagacagtcatacatgttaacaactctccttcattctcacagagggagggaagaaaaatttctgccgagggaattcacattttttaataattttgcttcgtacttaagataaatgatatctttaggatctagaatacacagtagtcttactgtttatttccattttaggggaatctcatcagcagagtacagctaggtaattgttttaaggcagtgggagaatctgactcttggctgagagtgcctactttaattcctgcagtatctctaaataacttcataatgaccttaacatttaagtcttaacacaaccttaacattttaaaaatgtgattttccctgtaaaggtgatcccaaaccaatgaataacccacacatagaaatggtccctggaaatacacctgccccagacaggtggcatgatggctttagaaaatccctttctttccatgttgtcacccctagggattttccacctcttgctgcatttgagactatactgatctgcttccagccttcacctataccaataaaataccaataattcatgtattttttttttttgagacggagtctcgctctgtcacccagg

SEQ ID NO: 843 - DNA, 814 bp, Homo sapiens
ccacgcgtccgccgggcgggcgcaggcgcgggctccggcgccgccgctgcgtcctccccggccgcgggcgagccgctgcagagggagcgtcgcgccggggcggagtgcgggcttgcgcggcaagtgcgcgccgaggtcacgaaatggattggagtgaaccggagaccccgaaaacggaagcgcagggagaaggaagaggtgtttgcagaggttcgccatcggtggtgtgaactcattgttaagcacaagttcacgaaagcctacaaaagtgtggagaggttccttcaggaggatcaggaaagaccacagcaagattctttcattcgtctcctcctagcctgggggaccaggctcgaactgaccctggacatcaaaggagggattatgtggctgctaaagccatcggcccacagccctgttcacgtcttggtgcttctctttcccagaggctggtcccagccaggcacacacaaaaggcagattctcgtaaacgcagcctccctccctggaggctgcctcctgccctggatctggagtggagctgctctgagattttgagttcttctgcagagatgattaaatatatccaagagacattggaaaacctgctgaacattttacattggtctgctcagcacatggctggatgcggatatttctataattccagaaagtcacacagctcctctgtatgagaccagtgggcgccatttaaaagaacaggatgagaatctaagatatattattaataaatgtaatggattttttttttgtaaaaaaaaaaaaaaaaaaaaaaaaaaaaaaaaaaaaaaaa

SEQ ID NO: 844 - DNA, 1059 bp, Homo sapiens
ggcacgagatcaagtgaggggggcctcccgggaggcccaggggagcccacaagccaggcgtggtgccaataccctcatcccttccaccagccagcttccagaagaggccttgctgggaaacaggctggacagccacgactgggttttcctccctggcctgctctggggagtggttctttactgtggcctcacagcctctggcctcctcactgggcaccagtcaggatatctgcctacggctgtgtctctgtgccaggcacaggctgggagctggggcactgaggctccggaggctgtggcgaggctctgagacacgggggccagcaggcggtagcctctgtgtcagcagacactgcagcccttcccaccccggtggcagcctggagtgggtgctacagcttccctcatgggtgaggagcgaggcagggaggtgagggaggctcggaatctctgctgagctcacactccttgccctgtaatgtgcaagaacctgccccgccccgcagccctcgtgccccagcccttctgcctctgctctgctttgcaggctcgagtacttgcaccagaagcagacaaagtctccagtgagctggagaggcaagccctggagaagcagggcagggaagccgagaaggagatccacccgtgtgtctggaagggactgcgggaccattccttccatcctctttatttcctgaggtccagagaaggaaggagacttagcagccacagagcaagaccccaatctcctgactgcactggcctgactgccccctcccaggggatgttaatgaaatgaaggaagtgggccctttgagtcaggaaaccagggccagttctttttcaggagttaaatgtttacccatttccaaggttgcgttttgggaggggacatgggttctctccttcctgctatttaggcattctccaggttcgagagccactgcattttgtttaaacacagatagcacgggcctttctcttattgctacagtgttttgtacacggttaaaacactagtaaagctttttcgttattaaaaaaaaaaaaaaaaaaaaa

SEQ ID NO: 845 - DNA, 968 bp, Homo sapiens
  SITE (928): n equals a,t,g, or c
  SITE (961): n equals a,t,g, or c
  SITE (963): n equals a,t,g, or c
cctggaaaagcgcctcctccgccgctcccgctcgggggacgtgctggccaagaaccctgtggtgcgctccaagagctacaacacgcctctgctgaaccccgtgcaggagcacaggcggagggcgcggcggccggcggtaccagcatccgcagcactctgtgtcggagatgacgtcctgccccgagcctcagggcttctccgacccgcccggccagggccccaccggggaccttcaggtctkccccggcgccccactcarggccctgccccagcagactgtaccccacgacccagccccctgagcagggcttggatcccacccgcagctccctgccccgctccagcccggagaacctggtggaccagatcctggagtccgtggactcggattctgaagggattttcattgactttggccggggccggggctctggcatgtccgacttggagggctctgggggccggcagagtgtcgtgtgaggcctcacagctggccttgagtttttactgacacgtccctgtgtgcgggggtgtccatgtggcgtgtgtgtgagtgagacttttttactgcgtcccgtcccgccagccctatcggcctcgtcactggccttggtcactttgtatttctgtcttggttggaaataccatcagccttccttgctcggcccaggtctgtttcaggcatctgagtcggcgtttacccaggggccgggccagagacgggggtcggccgctcgctcccacgctcctcctgccccagccctctggtgtccacacctgcccacagagaatgtaaacccagtgggctctgcccacgccgggccccaaagtgaccagactccagcacacctgtctcctcctgcctggggtggccatggggatggaagggggtggaataaaacctgtcaacctggctcatgtcttgcangtgcctgccctgggggcgcccctttcagggtgntnaccct

SEQ ID NO: 846 - DNA, 990 bp, Homo sapiens
ttaagacacgcgtcccaggtgtggatgtgtgggtgcttaagacagcagactgctgctttgctgggccaggcctgggtttatttattacaagcagttcaggaagcacagacatcacgttgttcacttgcttcactgatgaatgtaataattgttctcgttcatgccctttgcccctggtgtcggggctgtccacactggggaccattggtgcccccatgattattagctccctgaagcctggtgggtcgtcagggcttctgtccggtgtttaaagacccatcccagacaagcccaaaccacctcagtttgaagagacatagagggacaggcagacggggcctcagagggatccagcctcatccagcctcccggcaacctcaggagagcaggccagatggggcctcagagggatccagcctcatccagcctcccggcaacctcaggctggttcccttccagtgccgactccacagccctgctggttcccttccagtgccgactcccaggctgagtcgctttgcagcgtttgggacgtacgcagggcctgtgctgtgggccagccacttagtgcacttcctgagctcagaaacacgcagtggttcagcactgagtcatgcttgcttctctacgcactgatttgttctattccagttttcacgtacatcgttttggtgacatctctgcgttatcatttatttatatggagtgtattttctccaaaacttctctacgagggaatgcacctgctcattacagctgctgtctgtgtattcttcacggcaatggatcaaaccagactcacacagtcttagactaagctgaacactggaaaaataatacatgcttaaagtctgctgttattctaaaatgaaagatatgaattcaacaaagttgatggataactttctttgactgctctacctgaatttagactaagcagtaaatagtttaataaaagatcactttaatataaaaaaaaaaaaaaaaaaa

SEQ ID NO: 847 - DNA, 968 bp, Homo sapiens
aaaatgtgcagaaaagggaacatgtgttgctgtgactttaaaatgttttttcctgatgaatatatcagaaagtaacatggcattctcatttcatgcaggtgcagactactgtactgttgttgcaggctgactttttcagagtgagggctccttgtggggagctgcgagctgccagcatcagggcaaagccatggtgactttgaagccttcctacttgacttgagtgagatgtggcgaggattctgggggcttagagagggcagcctggagaagccagagttaagctcagaacaagaggtgcaggaagagccacagcagggaagggaagagagatcccagaggaggggcagagtgtggcaggacaagggccctgccgtacatgcccaattacagggcctcgaaagagtcctgtattgttatttttcgtcactacctccccgggtcgggagtgggtaatttgcgcgcctgctgccttccttggatgtggtagccgtttctcaggctccctctccggaatcgaaccctgattccccgtcacccgtggtcaccatggtaggcacggcgactaccatcgaaagttgatagggcagacgttcgaatgggtcgtcgccgccacggggggcgtgcgatcggcccgaggttatctagagtcaccaaagccgccggcgcccgccccccggccggggccggagaggggctgaccgggttggttttgatctgataaatgcacgcatcccccccgcgaagggggtcagcgcccgtcggcatgtattagctctagaattaccacagttatccaagtaggagaggagcgagcgaccaaaggaaccataactgatttaatgagccattcgcagtttcactgtaccggccgtgcgtacttagacatgcatggcttaatctttgagacaagcatatgctactggcctcgtgccgaattcgatatcaagcttatcgataccgtcgac

SEQ ID NO: 848 - DNA, 818 bp, Homo sapiens
  SITE (595): n equals a,t,g, or c
gaattcggcacgagctgatgtccacagggtggcgctcaatcacgttcaggaagcgcgcctcggggactgcgatggcacagatcacgtggatccacctcctatcggtggtcatctgcagcgcacctcctcgcaggttgcacaggcagcactccgcagtccaggcgtgggccgcgcaccgggaacacgtccagccttcattgaccagctcgggacggatgccatagcaactggcatggacctgcaggcagcacttgccgcagggatcagggggctggtcccgtcgtcgccgatgtaggagttggcaggcagcggctccgtgttctcaccgccakaggtgaagcacatctcagggatgagcggtcgggtcttctgacggcttttggagggtaatgtggccgggcagccctctccgagggaggctatgggtgcctccttctcagtctgtagggcctggcagtaggggtagaagagcgtgcagatggcgcagtagggctccgtgcgcgcascgctgcgttgaacttcctctcggsctggaagctggccgccctgttcttccactgcagagacagcagcggcctcaaggcgtccgggtcantcacatcttcctccccggagaaaggggatkcctcctcgtcacttgaggcctcctgcttcamcaccgacagtggggaccgggtgggcggccggcccaggggatggcgccggctcttcttgatctccatcttcaatttggaaaatgtggamggtgcctgcccctctccgrcccgggctttggtctccatgcgacctgccccactgctggctgcaccgtcctctgg

SEQ ID NO: 849 - DNA, 1134 bp, Homo sapiens
cggcacgaggaggaaccccaacccagctagtcccctaggggctggaggccaggggcagactgagaaggggggcatgggtggtaggggagggaggaaagaccacccaccaaaataaacaggcagatccaaacatttatacaggaaacatctggctgaacggaagaggatcttggggakatgagaagccccccacatttcattttttttttcctaaaatgtcctggactgggttggggaggtcagccacctggggtttaaggggcaatcccctccccacaccgacgtgctgaggagcagatgtgtgtgagacagacacaaggggcaaagataaggacaagagggtgccttctccttggaatctgttatgagggctgagggtgtccccgtccagttcctggactctgggggatcttgggtgagatgggggccggaatgggctggggcaggggtgaggctgggcgctcagcctaagaagccatcggggtcatcatcctcaaagtggccttgctgaagcaccttgatgtggtgttcgtagattttcagggctggcccgaggcggatggacaggccggtgagcacatctgtgcgctgcatgagcagcaaagatttgccatcaatttcctgctcttggaaagctgtcgcctgctccgggaatccagcctcagtaaaatattcgacgacatccatcacggtccactcgacgggatccgatggcttctctttgcgcccgggaggacagccaaagggggacccgtcggccccaggtagggctggtttgcctgggggcaaaggcacgggggacggggagtctggcccggtggcaacagaagctgttcccccttccttgttcatggctgccatggagaacacctggcgggtgccgctgcccggggctggcccccgcccttcatcctggccctggagggcagattgcttgagcccaggagtttgagaccagcctgggcaacacagtgagacccctgcttctacacacacaccaaattagccaggtgtggtggtgcacatctgtagtcccagctacttgggaggctgaggtgagagaatcatttgagccctgaagctcaagacctcgtgccgaattcgatatcaagcttatcgataccgtcgacctcg

SEQ ID NO: 850 - DNA, 1643 bp, Homo sapiens
ggcacgagcgcacattcatgtagcgcatgtgtgtgttcgtgcatatggtgtgtgcatgggtgttcgtatctgtggggtacaggcatcatgcacgtgtgttcatctgtgtggggtgtgggtatacctggactgtggcctgaggctcccctacaggacactgctcctgccgcctccccaggggataacaggaccctgctcctcttgctaaagccagtttgggagcacccccacccaggcaccccacgccagccaggctcgcctctgaccagatggctgaaggagcaggtagagcaggaagtgggagccagtgacccaggttcccctggtggccaggcttggtggcccatgtccatggagtcccccacctgccaacgacctccggccatgcctcctgggtaccaggccacccatgggcgggggtgggggtaactcccagctgactcgctgcctagctggcaccaatgaggtctccacctcagcctgggctgagtgtctagtgctgactccttcctacaggcaggtgagcttgggaggcaggggccctgtggacttgggaagcgggctcagggtctggaggccagaggtcttgtccccaggcccagcatcccatcagcaagagcccaggaggctctcagggcagtcctcctctagcaatctcaggggcagcgtcctcccaggagtcacatccagatcaccatacgcacccgctggcccctagcatgttccataagtggagaggggttggcctgtggaggcaggggcggccagaagatgtgccggaaccccatctagaggctgacacgtaaacccagatggcacaggggagcctgagcatgaagtggctggcctctcccttgcgggggcccagcaactgccgaccccatgtgccaagccccgcctgcccactggaacgcctcaacaggctgctccctgtggttggtgacaccaccactcgggtcggcttggctgaggccagcggagcatctcccctctgggtccattcacatccatcttccccggacaaatgaacaccccccaaacactcacttcccactttgaccccagaccaaacacacagccactcctggaatgccggtgattgagggtggctgggcccttctgtgcccacaaaccagggcctgggctatacctgtgtggctgcacaactgtgccaggacagccttacctttgccgggggcttcgtgccctcccagctgcgtgtgtccatggacggggggacctggtagatgtcatgccccatcccggcagaaggtggcacctggtaaatatcctgggcagggcctccaggccctgggggcacctggtacaggtctgtggccgggctgggaaacgggtgatggggtgtctgcttcgagaaggtggatgtctgcttggctgggggagactggaactgagggctgggacccgggacttggtagaggccttgctgagccttgctgggagtgggcaccaggtagacgctgtctggctggggctggtaggtgttggggagcatgggcgtgtactgggaggccggaggcgctggggcatggaggccaggctgaggctgggccggggtggcgggagggccggggccaggccctcgtgccgaattcgatatcaagcttatcgataccgtcgac

SEQ ID NO: 851 - DNA, 2298 bp, Homo sapiens
ctagagcaaatttctctttctagaaggggagggtcacagggtcacagattcaccaaagctgaaagggctgaggagctcatggtagcctgggttgacctactctggagcacggtgtcttccttctaaactgagtgactgtagtactatctgtgcctctgatggtaataaaactgacaagatgtctaatttttttttaagtaggaccaaaggaaaacaagatttagatagtctgactttgcttttgaacaacagacattgcaagtcaaaattgttgtcaaatttacatatggtaaatgatgaactttaaaaatgtgtccaggtgttagatgagttcattagactcttttaatgctaatggctagtacgtttaaacaaaacagcagttctctgctgcaatattcccattgaccacttaaatgaccataagtggtcatttaagaacatgttagggttagccctgatctgaatataaaagtgagaaaagggctacagtgcatttcttggtaacttaaactgagtcttgaagttataatgatccattcgagttctgtgatccttattgttcttaattgtgtttctctacgtattgttacagatgagccatacgtttctttgtatcaatgtagacatgacttcagatacctctgaggacctacccagcagtctaggaccctgggccaagtgctgggactatggtactaaatccagtagatgggctgtgtagcaactctcccagggaacacactagggtacttagggaggtgctttgtggagcatgttgaagctttgagatctgagcaggaggcagtgatgtccctggtctattcagggaaagatttcagtgtgaaatggtaaacatccaattgacaggatttagattttgcttagtttttctgctttttaatgtttctatcccccatctcagtgttttctttatccatcccagtgatgccttatttgaaactgggcttaaactgcaaaaagaatgaagttggatttaggaagctgttagatcattgagtggtgttgagagtgaagtttcactagcagggaagtttccttgagcctaaaataaaaagaaaaaattaaaaagaatcagtttttttaattaaaaaaatagaaagctgttaggctcctaattcgtggggtttttttttgtaaaaacagtttagataatcctgaatgcaatcattaacttggttgctaattacaagaatgaaaattataatggaaaaggacaaaataatataccagctggtttgttattatagtccgtgtattaaaatactattgaaatacgttaaaggtaaatttttaaggtttaaaaaaaatttagtaacttacagggatggagaatttagatgtcagaggtggggagatttatttttataaggtaatttttatcctgataaggacttaaaaaaaagttttgcaactgaaattttaaagtaaacatgttaagtacagttaaaaagtaagcattgtagtaaatagtggattctctggtgtgtattttttatctcagtgttgaaaattggaaaagaatggactgaagtctaaaaactggaataatgaaggacactaaatgcctttattgtagatactatgtttgtaagtctatagctaagcaacttaagccaaaaaggtctttcaactgaagctttaatcaacttattttggagatgttctcttcccttatctcatgcgtcatccctaaaataataagatacatgggatcaaatagcccttgccttttcaacacaaatcagttggaaaattatggtttgagtcctgttgctgccatggcttctgtttctcagaaatgagtgtgtatgaacataccaatctatgtaataggctacctttttttgtcttctttggaactttgtacacaaaccaagacaatatcagggtgacaggtgaatgaacttaaattctcagtcttgtctattcaccaaaaaagtatactgcctgttttttctttaattattcaaggttgatgacttttaggaacatgttttatactgtattttttaattaaagcaagtgccttgatgtaattccatgtaaatcattgcttaaccctcttatgggatgaggatgagttattaatgtattgcagcctactggaaaggagggggagttggttaatagcagatacttttcttctagaagcttatgttttatgctgtttattatgtaagatcctgtatgtgtgttgagatttagaggtttcatttgttttgtctgctaataaattgttactctaataataaaaaaaaaaaaaaaaaactcgag

SEQ ID NO: 852 - DNA, 1952 bp, Homo sapiens
ggtagaactcaagttgctgtgaacttttctcatccaaaagactcatttgtgtggatgcgtgaccatgggaaaaagaaaaaaaaaaagatccattttttaggttcttttcggtctccagctgacaacccaactggacaatgatctgtctggtgcaggagaaggcaaaagtttctacaagtctacatgaccttgctgatacttgttctaatagaaacccagtctgctgtgtcttcaacatactggtattttcattacaaagtatggtaaatttttgagttgtttgtttctgttttgtaaagagaatccttattggacaccagtgaaggtgtctctgttttaatgatcagggtttttattccatcttttgcatttcttctatttctgaaggtttgtctcttggcatctttttttagtttcttaccataagagtttgacccgaaactgctcacttcacattggatgacaccatgttcttcctctttgaaaagaaaaggggaatgtgtcccactagtgaaaggaaaacttttcaacactatccctgctttaatctcagcaaactcagactattctgcttagccttcattagtcatctgggtgtgagtgtgtcttgttctgtttttctttttaataaaacttttaaaccatatatttagcctgtgaccaggggggccaaaccctaagatttctggtaaacctgaagggtggccctcctcagacaatttatctcccagcaatgaccctactacactcgcgtactgtgaatttgggaggaggtaaagttgacttctcctcgtgggcagttttccaatcaccttgtgagtagacacctgccaatattgtttgaaacctttttttaatatgacatcctctcttgtcattctcttctcccctttcccacagacttccctcctactgggtccaggttcagaaccaagacttctgtacctagtgctgcctgattggtgaacattgacttcaagtagcatagcccttgtgtgactcacaactccgtgtccttcctaaagtttcgggaagcagggttgtctaatatgcacatttcttattttggtcatatttttactttagtgtcactcaccttttacaaagtgactttgtactcatttagggctctatcggaaatgcttccattttgccttttctacagttaggccaattttgaaatatataaattctatgcaacatttatgttgagttaccaatggaagccaaaagttctcttcccaaactgccaagaatgatacaggccataattgaaatgggaataccttttaagtttcattaggggtggggtgggagtgggacaggaacaagacttgcctagatctttgttgtatcttggggacttttactttgttgtttgatgcttaaacttcaaaattctctgtattcaaatttgattgtggcgaatctacttcaaaaaggaaaaataatccaactttgtggatattaaatggaaggtttgctgttttgatctagttgtttccagtggagcagttttatgaaatatgttctataagatgtacattttttcattgtaacatagaaattgtaaataattgattaaagtgctgcattttgatgaattttttctagccatttttaaagagaaaactaggaattgagtattttgtgtacggtatgtttccatcctccctccccttcctcctcccctcctctctctctcttcctacctatttaattttcatttgtcatgaggtttttggatttgccaatgatctgctggacatcatgccccatgtcatagagaataaagctgatgattgtaccagtcttaaattattcatgattcaataaaattgatgcttatttattcaaaaaaaaaaaaaaaaaaaaaaaaaaaaaaaaaaaaaaaaaaaaaaaaaaaaaaaaaaaaaaaaaaaaaaaaaaaaaaaaaaaaaaaaaaaaaaaaa

SEQ ID NO: 853 - DNA, 1076 bp, Homo sapiens
  SITE (35): n equals a,t,g, or c
gacggctgcagaacatccgccgcaccgctgggggncaacgttgtcggaccgaggagtccgaggtggcgactgagtgagatacccagctgtgcggagctaggacgcggaacatcccagaggccagcatcaacatgctgccacctgcccaccaccaggcctttgtccgacatcgcctggaggaggccttccgtgtggcccttgttgggcaccgacatcccctgcctgtcctggcctatgtccgcctcacacaccggagatctgggaggttcctgtcccaggatgaccttgtgcagtccattggtgtgagtgcagcactaggggcagccggcgtggtgctctggggggacctgagcctctccagctctgaggaggagtgctggcatctccatgactacctggtggacaccttgggcccctatgtgatcaatgtgaccagggcagcgatggcctgcagtcaccagcggtgccatggccacgggcgctgtgcccggcgagatccaggacagatggaagcctttctacacctgtggccagacggcagccttggagattggaagtccttcagctgccactgttactggggctgggctggccccacctgccaggagcccaggcctgggcctaaagaagcagtataaagccagggcccctgccactgcctcttcttttccctgctgccacttttccagtcctggaactactctgtcccactcttgctctattcagtttacagtcaaccctcccaagcacacaccccgcttcccttggaatccctgaggggtagaaggggccagaaaaaacgcttataaaaccagaggccctctgagatcatgtgagtcctccatggcaaggaagcagttccagggagagtcaggttccagctagttagggctgccagcctagggctttgtgcctacacctcactaagcccatggagaggtcacagatgggccgtgcacgggcagatgggccccaaaaaatcttggcgaaggtcggtaaagtgctaagctgttgtctgcactctttcatcataaagtcacttttttccactaaaaaaaaaaaaaaaaaaactcgag

SEQ ID NO: 854 - DNA, 561 bp, Homo sapiens
ggccattatggccggggtgattgccatttgtagaggggaaggaatcaagggactttaagctagatcaaaatctggggacaaattctcctgctaactgcaagttaaaataggcccttcttactgaatttccctgtttgtttctctgcagacaatgctttagccctactcttgggcccccaagttagcagagtaatcaaagcttcctaccgtttggcctactattccagactagtccctcgaggggttcccttccaaaatatgcagggctcaggctcccaattccgggcctgtctgctttgcttgtgtttctcctgtccctgttctcccggagggcccaggtggaactcacgacagggagggagacgcttcccaaaaacctgcagggctatttcccagaatttggttttcaagtacaaaactttttgtcctgtaagatatatgcagcctcacagaagcagcctctgcctccactttaccagctacgtttttatcttaagcacatggggctcccttagaacttactccactgatttaaaaaaaaaaaaaaaaaaaaaaaaaaaa

SEQ ID NO: 855 - DNA, 1629 bp, Homo sapiens
cccacgcgtccgttccagagctcttggaattctgacatctcatcaaagtggctttttgaaaacatctacaagcaaaattacttcaactgcgtggaaaaataaagacattaccatgcagtccaccaagcagtatgcctgtttgcacgatttaactaacaagggcattggagaagaaatagataatgaacacccctggactaagcctgtttcttctgagaatttcacttctccttatgtgtggatgttagatgctgaagatttggctgatattgaagatactgtggaatggagacatagaaatgttgaaagtctttgtgtaatggaaacagcatccaactttagttgttccacctctggttgttttagtaaggacattgttggactaaggactagtgtctgttggcagcagcattgtgcttctccagcctttgcgtattgtggtcactcattttgttgtacaggaacagctttaagaactatgtcatcactcccagaatcttctgcaatgtgtagaaaagcagcaaggactagattgcctaggggaaaagacttaatttactttgggagtgaaaaatctgatcaagagactggacgtgtacttctgtttctcagtttatctggatgttatcagatcacagaccatggtctcagggttttgactctgggagaggctgccttatttggagcaccttaatctctctggttgtcttactataactggtgcaggcctgcaggatttggtttcagcatgtccttctctgaatgatgaatacttttactactgtgacaacattaacggtcctcatgctgataccgccagtggatgccagaatttgcagtgtggttttcgagcctgctgccgctctggcgaatgacccttgacttctgatctttgtctacttcatttagctgagcaggctttctttcatgcactttactcatagcacatttcttgtgttaaccatccctttttgagcgtgacttgttttggccccatttcttacaacttcagaaatcttaatttaccagtgaattgtaatgttgtttctcttgcaaattatacttttggtttaaaaagggattaagtcttttcaaaagggtgagaacagtcttacatttttcttttaaatgaaatgctttaaagaatgttggtaatgccatgtcatttaaagtatttcatagataattttgagttttaaagtccatggaagtgaatgggtcctcttacacattaacactgtaccaagctttgcagatcttttccgacacacatgtctgaagacttattttcaaagacagcacatttttggaaactaatctcttttccgtaatatttcctttatttcaatgattctcagaaggccaattcaaacaaacccacatttaaggttctttaggattatagaataaattggcttctgagtgttagctcagtgagctaggaaagcaccaatcgatatttgtttcctttagggatactttgttctcaccactgtccctatgtcatcaaatttgggagagattttttaaaataccacaatcatttgaagaaatgtataaataaaatctactttgaggactttaccaagtaaaaaaaaaaaaaaaaaaaaaaaaaaaaaaaaaaaaaaa

SEQ ID NO: 856 - DNA, 1018 bp, Homo sapiens
cccacgcgtccgaaatagatgatatatagatgacaattgcaattgtcattttaattattttccctacagtaaagaacctagctctgagcagtgaaattgtaatggcactttaaaggaagtaagccgttaactgttctctagtggagcgatctccaactgttttggcactagggacgggttttgtggaagaaaatttttccacaggactgggggtttagggggatggtttcaggatgattcaagtacattacatttatcattagattctcataaggagcatgcaacctagatctcttgcacgtgcggttcacagcaggattcgagctcctttgagaatctaatgccatggctgatctaacaggaaactgagctcaggcagtaatgcttggcaccgccccccaccttctatgcagcccggtcgtggcctggggactggggacccctgctctagtcagtaataaggtacttgtgccagaatataaatcaacacattgcttcctttatcaaagaagtcttgttatttaaaaaaagtcaactgagccagtatgattagtgatgtaattgattttcattctggcacaagcctctttcattctggacagctcacaaatagttaatggaccatgctttgaatagccttcctctaagcaacatttataaatactgatattttagaactgtttacatttcttctgtttatttttgaattttcagtttgatatcttgtccttattcattgttgtataaacaactgtactttaatttcaagtagtattaaaagtatttcacttcagtttggggggattattatcaatttataattttataaaagtattttaaagaataattgtaaattttccataaattacaacttcctgccatcttttattaaataataatcttgcttaaggcatatagacagacattattatgagtattccagtaaaaaaaatctacatcaacttgaccattctggctaaaaattaaaaagcacttttttaaaaaaaaaaaaaaaaaa

SEQ ID NO: 857 - DNA, 892 bp, Homo sapiens
cccacgcgtccggtttgtggagtatcttcatgggtattaccaccactatttacatgaagtcttcaagtggccttaggaagccgctggtaactgaacaactttctctaaaaagccaagctcatttttaactagagaatctgggaaatactgtgagttttttctctttccttttaaaggtacaattattataaattcctaactgctcctaaaatcatatagaacatttccagagccaaagaatttctaagctatagtttaaaatgatagcattttggaagcaagcctgaattcacttcctataatgttttccagattgtataagcaaaggctattattgctgctgtggtatagtcactttggtggtggtggtagcaggctagagagaatctcctttgccctgaagtctagaatgtaaatttgtaccaccaaacacaatagccaatattataaacaggaagtaagaaaaaaacctcatctcacttgcaaaagatcagcttattttcaattgtggaaattaatttgttatagataacagtagatttgagtgactttatttacttttcctcttcagtataaaaaataatattagtataatctcattacatcaatatattgaatagttaagttttttcctcttttaatatttaatatttgccctactgggcatgagttggccattattgaagccaggtggtgagtacctaagaattcattctactatttttctattttcatatacctttggaatttactatcataaaattatttttaaggtatatattttaaaatcttctctgttagctagtccttctcttgaaccacattcttcaaaagttctcccacagctaagttataaagagcggaccacttttggcagaaaaaaaaaaaaaaa

SEQ ID NO: 858 - DNA, 651 bp, Homo sapiens
gttaaacaaaataagatttcaaattcagtacaaactacataatccagtgatttctcaaagagcactctttgctagcttcttcctaaacaaaatctactctaggaagatggcccacctggatgatggttccaggagggccagctcccttattgctttgctttctcttcctcctcttctggtaccttggggaactgatcacaaagagccttttgagggtgatggaaagctacccctccattcctcaggcagttttccaaagatgacacttggctaaatgctcagggtatttacagtcataggagataaactatcaacttgttactgttaaaaaaatcttgagatctgggatcttgatgcctgaaaatcccaagattggtacttggcaaactgaaagaaatctagaaaaccctagagatcaggcatctgtggccagctaactggtcatacaaatggattgttgtggtgaacttgtatagtattaatcctgagatgctgtccccctccacccccacccccacaaaaaaaataaataaagtagtattaagttagcctcatacaaatgctggcaccatgctcctggacttctcagcctccataactgtgagccaaataaacttcctttctttataaattaaaaaaaaaaaaaaaaaa

SEQ ID NO: 859 - DNA, 1270 bp, Homo sapiens
  SITE (553): n equals a,t,g, or c
  SITE (1070): n equals a,t,g, or c
  SITE (1208): n equals a,t,g, or c
acgtatagggaaagctggtactcctgcaggtaccggtccggaattcccgggtcgacccacgcgtccggctgaatgtttttttcattttcctgagagatgcaaatgttcattcattcatctcattatacaacacagtacataaatgtagcttcagagcgtattaagtgcttttatacacaagtgctggctgtgtggaccaggtggtagctcatttaggccccaaattcattaagggcagggtctgactcttaggcttcttaatatttggtttggtgcatggtcaagagctggacccacatgttgcatagcagcagggctgatatgtttaaagacgctgggctttttctgctctggggccctttcccgggggttccggtgagtccctccccaggtgggtctgcccccacccgtgtgggcgggattagctcccagaggctggccaggccccacctgggggargcttgagggcagggccccaaggctgagattcaggcttgggggaacagagcaggaaagagacccggtaccgaaagtgagcggggcaggcacctantcacatgggtaatgggcaggggtcggtcactggctttggctccagggccaragcagtctgacttagtgttgagctccaagcatggaacactggagtggttcattttgaccagcaagcctctaaatgggtgccttgattacccaccgcaaggagagggcagttgcctttttatgacatgttaattccagccaggtgagtcaccaggtagctctcatcctcctgccaggctcccctgcctgtcggtttggcattgtcagataatgtgatcattcattgaagtgacatttgagttccaaaccagttttctcctttaaccatttcaccctcaggagtgattctcctttgtttggcattgtcagggaatgtgatgatccattcaaatgacttttgagttccaaatagtgtttctactttaacttcctaaatgaaaaaaaaaaaaaaaaaaaagggcggccgctctagaggatccaagcttacgtacgcgtgcatgcgacgtcatagctcttctatagtgtcncctaaattcaattcactggccgtcgttttacaacgtcgtgactgggaaaacctggcgttacccaacttaatcgccttgcagcacatccccctttcgccagctggggttataacgaaaaggccgcacgatcgcccttcncaacagtttgcgcaacctgaatggcgaatgggaccgccctgtaacggggcattaaacgcggc

SEQ ID NO: 860 - DNA, 3145 bp, Homo sapiens
aagtgaaaggcgaggttgctgtaagcggctaatcataggctgtggggacaagcaatgttaaaaatgaagaaaaactaagacgcagtcttccaaacctgtcccgaacatctaatacacaagttgactcagtgaaaagcagcagaagtgactcaaattttcaagtgccaaacggaggaatacctcgtatgcaacctcaggcttcagccataccttctccaggcaaattccgttcccctgcagcaccatctcctttggctcttcggcaaccagtgaaagcatttagtaaccatggctctggttctcctggtagccaagaaataacacagctcacacaaaccacctcytcacctgggcctcctatggttcagagcacagtctcagcaaatcctcccagcaatatcaacagcgctactctaaccagacctgcagggacaactgcaatgagaagtggcttgcccagacccagtgccccttctgctgggggcataccagtgyctcgcagcaaacttgcacagcctgttcgcagatccttgccagctcctaaaacctatggtagcatgaaagatgacagttggaaagatggctgttactgaccagcaaagacaagaatgcagaagtccacggcttcatggatacccttcaccaggctaaaaaacaacttttatatgcagactgttcagataagactcttgggatttataaaatcccagccctctctgtcttaattagcacaaaccgacagagatcatcaaacagcactttaatgacatttaacatcagatgtgtttggtaatcatacaatcactctccatagaatcacttttagttttgtttaatagaaactaggttgatttttaaaaaatatttgacagaggccaatatctgggcaaatacctaatggatgccaaagagaaatgcccatttgtaaatgagaaaaatgcccatttgtgcacaagaaaatggtgaattcaggctatccaaaacttcacattcaacctaatttactgtataaatagtatcaataaatatttgtgttaatgagaactaatattctgactaattatctaaagtgtttcactagtacaccaggaaactacagattgagattagggggtgggaggaaagaaacctgggctagagattaaaacattcctaaatttagcagaatttcagaaatgatttttgcagattcattagaaaagaaaaattgtcatttaatcttaagttttggatgtagctcacatgtcaccaccaccagatagtgttacagcatgtatccatcatgttgcattgacacatcaaacttgtgtgtgtttgttttgattgccaaaagggcttaatatcagttgtacaatctttctgaactttatagttcctggctcaggaaagatggcctttgctattgaagccaacttcttcacatgctgttatctttacagaactaagagatcttgtttctattagcaggttttcatgataggaaagaacaagtagtgtgtgtctttattcttgatacaacaccacctcggtgcttgcaacctggaacaaaaccataccatgagakagagggggaaaaaaatctatgcacttaacctacaaaatctctggtgatgacagttgtattgttgctattacatggcataacggtctattatgtggtaggaaaatatagcctgctaaatcctacttaagttgatccactttaaactgagtaactgtataaaacatctattgaaaattcttttccttttgacttagattctgccttacatcaatttttgcatttttggtaaaaaaaaaaccctactacgtatgactctaacctgatacttgctctctaatggctcttaatatatccttgaaatcggctatttcaattttatcagacttttaccagagtaaaacttgcttctgtagcaggcctctcattttttattatgaggtctgtttttaaatacttaatttgaacagctctaagatattgtcacttaggtcatctaaaagcttttagagatttgaacataagttcatttcctgttaatcaaagacattccgtaagttggcaaaagaaattgggagagagaaatagaaggcttgatattctggacagcattaaggttgataggttgatgataaaaacttaaaaccaggacctccattctgtcatgactgacaccatggtagtctgtcagcttgaccagtggagagtcattcatttagcacaagcagctggagatttaaactgccagtactatgtatttggtgtataatgcaaggaagaaactttatccttgaatttgagggtgatggggtgggtcaggaaaggatggcgccagaattctacatgataatgaactaaaaaatgttgcttttcagaggaagataaagcatcttcttttgggaggggggtatctcatgtctaagtaagtaaaagaaagaagtagctactgtctcttttaaaaaccacgtacaaaacagaacaagtctcagttttcagtgcaacatttcaaaaaatatatatgctgcaatctaataattaaaaggaattttacctattatgaaacwtattacattttttaagttagataatcagtttcaaaaggagtattcaggttatttaactttgtttttaaatggctgcatcagaaaaaaatgtctatttttttttattaaaatatttcatcacttgttaaaacatatttttgatctgagtttggtaaagtattattttacctgctgttgtactaccacagactgttgacttttagtttcttaaagagaaaaattgcctttttactagaaagcctttgtatattgcaatttttctgtttgggaaaatctaaggatttactgtggttagtcttacagaagaaatgtggatttgataaactagtgcctatgattttaacttatgtttgatatatagtagtaagggttttatgaatgttgattattttgtgccaacagcccagaattgtcacttatatgtaagcagaaaacaatgagctctgcttccaaagttatttaattttctcagtgtttgaatgttattttttgtaagtgtgttaataaaagtgtaaagaattggaaaaaatataaatattcttaactcaagcaaaaaaaaaaaaaaaaaaaaagggcggcc

SEQ ID NO: 861 - DNA, 3145 bp, Homo sapiens
aagtgaaaggcgaggttgctgtaagcggctaatcataggctgtggggacaagcaatgttaaaaatgaagaaaaactaagacgcagtcttccaaacctgtcccgaacatctaatacacaagttgactcagtgaaaagcagcagaagtgactcaaattttcaagtgccaaacggaggaatacctcgtatgcaacctcaggcttcagccataccttctccaggcaaattccgttcccctgcagcaccatctcctttggctcttcggcaaccagtgaaagcatttagtaaccatggctctggttctcctggtagccaagaaataacacagctcacacaaaccacctcctcacctgggcctcctatggttcagagcacagtctcagcaaatcctcccagcaatatcaacagcgctactctaaccagacctgcagggacaactgcaatgagaagtggcttgcccagacccagtgccccttctgctgggggcataccagtgyctcgcagcaaacttgcacagcctgttcgcagatccttgccagctcctaaaacctatggtagcatgaaagatgacagttggaaagatggctgttactgaccagcaaagacaagaatgcagaagtccacggcttcatggatacccttcaccaggctaaaaaacaacttttatatgcagactgttcagataagactcttgggatttataaaatcccagccctctctgtcttaattagcacaaaccgacagagatcatcaaacagcactttaatgacatttaacatcagatgtgtttggtaatcatacaatcactctccatagaatcacttttagttttgtttaatagaaactaggttgatttttaaaaaatatttgacagaggccaatatctgggcaaatacctaatggatgccaaagagaaatgcccatttgtaaatgagaaaaatgcccatttgtgcacaagaaaatggtgaattcaggctatccaaaacttcacattcaacctaatttactgtataaatagtatcaataaatatttgtgttaatgagaactaatattctgactaattatctaaagtgtttcactagtacaccaggaaactacagattgagattagggggtgggaggaaagaaacctgggctagagattaaaacattcctaaatttagcagaatttcagaaatgatttttgcagattcattagaaaagaaaaattgtcatttaatcttaagttttggatgtagctcacatgtcaccaccaccagatagtgttacagcatgtatccatcatgttgcattgacacatcaaacttgtgtgtgtttgttttgattgccaaaagggcttaatatcagttgtacaatctttctgaactttatagttcctggctcaggaaagatggcctttgctattgaagccaacttcttcacatgctgttatctttacagaactaagagatcttgtttctattagcaggttttcatgataggaaagaacaagtagtgtgtgtctttattcttgatacaacaccacctcggtgcttgcaacctggaacaaaaccataccatgagakagagggggaaaaaaatctatgcacttaacctacaaaatctctggtgatgacagttgtattgttgctattacatggcataacggtctattatgtggtaggaaaatatagcctgctaaatcctacttaagttgatccactttaaactgagtaactgtataaaacatctattgaaaattcttttccttttgacttagattctgccttacatcaatttttgcatttttggtaaaaaaaaaaccctactacgtatgactctaacctgatacttgctctctaatggctcttaatatatccttgaaatcggctatttcaattttatcagacttttaccagagtaaaacttgcttctgtagcaggcctctcattttttattatgaggtctgtttttaaatacttaatttgaacagctctaagatattgtcacttaggtcatctaaaagcttttagagatttgaacataagttcatttcctgttaatcaaagacattccgtaagttggcaaaagaaattgggagagagaaatagaaggcttgatattctggacagcattaaggttgataggttgatgataaaaacttaaaaccaggacctccattctgtcatgactgacaccatggtagtctgtcagcttgaccagtggagagtcattcatttagcacaagcagctggagatttaaactgccagtactatgtatttggtgtataatgcaaggaagaaactttatccttgaatttgagggtgatggggtgggtcaggaaaggatggcgccagaattctacatgataatgaactaaaaaatgttgcttttcagaggaagataaagcatcttcttttgggaggggggtatctcatgtctaagtaagtaaaagaaagaagtagctactgtctcttttaaaaaccacgtacaaaacagaacaagtctcagttttcagtgcaacatttcaaaaaatatatatgctgcaatctaataattaaaaggaattttacctattatgaaacwtattacattttttaagttagataatcagtttcaaaaggagtattcaggttatttaactttgtttttaaatggctgcatcagaaaaaaatgtctatttttttttattaaaatatttcatcacttgttaaaacatatttttgatctgagtttggtaaagtattattttacctgctgttgtactaccacagactgttgacttttagtttcttaaagagaaaaattgcctttttactagaaagcctttgtatattgcaatttttctgtttgggaaaatctaaggatttactgtggttagtcttacagaagaaatgtggatttgataaactagtgcctatgattttaacttatgtttgatatatagtagtaagggttttatgaatgttgattattttgtgccaacagcccagaattgtcacttatatgtaagcagaaaacaatgagctctgcttccaaagttatttaattttctcagtgtttgaatgttattttttgtaagtgtgttaataaaagtgtaaagaattggaaaaaatataaatattcttaactcaagcaaaaaaaaaaaaaaaaaaaaagggcggcc

SEQ ID NO: 862 - DNA, 3195 bp, Homo sapiens
aagtgaaaggcgaggttgctgtaagcggctaatcataggctgtggggacaagcaatgttaaaaatgaagaaaaactaagacgcagtcttccaaacctgtcccgaacatctaatacacaagttgactcagtgaaaagcagcagaagtgactcaaattttcaagtgccaaacggaggaatacctcgtatgcaacctcaggcttcagccataccttctccaggcaaattccgttcccctgcagcaccatctcctttggctcttcggcaaccagtgaaagcatttagtaaccatggctctggttctcctggtagccaagaaataacacagctcacacaaaccacctcctcacctgggcctcctatggttcagagcacagtctcagcaaatcctcccagcaatatcaacagcgctactctaaccagacctgcagggacaactgcaatgagaagtggcttgcccagacccagtgccccttctgctgggggcataccagtgyctcgcagcaaacttgcacagcctgttcgcagatccttgccagctcctaaaacctatggtagcatgaaagatgacagttggaaagatggctgttactgaccagcaaagacaagaatgcagaagtccacggcttcatggatacccttcaccaggctaaaaaacaacttttatatgcagactgttcagataagactcttgggatttataaaatcccagccctctctgtcttaattagcacaaaccgacagagatcatcaaacagcactttaatgacatttaacatcagatgtgtttggtaatcatacaatcactctccatagaatcacttttagttttgtttaatagaaactaggttgatttttaaaaaatatttgacagaggccaatatctgggcaaatacctaatggatgccaaagagaaatgcccatttgtaaatgagaaaaatgcccatttgtgcacaagaaaatggtgaattcaggctatccaaaacttcacattcaacctaatttactgtataaatagtatcaataaatatttgtgttaatgagaactaatattctgactaattatctaaagtgtttcactagtacaccaggaaactacagattgagattagggggtgggaggaaagaaacctgggctagagattaaaacattcctaaatttagcagaatttcagaaatgatttttgcagattcattagaaaagaaaaattgtcatttaatcttaagttttggatgtagctcacatgtcaccaccaccagatagtgttacagcatgtatccatcatgttgcattgacacatcaaacttgtgtgtgtttgttttgattgccaaaagggcttaatatcagttgtacaatctttctgaactttatagttcctggctcaggaaagatggcctttgctattgaagccaacttcttcacatgctgttatctttacagaactaagagatcttgtttctattagcaggttttcatgataggaaagaacaagtagtgtgtgtctttattcttgatacaacaccacctcggtgcttgcaacctggaacaaaaccataccatgagakagagggggaaaaaaatctatgcacttaacctacaaaatctctggtgatgacagttgtattgttgctattacatggcataacggtctattatgtggtaggaaaatatagcctgctaaatcctacttaagttgatccactttaaactgagtaactgtataaaacatctattgaaaattcttttccttttgacttagattctgccttacatcaatttttgcatttttggtaaaaaaaaaaccctactacgtatgactctaacctgatacttgctctctaatggctcttaatatatccttgaaatcggctatttcaattttatcagacttttaccagagtaaaacttgcttctgtagcaggcctctcattttttattatgaggtctgtttttaaatacttaatttgaacagctctaagatattgtcacttaggtcatctaaaagcttttagagatttgaacataagttcatttcctgttaatcaaagacattccgtaagttggcaaaagaaattgggagagagaaatagaaggcttgatattctggacagcattaaggttgataggttgatgataaaaacttaaaaccaggacctccattctgtcatgactgacaccatggtagtctgtcagcttgaccagtggagagtcattcatttagcacaagcagctggagatttaaactgccagtactatgtatttggtgtataatgcaaggaagaaactttatccttgaatttgagggtgatggggtgggtcaggaaaggatggcgccagaattctacatgataatgaactaaaaaatgttgcttttcagaggaagataaagcatcttcttttgggaggggggtatctcatgtctaagtaagtaaaagaaagaagtagctactgtctcttttaaaaaccacgtacaaaacagaacaagtctcagttttcagtgcaacatttcaaaaaatatatatgctgcaatctaataattaaaaggaattttacctattatgaaacwtattacattttttaagttagataatcagtttcaaaaggagtattcaggttatttaactttgtttttaaatggctgcatcagaaaaaaatgtctatttttttttattaaaatatttcatcacttgttaaaacatatttttgatctgagtttggtaaagtattattttacctgctgttgtactaccacagactgttgacttttagtttcttaaagagaaaaattgcctttttactagaaagcctttgtatattgcaatttttctgtttgggaaaatctaaggatttactgtggttagtcttacagaagaaatgtggatttgataaactagtgcctatgattttaacttatgtttgatatatagtagtaagggttttatgaatgttgattattttgtgccaacagcccagaattgtcacttatatgtaagcagaaaacaatgagctctgcttccaaagttatttaattttctcagtgtttgaatgttattttttgtaagtgtgttaataaaagtgtaaagaattggaaaaaatataaatattcttaactcaagcaaaaaaaaaaaaaaaaaaaaaaaaaaaaaaattaaaaaaaaaaaaaaaaaaaaaaaaagtacctcggccgcgaccacgc

SEQ ID NO: 863 - DNA, 3195 bp, Homo sapiens; identical to SEQ ID NO: 862

SEQ ID NO: 864 - DNA, 1262 bp, Homo sapiens
cccacgcgtccgcagatatgcttcatgattgtgaccagtcatgttatttctttcaaattcttccagtggtttgtccctgtgcatctgttaattcagttcacgtacagcagagcatgtagttatgctgtctctctgtcatctacttgacattctatagaagtgaacactcgaaagaactggtcaacaaagatgaaagtgcagcaaagcaatgaaaaatgataacactggaagtgaaattttaatcaaacataaatgaatttgtagaagaagtcactgaccatgggaatgttgttcttgctgctgtgtattcataggagcttagtgaaggcaaacttaccaacacaaataagcaaagtggttgcaataaagacagatacgtcccagaggaagtgatggttaaaaaaaaaaaaactttacattaaaagatatttaatgtgaatatagaaatatttcacaacattgaaagcacaagcaataaaagggtggaagctgacccaaacttagaaggagtatggcagtttgccgtgaacataaaagatgcttactcagtatggtaagttacttgccagaaaaaaaggcaagccctattcaaactactttgtttttacaatgaaataaaacactttaattctatttctaatgttttaaattacagtgtactaaatatttttaaacatttttgcatttttttctacatttataactggtcttaagagtttttaatatttgagcagaaccttaaaggtcatggaacaatcatcattttccctattgaatattaagattgcaggaccatttttatggtcccacagtaccatgtgaaatgaggatcgcttgtagctgggaacagtgcttacttcagggaaaactgattttgatagaaccgactagttgagtattaaactgttttggaaataatttatatatctaagtgctgaaatatatttctcttctccccacttattcaaataaaaaagttttaatactataaacttttcattgttagcgccacgcagtccttgtcaagattgttctgggggacaaaaacttgatgtataaagcatgaatatacacacagtacttaaacagataccatatctgtggtattaaaattttgggggtggttgattaggattgtaaaaagactccttagggagtgaggatggaaaagagaaacactggttaatacagagtataaataaattttttggaaattgaaaaaaaaaaaaaaaaaaaaaaaaaaaaaaaaaaaaaaaaaaaaa

SEQ ID NO: 865 - DNA, 388 bp, Homo sapiens
  SITE (388): n equals a,t,g, or c
ggtgcccagtagaggtgcagtgcagcagccagctcgcagcagtgctcccgtagagctgatggcattggcaggagtggcggctcagcacagggaagttctccagtgcccaggcccaggcttgctctcggtttaggtcccatggcacgtggggctctggacctgcctgcctccaagacagctcttccaaggttgagggttggaactccacagcctcagcctcccaaagcttgaccaggcccagccatagctagtctaggaaaagagcaaatggccgtgtttttatattttgacttttgcatttcaatattaatttttttggtaatgtaatgcattcaaaacatggtccccccccccccaaaaaaaaaaaaaaagggcggccttaaaaggn

SEQ ID NO: 866 - DNA, 408 bp, Homo sapiens
gccgctgctgctggcgctcctgtcgttggctctttgccgagggcgtgtggtgagagtccccacagcgaccctggttcgagtggtgggcactgagctggtcatcccctgcaacgtcagtgactatgatggccccagcgagcaaaactttgactggagcttctcatctttggggagcagctttgtggagcttgcaagcacctgggaggtggggttcccagcacagcactggcctttcggaagcatcccagtagggttttctgaggctcgctggtgactcatgccctaattgcaatcctctgcttttatcttgactttgaaggatctaacactgctctctcttccaaaggggaaaaaaagattcatttgttttgagcaataaactaatacaaaatgaaaaaaaaaaaaaaa

SEQ ID NO: 867 - DNA, 3014 bp, Homo sapiens
  SITE (614): n equals a,t,g, or c
  SITE (619): n equals a,t,g, or c
  SITE (2968): n equals a,t,g, or c
  SITE (2989): n equals a,t,g, or c
  SITE (2998): n equals a,t,g, or c
cccacgcgtccgcccacgcgtccgccagtgttatcccggagatggattgatgtctccattgtatttaaaccaaaatgaactgatacttgttggaatgtatgtgaactaattgcaattatattagagcatattactgtagtgctgaatgagcaggggcattgcctgcaaggagaggagacccttggaattgttttgcacaggtgtgtctggtgaggagtttttcagtgtgtgtctcttccttccctttcttcctccttcccttattgtagtgccttatatgataatgtatggttaatagagtttacagtgagcttgccttaggatggaccagcaagcccccgtggaccctaagttgttcaccgggatttatcagaacaggattagtagctgtattgtgtaatgcattgttctcagtttccctgccaacattgaaaaataaaaacagcagcttttctcctttaccamcacctctacccctttccattttggattctcggctgagttctcacagaagcattttccccatgtggctctctcactgtgcgttgctaccttgcttctgtgagaattcaggaagcaggtgagaggagtcaagccaatattaaatatgcatnctttnaaagtatgtgcaatcacttttagaatgaatttttttttccttttcccatgtggcagtccttcctgcacatagttgacattcctagtaaaatatttgcttgttgaaaaaaacatgttaacagatgtgtttataccaaagagcctgttgtattgcttaccatgtccccatactatgaggagaagttttgtggtgccgctggtgacaaggaactcacagaaaggtttcttagctggtgaagaatatagagaaggaaccaaagcctgttgagtcattgaggcttttgaggtttcttttttaacagcttgtatagtcttggggcccttcaagctgtgaaattgtccttgtactctcagctcctgcatggatctgggtcaagtagaaggtactggggatggggacattcctgcccataaaggatttggggaaagaagattaatcctaaaatacaggtgtgttccatctgaattgaaaatgatatatttgagatataattttaggactggttctgtgtagatagagatggtgtcaaggaggtgcaggatggagatgggagatttcatggagcctggtcagccagctctgtaccaggttgaacaccgaggagctgtcaaagtatttggagtttcttcattgtaaggagtaagggcttccaagatggggcaggtagtccgtacagcctaccaggaacatgttgtgttttctttattttttaaaatcattatattgagttgtgttttcagcactatattggtcaagatagccaagcagtttgtataatttctgtcactagtgtcatacagttttctggtcaacatgtgtgatctttgtgtctcctttttgccaagcacattctgattttcttgttggaacacaggtctagtttctaaaggacaaattttttgttccttgtcttttttctgtaagggacaagatttgttgtttttgtaagaaatgagatgcaggaaagaaaaccaaatcccattcctgcaccccagtccaataagcagataccacttaagataggagtctaaactccacagaaaaggataataccaagagcttgtattgttaccttagtcacttgcctagcagtgtgtggctttaaaaactagagatttttcagtcttagtctgcaaactggcatttccgattttccagcataaaaatccacctgtgtctgctgaatgtgtatgtatgtgctcactgtggctttagattctgtccctggggttagccctgtkggccctgacaggaagggaggaagcctggtgaatttagtgagcagctggcctgggtcacagtgacctgacctcaaaccagcttaaggctttaagtcctctctcagaacttggcatttccaacttcttcctttccgggtgagagaagaagcggagaagggttcagtgtagccactctgggctcatagggacacttggtcactccagagtttttaatagctcccaggaggtgatattattttcagtgctcagctgaaataccaaccccaggaataagaactccatttcaaacagttctggccattctgagcctgcttttgtgattgctcatccattgtcctccactagaggggctaagcttgactgcccttagccaggcaagcacagtaatgtgtgttttgttcagcattattatgcaaaaattcactagttgagatggtttgttttaggataggaaatgaaattgcctctcagtgacaggagtggcccgagcctgcttcctattttgatttttttttttttttaactgatagatggtgcagcatgtctacatggttgtttgttgctaaactttatataatgtgtggtttcaattcagcttgaaaaataatctcactacatgtagcagtacattatatgtacattatatgtaatgttagtatttctgctttgaatccttgatattgcaatggaattcctactttattaaatgtatttgatatgctagttattgtgtgcgatttaaactttttttgctttctccctttttttggttgtgcgctttcttttacaacaagcctctagaaacagatagtttctgagaattactgagctatgtttgtaatgcagatgtacttagggagtatgtaaaataatcattttaacaaaagaaatagatatttaaaatttaatactaactatgggaaaagggtccattgtgtaaaacatagtttatctttggattcaatgtttgtctttggttttacaaagtagcttgtattttcagtattttctacataatatggtaaaatgtagagcaattgcaatgcatcaataaaatgggtaaattttctgaaaaaaaaaaaaaaaaaaaaaaaaaaaaaaaaaaaanaaaaaaaaaaaaaaaaaaaanaaaaaaaanaaaaaaaaaaaaaaaa

SEQ ID NO: 868 - DNA, 1572 bp, Homo sapiens
  SITE (1516): n equals a,t,g, or c
  SITE (1561): n equals a,t,g, or c
  SITE (1567): n equals a,t,g, or c
atgggggaacgtaattktragcgggatgcgctctctttagaatcgcgtcctcccaaatgctcccgccgtcccattaccggaatggggaccattcggctgctgcagataggactttctctcccattctttacttttttattagccaatcaaagtggcttccgaaagccatttgtgatttgtgaaaaatagtatctttcaaaatgctgagttgaagcatctcgctcattgctccttgaatttattattctaatctcaaccgtagagctggaataatgcagctattaagttggggggcaaattcgtttctctggattaaattttttttcctccccactccctcattgcatcagccaaggaaggtgcggacctgcaagagatctgggggtgggtgagagaggtagtgagcgtcctgaagggctccttgagggacccttggataggcgagtggtttggtctccccagtcttatcttccccagataagatgccctaatgactgcctgctggctgggaaagttaccccgcccaattagggagaattcaggacaggttgtgccacagtctagaagtaaaatttccggtgagctgcccgcagcgccgtcccattctccccgctgcccattgtgaaaagctgggccagcgcttccttgtcgtaatttttaactacctgttataaaatttatgggtgggtttgtgaaaagaaacgaggtccctgcatccggcctagggaactgcttttcttactatggaggaagtctggggaaggcatgaggtatcccctcttggtcagggwtgaggyacccaaccattgagattcccatgccagcttgatgcgggaccaagtggagagatgccggccttcaaatctcgagcccgtggggagagtgacctgcctgcaacccctcccccggcaaatagtctctatgggggaatttattctggactacccwamattaggggtctggaaaaacaggctgctcgaaattttagcacagawkgtgkaattcagggcagtaaaaggttattttttcaggcctcggtagtacatcccagctgcccagacattgaatcaggaaatttttctgagaaaggcaggtgggtatgggcaatctgacacgatccaaaaggcttactgccttgcacccctccccgcaaaaaggaagtagagaccaagatcttgggctttaattttatttttaattgtaaaaagatttcaaataagccaccatttgaactgggaagggaaactagggatggtcttgggggaaaatgtcattctctctaagaaagggaccccggggatgtgggtcgttttgagggtcctagaagttgaccccaattctcacctctcctgctgcactgcaggattgcccagggtaggtctagtcccctaggttcttcagaccactccaggtcaggtttggttgggtggctgccagtggtcttccactactgttcctgtctagggtggagtaggagctttcaggggtacggcatagaggggatgttgttctcttnacttaaaaaaaaaaaaaaaaaaaaaggggggcccccccaaggggncccaanttaac

SEQ ID NO: 869 - DNA, 1207 bp, Homo sapiens
  SITE (1206): n equals a,t,g, or c
tccagaatgagtgctatgacagccccaaagcattctggtgggtaagtgtaggttttgaacttgtccttgaaagatggggctttggataagcaaaggagagcagcaagggcattctaggtaggaggaatgatatggggaaaggtttggggataagaaaatacaaaatatttaggaaagatagcagatcacttttgacatagaagaacggaaaataggtcagaactttaatgcttctgatcaaagataattgacaatcttctagaattaaaatagaccatggtgtgattagcgggaaagaagtgactatggaactaatgaatgttaggaccagattgtggagagttttgagtgtcaggtttttgggattcatccacgttgttgtgtatgacctcctcccttgctgaggagtattctattgtaatacacacaatttatccatctgctctcctgttaattaattaacaagggtcatttccaggttagaggtattacacataataaagttactctaaatattcttgtataggtcttttttgtggttttacggtctcatttctcttgagttgatacctagaaatgaaagggtcatagcacaggtatatgtttagtttcataggaaactgccatacgatttcccaaaggagttgtaccattttacactccttccagcaatgtatgaattttggtttgggagcacatatatttaaatcaggaatctgaaagatcgatttcaccatagtgtaaatggatggagtggaaggaactgaaggtaaggggtcaatgcaggagtccacgcatgagctactaagggtctgcactcaagcggccacacagggtgagaaacgaatgagctattttgggagtgaaatttaagtgaaattctatagaaatagaggaatcaaagttatctcgatttcaagcttgagggaagcctctgttggcggaaaagatgggtttcttctggggtgtgtttacagtgaggggccatctcactggcaatgtggaagaggtcggatctagagaccaatctaaaagtcacctggctagagaagacaatcaaatccagaagttcatagaacaaaataaaggtgaacatagggcagctaaagcctaaacattttgtaattagaaagcagttagggtgtgttaaaaaaaaaaaaaaagggcggccgctctagaggatccaagcttacgtacgcgtgcatnc

SEQ ID NO: 870 - DNA, 839 bp, Homo sapiens
  SITE (833): n equals a,t,g, or c
ataaacatcttcattgtcagttctcaaaatgactgaaattgttttcatggtaaaagttaatatactaaagggttcctttttttttaatgtttacatttatctctatgtttacctttttagtcacattgacctgctggctgaatacctcaaatagtccagtagagggcagtccaccaggcagaaaaggttaggcgttttggtttcacatctttgctggggaataataggggaaatggctgtttttgctaatttttagctaatatctagccaggagagcaagcacataggacagactgaaagactgtaattttacacaatacacatggcttaattattttattgggatacagaaaaatataaattctggacaaataagtcatatacctgttttcagtcctaacatttaaggattcttgagtcccaatcacataactgtggtgttactctgtcatttatatggtgtcaaaagcacttgatgagtaaacccagtaacatctttttgagtgtttccataatgcattttccaacttgaaaacaataattgaaaaatagccttattgtatattttatgccatgactaaaagtgccatttttactgatgctattagactgataatttcttgaagtgaaatttaacctttttttctctttagtattatgtttataatgccatatttttagaaagcattccagatcaggcatggtggcttacacctgtaatcccagcactttggaaggctgaggtgtggggattgcgtgaagccacaagtttgagaccagcctggttagcaaggcaagatccccaactctacaaaaaaaaaaaaaaaaaaaanaaaaaa

SEQ ID NO: 871 - DNA, 1332 bp, Homo sapiens
taatctatgactttttggtacaagaacaatggaaaaagtgaattaaggtaatgaacaaaacctttcacccacttaaacattttccagttttgagattcctcttcgtgtttgtggtgtcttccccttgttaccccttctgccctttttctctgactatggtaatttggtctttaggctcatatcagtctccccgagacattctgcagtcattatcacctttttgggtggattttattttgttttattttgttttttttaaaaaaataactttttaacattggtgcatatttgcttgggatagagcttgtgtaatttaccaatcgtattgattgtaagtgattgtgccctgcagaggtatatttaacaagacaaaaataatcttgggtaataaaggagcccatgagatttgagtcaggttgtaagtgaaatcacttacacttttggatagaatttatactcctgctcttataaatcagtggtagacttaccattttttaaagttttcttgcatttttttgtttttttattgccacagctccctattctttcttgcctgcctccacccccctgttcaggaaaaaaaaaaattgagccttaaagtgacagctgattttttaattgctgaattttgtgaaattttactttttccaagtgtttccaactttaaaaagagaagtgaagacaaataggttggaatggtgaagacaaatgggttggaatttcacaggctgtgaataattccttaggatctggcaaaccgtgaagtcttatttgaagaccttatctcctgagagttcttttggagtaggaaaaagaacctatttgaaatagaccgtttttctcttgtttttaatctgtttaatatttctgatttttaagcagctttcaaaacaagtgtggtggaaaaaaagaaatagtagtaggaagatgtttagggcagcagaactctgggtctaaataagtacatgttcccacttgttgccgatttttgagagtactagggccatctttctcaattttgtattatttgtgtgcatgtttatatcaaagatgcccattttgttaaaatgctatttcctttattaccttggaaactgactcagcctcatgttgctcctaattagtgtttaaggctcccatgagttgcagataaaatgatttattttaacaagtagaaggaggtgattcaccttttggattgtaaatatatgaaaatgtctacaaggtctttatctgctttctgtcagcatttatattaaatgataaattaatgaggaaaaaaaaaaaaaaaaaaaaaaaaaaaaaaaaaaaaaaaaaaaaaaaaaaaaaaaa

SEQ ID NO: 872 - DNA, 1978 bp, Homo sapiens
ggcacgaggagagagttgaaggagctgagacacttgcctatctgattgaaccagatgttgagctacagagaatcgctagcataactgatcacctcattgccatgcttgctgattatttcaagtatcccagctcagtgagtgccatcactgatattaaaaggcttgatcatgatttaaaacatgctcacgaactccgccaggctgcattcaagctctatgcctctcttggagcaaatgatgaagacatccggaagaaggtgagtctgggagaggggcgtcccccagtcctgacagccagcaggcagggagtgacgtcaacctgaaagtcgtggtgaagagcactaacagtgactgtttgaatataataaagcagagtgactaaaggcataattgaagaatgaatgggacccggatttggggggttgtttgtttgtttttagaacatagagtggcatggccgtgctggaatgacaaataactggcgtgctttttttttgtgtcattaatatgaattattatgttgcacatttttgcatgtgttctgataaaaatcaattctagcactgtgaagcttcagacaccttgaaagtcctaacattagaattgtaaatgttatttatggaaataccttccaatgctattgagaaattcaaatctctattgtatattgttctttgatatgtggcttagttttatgttttgattttttttgctactgtgcaagtttaatgtgaataaaatctttgtggaatgatgattttatgtttagtgagtggtcatctgaattttccagctccccagaaaatgtatgcactggtatagcacccttatgttactaaagcctagtctaacactgaactcatgttcttgatgagaatacttctagatgaggagtatagtggtaagtaagctctgacttggctccttccacaaaccaaaaagctggaacttaccactcaaaaacatgtataacctaataaattctacacaaggctttcaagaccatcagagagcaaaaccacatgttctgtcttgaggagccatagcagaaagagcaaattagtcattatttactgaacatgatgatttactaaatctctccatctgcattagtattttaaggagcactgtgagagaaatcacaaagtattagagtttaccatgattcagagaagttcttcagscctgtagaaagaggagtatggaacaaccttacatttgttgaaatwacttgaaaaggaaccawttcttgaagaaactgaagtaatagcaataagatttgatgtgtgagtagctttgatttaaaatcaatgcaaaaagcacaactaataaattgaatgtttccatgtacctcactttatttcagttamcaagatactttgacttgaagtgtttttagtgtatccctatgaaaatcatttttggtacatctaagttttcacttataaactgttatttcaaagcaaacatactagtgatatatatatgatttatggatgttgacgccaatgttcagtttgggtacgtkggtgtattgcaaggggagaggcttttataacaatagatttgaacatttttaaaaaattggactgtgtaacttaaatacacaattatttggtttaggatggttattagggcccattagaaacaggagaagtattttacccattcttaaagctctaaaaaaccatctcatggactgaaaggtagatagacagatggaccacaatgggaaataggatgtccatttgtacttctttgtacttttttgttaataaactgttttggaattaatggcttaatttgtgatatcatgttctagaaatacctgcaacatgacagtctaatcagtagtctattaaaacttgtattcataatgtgtataatttcctggtaaggctaactcctgatcgtttctgtagaaagatgacaaataaagaaaaagttataattaaaaaaaaaaaaaaagggcggccgc

SEQ ID NO: 873 - DNA, 626 bp, Homo sapiens
  SITE (617): n equals a,t,g, or c
  SITE (618): n equals a,t,g, or c
ccacgcgtccgcttcactaggattgtcttatcacctttattagataaatcatgaagtgtccctgtgaaattgaagtgaaactatctctgtaggacttaagagaatagctaaaaggtgtgacttgccttattgaactgatactggcatatctgactgtaagcagtaggttgaagatatcattttatgaatgtggagaattctacattgaaacagaaaatacctgggaatgaagattaaaaatgtagctgctgttatttgcttggtgattcccctcttgctcttctttagtttgaaaaaacaaaaacgtggccttggaattttcattttgatgcagaaattttgaaattgaaaatgtgcatgttttggtgcacaaaatccttctgtgggcaaaactttgtttttgttttgcacagtaagaaacaataggcaagcgttatgtttttggtaagttaactatgaaagctttcttatttttattattaaaaatgtaacaatttaacccacaggaaaaaaaattactttgtatgcttgtttgaaccctatgggttcgttttattaataaaattattacactaaaaaaaaaaaaaaaaaaaaaaaaaaaaaaaaaaaaaaaaaannaaaaaagg

SEQ ID NO: 874 - DNA, 1882 bp, Homo sapiens
  SITE (1270): n equals a,t,g, or c
aaaactataaagattttttaaaagctctgtctcagctagaatttttaagattataactgaacagtatagcccttttagttgtttgaaaattacataatgattcaaaagcttgtttcactgcctttcccagcactaagaaaattaacaatcatttcttttaatwtccttgaatcagagccattctaaagtgactctggaccagcaattctgagctatgatttcatgatacatgtattaatatctaaatgagttgtgagttgacataagaaccatagttccataataattatcttcaaatcaatggatatcttaaatgtgtttttttcttccttagagattattattaaactgatgtatttgataataaagaattttaggactgagaaagttaagtttttcttaccaataataagatattgaaatatataaattataaaacagaaataaaatgaaataaaggaggttatccctaaagtcatttaccttagtcacttgcaattaaatatggktacttcggragragaagtktggccctaaagctactgtaacatgaatcatgccctaatgtgcactatatatgaactactttggtcagaaggcagcggcgggtaaggatggcttcctctcacagtgcttcttaggctatccatttaccaaggaattctaatctctttctctcacttcaccaggaaaggagggagtttaagatatagaactgggcatgctagcctcttttttcccttttgtggatttgtcataactgcagagaaccgatgttgtggtctcttgccagctacattgtgaaccttgcagtgaaagttctttgcctctgcaaagggagatttgtgcttgtgcagaactgcccatgccttagtaagcaggtctgtctaattctaagttcaatatctggtggctattgttggcataaacttaaagtacatcctctaacctagcctttttcagcagtaaacttaaaatattgaatctccatctgtctgtgtctcaagtggttcagaggtcaggagaggagarggacattawtttatgactccctccaaactttaacaagactagtgcagatwawatttcgaagtaagcatgagrtatattaaaaaccacatgtgggaatycttycctaattttagaggttttttttaaataatggaaattctattgaaattgagtagtgttaattacaaggcaacaggtaaacatttgttcaggatatttaaaaggtctgctgagttggaattgtgacagaccacattgntgactctagattgaawtggaagggaagaatgtgaaatgaattaggatatcctctgttcacctctattaactttcttaaatgagtataacttagaaataataaaatgcaagtattttaacgttatagttgggagagttttgacaaatgtaaacacccacttcaccaccactaccatcctgatatagtgtgtgtccatcacccaaaaagttctctaaagcccttttgcagttggttcccctccacctgaacagccatccctagtcaactacttttctgctttctgtggctatacgttagatttgacttcagaattctagagtttgaaataaataggccatataatatgcactctttttgtgtctgactttttttttgcttaacatgatgcttttgaaacccatccatgttgagattcatccatgttatcatgtgtatcaataataagttcctttttattgctgaatagtattctagtatatagatataccacaatttgtttagctgttcacctattgatggacatttaggttgtttcaagttttgatctattatgaataaagctgctatatatataaatcacaaaaaaaaaaaaaaaaaaaaaagggcggccgc

SEQ ID NO: 875 - DNA, 820 bp, Homo sapiens
cccgggtcgacccacgcgtccgaacaacgatatggcaggagccagtcttggggcccgcttctaccggcagatcaaaagacatccggggatcatcccgatgatcggcttaatctgcctgggcatgggcagcgctgcgctttacttgctgcgactcgcccttcgcagccccgacgtctgctgggacagaaagaacaacccggagccctggaaccgcctgagccccaatgaccaatacaagttccttgcagtttccactgactataagaagctgaagaaggaccggccagacttctaagccaggctgggctgccagtgccatgcaagccacagccagccagcccatccacttcttccactcctccccgcaggccccaaggcatcactccggccaccctgtcccgctactgcttacacaggccgggttcccacgcagaggggaggctgctccacccctactctcctcccttgctcccagcagcggaagcgcctctgacccttggcttgagtcccacgtgggggaggaggaggcaggcagcaccagcagggcctgcccaggctggggcacctttgcctcctgaggcgcagcgcactcctcccctgcccaagcctactgcctcccgctgccgccagtaccccctccagccccacacctgggcctccccctgccactcccctcccttgctcccctctgtccccagggatcaaacagaagcagccgtgggcaaaatacaatttcatttaacaaaaaaaaaaaaaaaaaaaaaaaaaaaaaaaaaaaaaaaaaaaaaaaaaaaaaaaaaaaaaaaaagggcggccgctc

SEQ ID NO: 876 - DNA, 2485 bp, Homo sapiens
  SITE (2479): n equals a,t,g, or c
gatttacacagcatcatgtattgaatattgatttctcctttttcatagcattgaaaaggtgattatatatgtgttggtctagttctgtgctattttttttccactggcctgtttgtctatcctttgtttactaccaccaagctataactcttgatagctggtaatgaagtcttccaattttgttcaccctcaagattgtcttctggcttttcgtatttccaaataaattgtaaaattgatttgccatttttcacacacacaccccttgctggtttcttgattgggattgcattaagtcttttgatgatttgagaattgacatccttacagtattgagtattctaacctgtgaatatggtagaaaccattgtgtattcagttatttgatttctttcagttatgttttataattttctgtgtagaggtcttgtatatgtttcattagatttattctttggtatttgttttttgatactattataaatggtattgttttaaatttttattttctaattatagcaacttgtatgtagagtcatgtgccactttatgatggggatatgagaaatgcattgttaggcagtttcatcatgcaaacatcatagagtgtacttacgcaaatcatgcaaacatcatagagtgtacttacacaaacctaaatggtacatgctgctacacaccttagctgtatgatatagccagttgctcctagactgcaaacctatacagcatgttactctactgaataccgtaagcagttgtgacacaatgatgagtatttgggtatctaaacatatctaagcatttttaaaatgtacagtaaaaatgtaaaaagtaaaacatggtacacctgtttagggcacttaccgtgaatggagcttgcaagactagaagttgctctggaagaatcagtgaatgagtgaatkcttaggacatcactatacactactgtagactttataaacactgcacacttaggctacactaaatttatttttaaaataaagtaattgcaatatgatgttatgacagctatgatgccactaggcagcagaaattcctgagctccattataatcttataagaccaccgttgtatatgtgatccttcgttatgtgggacatgactcgatataaaatggattgttatattgaccttttatctgatgacttaactaaatttacttattaattttactagttatctatagtctcatttttcctgtgtacacaattaatttatttgtaaatactaaatgtttccttttttcattactcatatatttttttcttgccttactacactgcctagtaaaatatataaaatatgtgcttcacggaaaggggactttgattaaggacatgcctccttcagagctttttcttttccccctagtatttccaacttggggatgtttggcatcgacgaatttactgcagtgattaaccctcctcaggcctgcattttggcggttgggaggttccgacctgtgctgaagctcactgaggatgaagagggaaatgccaaactgcagcagcgccagctcataacagtcacaatgtcaagtgacagtcgagtggttgatgacgaactggcaaccaggtttcttaaaagttttaaagcaaacctagagaatcctatccgacttgcctagtcctcaaagataagaagttggtgttcagcttagttgattcagtagttgttaccaagaaacatatgttataggaaaacaacttggtatttaagtatgaagtggatgaaatgtttatttatttaaggtgaaagcatttgacccagggtgtcttcatcttcaatttgggtttaatgttatagaaataaatgatgataaactctaactaataaaggaaagagaatatttggttactcagatccatttttaacctctggtgctgtataaagggaatattaaactagatgtaaatcaaagtatatgtttggctcatttgagcattttggaatatttgagaatgtatgatacatgtaaaattaaaaaaactattagaactgtaccataattatgttgaaggtagaagtgatcttcaaagagatggccattaacttagcagtgggacctcacttttacaagcactgctctagatatacttgaagaatttaatakgtacagaagtttattctggataataaataaataaggatcacactgtattaggggttatggcaacattattgaattttttatgtacataaagccatatgtttagggtggtttctatctgtcttgtttttcacttatataacactgtgaacttctaaagmaagaggataaaagaagcatgaatgaaaagaatgacatttcaaaaaaatggttcaatgaaaaactatagctaaaatatgtaaacctttctaggtaaaccgcttgccttcatcttgagtcggaatatatttaaataaattgtgttatctcttgccaaaaaaaaaaaaaaaaaaaaaaaaaaangggggg

SEQ ID NO: 877 - DNA, 1793 bp, Homo sapiens
ccacgcgtccgatttgtccctattgttctatttttaaataaatatacaatcattgttttgcattgaaatgcatatttgtacattttatttgataatattattttgggaaattgtaatctgttgttttgtttgtttgttaagggaagcacgaagaagaatttacaaatgtgaataaaattgtttaagattaccaatagtttcttttctggacttgaaatagttacgtttctaaatatgagaaaaataactttgcctaaaatttcagtataatgaccaggtcttctctccattttagagaagcagtccaatgtggaacagataagacggcagcgatccagtgaggtcaattccccacagaggaaagctatgcatacctaacttaatggaaggtaaacttctcttcaattaatgatgtcctccttttctcaaggtgtccaaagacaggaggtggtctgtaaaaggttggatgacaactccattgtccagaacaattactgtgatcctgacagtaagccacctgaaaatcaaagagcctgcaacactgagccctgcccacctgagtggttcattggggattggttggaatgcagcaagacttgtgatggtgggatgcgcacaagggcagtgctctgcatcaggaagatcggaccttctgaggaggagacgctggactacagtggttgtttaacacaccggcctgtcgaaaaagagccctgcaacaaccagtcatgtccaccacagtgggtggctttggactggtctgagtgtactccaaaatgtggtccaggattcaagcatcggattgttctgtgcaagagcagtgacctttctaagacattcccagctgcacaatgtccagaggaaagcaaacctcctgtccgcatccgctgcagtttgggccgctgccctcctcctcgctgggtcacaggagactggggccagtgttctgctcagtgtggccttggacagcaccttggctgatgctggaagaggagggcagtcagtgtcacttctgggatgtgccccagcactgagaacaaaatgcaggcatcccccggggcagcatcagagtgcctttctagagggagccacgcacagaatgtaacaggatgaaacagtttcaagtaagccttgaattgaaacctgagtaggttaaaacaattctatttcatagcacatcacaatactgctgctactctgtagccacccccatggctacatgatgccctattcctaaataataacaatagcattgtcagtggaggctgggccaccatggcagaccttccaaaagtagtgagctacatagactacttagggaaccccagggaaactggtaccctacacctgggagcagtatctgccactgggataaagtcctactaaaaaaggaacggtaaatgtaccctaatgattaaaccccgtgagatacatatgatttccaaatagtccatttcattaggaacttttttgtttgaatgaatgtcacataggtatcctcagtaacacagaacgaaattacctttgtattattgtgattagttgttgcttattattttatactcagtaataatgtggtacactgttaatttttttgcttttgtaaattatattctaatttattgccatgtttcctaacacttgtcctacattcattctcctgcttgtaatgaaaatgaaaaaatcattgtaacacttgatggagtgaaattccacgccaggcacagaatttttttgacatagataatttagtaaaataaaaattcagcttataataaaaaaaaaaaaaaaaa

SEQ ID NO: 878 - DNA, 1005 bp, Homo sapiens
ggcagagccagattaccctttcttaataaatatctcagggtaaggaaagaaagaaactgtatagatatatttaaaatagagaatactttccaagcaatacatgatacttttcctaaaagactctaaaagaaaaagattctgtaactctcttttagcaccaaattattgtttatcttgctggatattttatatgaacagtgttaatttagatgcactaaagcaaaggtaggcaaactacaaccatgagtcaaacatggccacacccattcatttgctattgtctaagctggttttgcactacaactgcagagttgaatagatgcagcagatcctttacagaaaaagttttctgacctcaattctaaagtaattgtagtagggagctggaggactttctttccctttatggtaattttttgagctacaaaagagccttgcagaaatgggtgaagggattaatcttttaaaaataaatrctatatattaggaaaataaaaaatattttagagccaagttaacaagtacttcagcaaaacatgctagttttatgcaggggattctgtattccaaatggatacaatccgacatatataaaagaaacagattcttaactattgactcttatttagcaaatgcaacagacaagaatatccaacttgatatttataaaaggtagactttttccaaaagtgtataagctcaaagaaaaaatgcaacctgtcaattaatatatactatgtaatatatattattgtgtatttatgattagccatcataaatgcccattgcttggcctttaagaataatcacaaaatatttatattaaattatacaaatttgttgcagaagtgcctgtgagagaaatcttcaaaagacaaacctggtcaaataataataattttaatgtcaatgattttttttgtctgactcatctgagttatatttagttttcaagtggcaataaatttatctaccttcwwwaaaaaaaaaaaaaaaagggcggcc

SEQ ID NO: 879 - DNA, 384 bp, Homo sapiens
gacccacgcgtccggcaagaagctagagagtgacttaggatacagtgtaaatatattagtaaattaagacagttctgcaagatttttaggacttctatttttcttctattcatcatttatgaagtattcttgctagaaatagtttatgtctctctatcttgctgagtgatgaatactcggccaggatgctaaaatgtggtttcatgaagtatgttgtgtttctgtctgttcttgtttccttccttgaaatgtgtaaaagtgaaaaacatactaatcataaatcaggtattcatcataagcctaaaaaaaaaaaaaaaaaaaaaaaaaaaaaaaaaaaaaaaaaaaaaaaaaaaaaaaaaaaaaaaaaaaaaaaaaaaaaaaaaa

SEQ ID NO: 880 - DNA, 548 bp, Homo sapiens
  SITE (537): n equals a,t,g, or c
  SITE (539): n equals a,t,g, or c
cagggctggatcattccttgttcataattctttatattatttagtgtgtgtgtgtgtggggttgcatttaggatagtcagtagcatcctggcctctagcctacagagaccagtagcatctcccatcatgacaaccacrmatgtccgccagacattgccaaatgtcctctggggacacagttgcctccagttgagaagcactagtttaaatttagaaaacaaattgggaaggatatataacaaattcgtaacagtaccctttgggatatgggattggaggaatggctttcactcctcttttaacataaaatttttaaaactggattttgcctccccctacagacattttttttttattttcaactgtggttttttttcccattttataaaaagattaaccttgaaaggtaatatcacatttcaattttagtcattatggattttactgtggaaggcagttctatacacctatggctgcttttcaacctagttttattggattttgtttgacattgkgaatgkccyttttcccaaagangnggatagaca

SEQ ID NO: 881 - DNA, 499 bp, Homo sapiens
cccacgcgtccgctctagcaagtcacagcagtttagggttgacatagcagagttcaaatgtctgacttttctcactgttgtgtacttgttggccaggatgcctcatttgactttgtctcacccatagtcattttcagatccaatggcccagtggcattctggcagctcttttctattcttcattcttggttggaacctgaaggtagtatgctcctctggctttggtctaatatttgaggccactctgccttcctagtatttgtataatatggccccttaagcccctaccgtgatggctaggaagtgggagtgaaagttaaggctcttgggatggtgggaggaaagacaattgatttatttttgagcacgtatccaaaataaataaataatatatttataaacataaatgtatatgtctatgtgtgtatgtatgcatttatgtatgtattatatataaaatgatttatataaaaaaaaaaaaaaaaaaaaaaaaaaaaaa

SEQ ID NO: 882 - DNA, 1289 bp, Homo sapiens
  SITE (433): n equals a,t,g, or c
  SITE (538): n equals a,t,g, or c
  SITE (598): n equals a,t,g, or c
  SITE (629): n equals a,t,g, or c
  SITE (710): n equals a,t,g, or c
  SITE (1177): n equals a,t,g, or c
caagcgcgcaattaaccctcactaaagggaacaaaagctgggtacgggccccccctcgagttttttttttttttttttgtatttatctagctaaactttttgttttgcaattaacctaaatgctcttcttcaatttattttgttatctaggctcagtattaatttcaggtcagattttcactgttttaagccaaaatatcacaaaacgcagagtaacaacaacatgatctttaaaataagtttaaagagggtgtagccagaatctcccttactcctgatgtttcttagtaattttcttagtaatttactgactttctaatctgctccttggctattaattcccacttgcccatgctgttgaacccaatctctctcagacattgcaaaatcccattgtagtggtccctatacctagaacgattgaataattttnctttaacaaatctcatcatccagatacacctgttgatgtgtaaaatattacacaaacaaaaatcaaaaatttcaagtaaaaagtaaacccaaacattaaaggaanggctaaaataagaagttcttctctctaaactcagtctaaccatcctttccccaaggtaancattgttttcctgacccttccaaataaatgngtatgaaatccggycctggaatttgcactaaaagamtggtactatatacaccattcagcaacttggytttccycatttaanggawatayctwatagaccttycwawayctgcacatacagacccacytcttccggtttcatagaagtgacataattcaactagtyccycattgatgwakgtcctgcttttttycctattgcaaataatactgcaatatcattgtgtgtatgtattatgcatgtatgttcatcttggcaaactttgaaaatatatccttatagtaaattacatgcatttagaagttttgatgcaagtggagaattgccattcacaatgttcccatcaatttatatatccataaaaattgtatgaaagtacccttttgcttatatcctagacaacattggtatcaaaacgtttttattctgaaagacaaaaaaggaagaaaagatataaaactgtttttatttgtgtttctttttttttttaacaacagaaacataacactttcccaggggagttgtcgatacatttcccactatcctcnagactagttctctcctcgtgccgaattcctgcagcccgggggatccactagttctagagcggccgccaccgcggtggagctccaattcgccctatagtgagtcgtattaccc

SEQ ID NO: 883 - DNA, 1182 bp, Homo sapiens
ttttttttttttttttttcagctttccaacatttattccatggaatgagtgcacagcattttcatgaactacctcagggctacatcagtacaaaatagtttaaattagtaaaataaagtagtttcaaagggaaatcattgacgacttcaggataagtgccaccaccatttgggaacagaggatagaaggtagccatgtggttattccatgatgcaggaatcaggtcggcaggtggactgtcattgctgtcttgcggcagctggcctctgccttcagggtaccaccgtctccaggacacaaatgggcagcagaaaaatgtcaccttgttgatttcttcaaagaggttgggtgacacctcaccattccatatgaacatgtacccctcaggaaggccagccaccagctccagcagctcaatgtcaaacactaatacggcactgccgggcacttctccatccacgccagcttccccatagcccaggtgaggcggaatgatcactgtccgtttctcgccaacgcacatctctctgagacccatgtccatccccaacacaacttgcccagatcccagaacaatattgtaagttttgcctaaattccacgtggagtccagcagggtcccatccagaagtgaggcattgtagtgatatttgaggtaatctcccttcttactcagcactgagcagtcagggggtttgtagtgggaggtgatgctgatggagtccgaagggttgtggaagtcgatcacatggatgtcaaacaccagcacagccgagccggggatattccctcttccttcctctccataccccaggtgaggcgggaccacaatccttcgcttttctccaatgcaaacaccaagtagaccttcatccatcccaggaatcacgtagccctgcccaatgtacgtgtcaaacgtgcggttccgagagtagctggaatcaaagagggtgccatccagaagcgtgccattgtaatgatacctgagaaagtccccactttgacttatccgctcacagttttcaggtactaccttgttctcaatggaaatgctgtccttggggttatggaggtccaataatgcaacatcaaacaccagagatgcctgaccgggaatgtctttcccatctccatcctctccataggccagaaaaggaggaatggtgatgatgcgctcgtgcc

SEQ ID NO: 884 - DNA, 1648 bp, Homo sapiens
ggcacgagttgcgttctacatccaactccaagaggaagtcacctcatgtgtcaccagcagaagggctgaagtgacaggatgttcattgacctgtcagtggatctgaaagttctctaaggagagcctgggcaagcattcttaggttgatgctggggcccagagtagcagtgagcatcctgtgtgaagatggcatttctcactgattattggaaaagcactagaagagccacgtgctggagccattgtccagccttgccctggaggagcagtgtctggctttgtccctagattggtccactgggaaaactggaagggctgtggagaccgtctctcaggacttgtttgggaaccagaagaggctgacgaataacattctgccgggcttcttcatgggttccctgtgtctagggccggggaccagcccttgaagatcatcagcagtgactccacagggcagctccacctcctgatggtgaatgagacgaggcccaggctgcagaaagtggcctcatggcaggcacatcaattcgaggcctggattgctgctttcaattactggcatccagaaattgtgtattcagggggcgacgatggccttctgaggggctgggacaccagggtacccggcaaatttctcttcaccagcaaaagacacaccatgggtgtgtgcagcatccagagcagccctcatcgggagcacatcctggccacgggaagctatgatgaacacatcctactgtgggacacacgaaacatgaagcagcgttggcagatacgcctgtgcagggtggggtatggagaatcaagtggcaccctttccaccaccacctgctcctggccgcctgcatgcacagtggctttaagatcctcaactgccaaaaggcaatggaggagaggcaggaggcgacggtcctgacatctcacacattgcccgactcgctggtgtatggagccgactggtcctggctgctcttccgttctctgcagcgggccccctcgtggtcctttcctagcaacctaggaaccaagacggcagacctgaagggtgcaagcgagttgccaacaccctgtcatgaatgcagagaggataacgatggggagggccatgccagaccccagagtggaatgaagccactcacagagggcatgaggaagaatggcacctggctgcaggctacagcagccaccacacgtgactgtggcgtgaacccagaagaagcagactcagccttcagcctcctggccacctgctccttctatgaccatgcgctccacctctgggagtgggaggggaactgagcttgaaatcatgaagccccttcccacaaggaaaccaggagggagactgcgagtgagtgcccgggaccacctcatcagagatgcttactgcagccctgcaggtgcctgtgcactgatggaatccacagtgtagtcagaaaagctgttgacttctcttaaatcagcttccctgctgggcccctgaaagtggactgggtgattctgtctggcagagagtggggaaaagacgcggtttccagcttgcagatttgttaagtttctcaggcagattttgactttcagcctttcatacttgtttaagcaactatttgtattaaatgaagttttttgaaaaaaaaaaaaaaaaaaa

SEQ ID NO: 885 - DNA, 1058 bp, Homo sapiens
ggcacgagtgatgatgcacggaggaccccctacccaccctggaatgactatgtcagcacagagccccacaatgttaaattctgtagatcccaatgttggcggacaggttatggacattcatgcccaatagtataagggaactcaagggaaaaggaaacacacgcaaaaactattttaagactttctgaactttgaccagatgttgacacttaatatgaaattccagacagctgtgattattttttacttttgtcatttttcatcaagcaacagaggaccaatgcaacaagaacacaaatgtgaaatcatgggctgactgagacaattctgtccatgtaaagatcctctggaaaaagactccgagagttataactactgtagtataaatataggaactaagttaaacttgtacatttctgttgatcacgccgttatgttgcctcaaatagttttagaagagaaaaaaaaatatatccttgttttccacactatgtgtgttgttcccaaaagaatgactgttttggttcatcagtgaattcaccatccaggagagactgtggtatatattttaaacctgttgggccaatgagaaaagaaccacactggagatcatgatgaacttttggctgaacctcatcactcgaactccagcttcaagaatgtgttttcatgcccggcctttgttcctccataaatgtgtcctttagtttcaaacagatctttatagttcgtgcttcataagccaattcttattattatttttgggggactcttcttcaaagagcttgccaatgaagatttaaagacagagcaggagcttcttccaggagttctgagccttggttgtggacaaaacaatcttaagttgggcagctttcctcaacacaaaaaaagttattaatggtcattgaaccataactaggactttatcagaaactcaaagcttgggggataaaaaggagcaagagaatactgtaacaaacttcgtacagagttcggtctattaattgtttcatgttagatattctatgtgtttacctcaattgaaaaaaaaaaaa

SEQ ID NO: 886 - DNA, 1332 bp, Homo sapiens
ggcttcctgtctgccatttcttcctgcagtgttctgcccagaatgcctgcccttctgttactccatgtggaaatgctctacatttttaaacttaatttccttcattaatctttctctaatctgaggaggatataactctgtcctttgaatacccctgtagaacatcatgcctctcttagggcctttctctggctctgcattgtcttatgaaattctatcttacacctccctttttggattgagctcctgaaggcaaggactgtcttactcacattatcttcatcatggtgccttgcacctagatgctcaagaaatatttgtatgattgaattaaagttgaaagttgcagtcaatctttttgaagattattctggcaacagtgtgtatcagagaataaagagcctgaaatcagaaagtacaaatagcagaaggtcttgggggatggtgcccagtaagaacaggaaagatcagaagagtcaggaacttactgcatatgggggaggaggtaataatggtctaaggcgcgtggatcctcaaggcttagakaactgagamgccmgcaggaaataaaactgtagcacagttgggttattgccattttggtgacagtttcatgtgtttttttttttttttcctgtgtgagtgtgattttgctcaacatgagtttggtaactgggatcagaaaggttttgttccttggtacattttacagaatggttgctaagccaacagaactcagaattgagttcaaatcccagctatcccacttattctctgggggtttggggtaagtctcttagatgctgtaaaatttaagttcctcagtaatgaaatgggggcacaaatagaacctccctcagagtcgtagtgaaagtcgaataaggcagcagtgattgagctcttattatgcactaggcactgttctaagcacttgaacttacttaaccttcatagcatctccatgaggcaagtggtggtgttgccatcacaatacgtgtgaagagaaaggaggcagagagattatgatgacttgcccaaagaacacagagttcacactgaattggaactggaacttgggcagtgtggttgcagagcacccagtcttagctgctgtgctgtttctgactcagtatctgtcacatagtaaacattccattagaatcagggacagactggaaatttttcaaccatttaaaaatgtagaaactatggggcatggtagtccatgtctgtgatcccatgggaagatcgcttgaggctgggagtttgagagcagcctgggaaccatagcaagtcccctcctctaccaaaaaaaaaaaaaaaaaactcgag

SEQ ID NO: 887 - DNA, 2010 bp, Homo sapiens
gcacgagtagaagtcaatcctaaggtttctctgctctggctaagaggatgtaaatttggattcttagagggcatggcacccccagtccctgcccagataaagtagcacagtggcaggcagcacctctgtctgttgctgacgttggggggcttacacacccacctcatctccgtgcacagccatgactggccctgccggcagctggggtgcaggtaagggtctctctcatagaggggagctgcagctgagaactggcgaggccccttcctccaaggccctagctggcccccgggtgaacctgaggtggcaggttcaggttttcaagatggtgaggtctcgctgtctgctggacagtacgttaggctctcagaactcatgggtgtggagctggacctgtcccgggccagtggacccctgtgtgtgggggatttggggtgctgtgggcctggttatgcactggcagatggaccttgctttggtccagctcttttccttaccctggctctgacgtgggaaggcttggagggcccgtctcatcacccccgttcgccctcagctgtccctttcccttgtcgcctggccgctgcctcgcccgcctgaggcctcctagcaggcagcctgggtgtgagttgagcctctctcttttccctctggtgggaaagtggcctttccctcaacacctgctccccggccccagaggaacccacctgttttggagctcagcttggcccagcgtttccttggggaagggaaaggagggctggacagcactgatccgggcaggcagcgtgtgcagcagtggccagccagagtgccaaagatgcacggggatgtggtgtgtggctccgggccctcgacatctctgctttgggggatttttaccttgtctgcacacttgtcaggggagaggggacagcaaggtgggaggttgaagagctttgaggctcagcagcatgtttgtggcattcggtggacaccatggccttgggcggctggacaggtttttgtgatgtgaaggacatgcatggggcacatggtaagcttggcaagggctccaggaacgctgacgaagggttttaggacccccacccccatgcctgtaccagggctggcctccagagcgggtgaggacagagcagctgtgggcttttcattctgaggtcttggcccccctggccaccgcaagggactctttgcttgtcagggcttgcaaaaaccaaccttcgagaaagaaaagggaactcttcacgttgaatgttgactttgtgtgtatgcgtgtgtgtgtgtgtgtgcacgcgcgcgtgtgcgtgtttacttcatggaattttgttttgtgaaattcccctccaatcgtgtcagaatttacctccatgccccagtcacactgttggttctgcgctctgaacctgggtgtagctcatttgaaggactctcttctgcgtttcctaacagttatttggtggtctcaagagttgaggttgtggagggttgggagaaactgaagttctatacatttccatagagtttacatcctgcagttaaaaggcagggagggctcagcccgggccccacagctccaggccatccctacgggctgcccacagtgcccccttttctctagccgaatctttttcgaacagcccgggaaaggaaaacggattcacttgctgattttgttcacggcggaagcaccatgttccgttcctttttcaggttcagtttgttgtgtaaatggcggttttttctggtgtgagctttggtgatggtggcagggctcctttgaagagatggttccacctcgtggtctgaagaacaaaccagagaagagtctggtttggccagaggccccctccggcccacgtcaccctgagtacacccctctgattgctctgctgtcaagaagcacgtttccaccagctgtattcaacactacaatgcattttttaaactatatttgcatccaagacaataaagacaccttattttttttgaaaaaaaaaaaaaaaaaaa

SEQ ID NO: 888 - DNA, 2059 bp, Homo sapiens
gcacgagtagaagtcaatcctaaggtttctctgctctggctaagaggatgtaaatttggattcttagagggcatggcacccccagtccctgcccagataaagtagcacagtggcaggcagcacctctgtctgttgctgacgttggggggcttacacacccacctcatctccgtgcacagccatgactggccctgccggcagctggggtgcaggtaagggtctctctcatagaggggagctgcagctgagaactggcgaggccccttcctccaaggccctagctggcccccgggtgaacctgaggtggcaggttcaggttttcaagatggtgaggtctcgctgtctgctggacagtacgttaggctctcagaactcatgggtgtggagctggrcctgtcccgggccagtggacccctgtgtgtgggggatttggggtgctgtgggcctggttatgcactggcagatggaccttgctttggtccagctcttttccttaccctggctctgacgtgggaaggcttggagggcccgtctcatcacccccgttcgccctcagctgtccctttcccttgtcgcctggccgctgcctcgcccgcctgaggcctcctagcaggcagcctgggtgtgagttgagcctctctcttttccctctggtgggaaagtggcctttccctcaacacctgctccccggccccagaggaacccacctgttttggagctcagcttggcccagcgtttccttggggaagggaaaggagggctggacagcactgatccgggcaggcagcgtgtgcagcagtggccagccagagtgccaaagatgcacggggatgtggtgtgtggctccgggccctcgacatctctgctttgggggatttttaccttgtctgcacacttgtcaggggagaggggacagcaaggtgggaggttgaagagctttgaggctcagcagcatgtttgtggcattcggtggacaccatggccttgggcggctggacaggtttttgtgatgtgaaggacatgcatggggcacatggtaagcttggcaagggctccaggaacgctgacgaagggttttaggacccccacccccatgcctgtaccagggctggcctccagagcgggtgaggacagagcagctgtgggcttttcattctgaggtcttggcccccctggccaccgcaagggactctttgcttgtcagggcttgcaaaaaccaaccttcgagaaagaaaagggaactcttcacgttgaatgttgactttgtgtgtatgcgtgtgtgtgtgtgtgtgcacgcgcgcgtgtgcgtgtttacttcatggaattttgttttgtgaaattcccctccaatcgtgtcagaatttacctccatgccccagtcacactgttggttctgcgctctgaacctgggtgtagctcatttgaaggactctcttctgcgtttcctaacagttatttggtggtctcaagagttgaggttgtggagggttgggagaaactgaagttctatacatttccatagagtttacatcctgcagttaaaaggcagggagggctcagcccgggccccacagctccaggccatcccctacgggctgcccacagtgcccccttttctctagccgaatctttttcgaacagcccgggaaaggaaaacggattcacttgctgattttgttcacggcggaagcaccatgttccgttcctttttcaggttcagtttgttgtgtaaatggcggttttttctggtgtgagctttggtgatggtggcagggctcctttgaagagatggttccacctcgtggtctgaagaacaaaccagagaagagtctggtttggccagaggccccctccggyccacgtcaccctgagtacacccctctgattgctctgctgtcaagaagcacgtttccaccagctgtattcaacactacaatgcattttttaaactatatttgcatccaagacaataaagacaccttattttttttgaaaagaaaaaaaaaaaaaaaaaaaaaaaaaaaaaaaaaaaaaaaaaaaaaaaaaaaaaaaaaaaaaa

SEQ ID NO: 889 - DNA, 1284 bp, Homo sapiens
  SITE (47): n equals a,t,g, or c
  SITE (277): n equals a,t,g, or c
ggagccccaccgcggtggcggccgctctagaactagtggatcccttngggctgcaggawttcggcacgaggcgccagatcccggttggagagccggggtgcaggcgctgagccgggattggagtgtggttggagttggggagccaagggtgtgtgccggtggccggggttggggtctccgccgcgccctccggccggctcccgctcactgcgctggctcctccgcaggatgcagggtgccgggaaagcgctgcatgagttgctgctgtcggcgcagngtcagggctgcctcactgccggcgtctacgagtcagccaaagtcttgaacgtgtaagtgtagacgcggcccaggctgggagacaggggcgggggtgaatggcgaggagactggcggatgggaggggtggcggcgggagaactcggctagccggttctgacctaggtccccgccttgccctcgcagggaccccgacaatgtgaccttctgtgtgctggctgcgggtgaggaggacgagggcgacatcgcgctgcagatccattttacgctgatccaggctttctgctgcgagaacgacatcgacatagtgcgcgtgggcgatgtgcagcggctggcggctatcgtgggcgccggcgaggaggcgggtgcgccgggcgacctgcactgcatcctcatttcgaaccccaacgaggacgcctggaaggatcccgccttggagaagctcagcctgttttgcgaggagagccgcagcgttaacgactgggtgcccagcatcaccctccccgagtgacagcccggcggggaccttggtctgatcgacgtggtgacgccccggggcgcctagagcgcggctggctctgtggaggggccctccgagggtgcccgagtgcggcgtggagactggcaggcggggggggcgcctggagagcgaggaggcgcggcctcccgaggaggggcccggtggcggcagggccaggctggtccgagctgaggactctgcaagtgtctggagcggctgctcgcccaggaaggcctaggctaggacgttggcctcagggccaggaaggacagactggccgggcaggcgtgactcagcagcctgcgctcggcaggaaggagcggcgccctggacttggtacagttgcaggagcgtgaaggacttagccgactgcgctgctttttcaaaacggatccgggcaatgcttcgttttctaaaggatgctgctgttgaagctttgaattttacaataaactttttgaaacaaaaaaaaaaaaaaaaaactcgag

SEQ ID NO: 890 - DNA, 1288 bp, Homo sapiens
  SITE (1283): n equals a,t,g, or c
  SITE (1285): n equals a,t,g, or c
  SITE (1287): n equals a,t,g, or c
gcctccgccccctcaaccttcgcggggcgcgggccgcagcttttcggttcacagcgggcagggaaagccgcgggaagggtactccaggcgagaggcggacgcgagtcgtcgtggcaggaaaagtgactagctccccttcgttgtcagccagggacgagaacacagccacgctcccacccggctgccaacgatccctcggcggcgatgtcggccgccggtgcccgaggcctgcgggccacctaccaccggctcctcgataaagtggagctgatgctgcccgagaaattgaggccgttgtacaaccatccagcaggtcccagaacagttttyttctgggctccaattatgaaatgggggttggtgtgtgctggattggctgatatggccagacctgcagaaaaacttagcacagctcaatctgctgttttgatggctacagggtttatttggtcaagatactcacttgtaattattccaaaaaattggagtctgtttgctgttaatttctttgtgggggcagcaggagcctctcagctttttcgtatttggagatataaccaagaactaaaagctaaagcacacaaataaaagagttcctgatcacctgaacaatctagatgtggacaaaaccattgggacctagtttattatttggttattgataaagcaaagctaactgtgtgtttagaaggcactgtaactggtagctagttcttgattcaatagaaaaatgcagcaaacttttaataacagtctctctacatgacttaaggaacttatctatggatattagtaacatttttctaccatttgtccgtaataaaccatacttgctcgtatataccccctgcctccttctgttccagtcagccaacatatgtacataaaagaacacacaaattcaagaagttggaagattaaattatctgcttatttagtgtaggatggtcaggtagctagctataagtgaaaggaaattttgctgaagagactgagaaatgggtagtggaatgactatcaagatgacctcaaactatttaaaaacattttaacttgccatgaagaatcttgatgatttttgtataaatgttgtataaaattcttttacagctacagatttttaaataggatcattgtaargattaatgagataatgttttaacatagtgcctgggtccatgataagtgttaaatttttcaattaccctcagtaactgataatgtagcaagaaaatactctatattcagacagacctgaatttgatcccagctctatactaccntngna

SEQ ID NO: 891 - DNA, 1980 bp, Homo sapiens
  SITE (1356): n equals a,t,g, or c
gggccagcagcagaacttccactcggtgcgggagatgttcgagtcacagaggatcggcttgaacaactctccagtgaacgggaatagtagctgtcaaatggccttcccttccagccagtctctgtaccgcacgtccggagctttcgtctacgactgtagcaagttttgacacaccctmaaagccgaactaaatcgaaccccaaagcaggaaaagctaaaggaacccatcaaggcaaaatcgaaactaaaaaaaaaaaatccaattaaaaaaaacccctgagaatattcaccacaccagcgaacagaatatccctccaaaaattcagctcaccagcaccagcacgaagaaaactctattttcttaaccgattaattcagagccacctccactttgccttgtctaaataaacaaacccgtaaactgttttatacagagacagcaaaatcttggtttattaaaggacagtgttactccagataacacgtaagtttcttcttgcttttcagagacctgctttcccctcctcccgtctcccctctcttgccttcttccttgcctctcacctgtaagatattattttatcctatgttgaagggagggggaaagtccccgtttatgaaagtcgctttctttttattcatggacttgttttaaaatgtaaattgcaacatagtaatttatttttaatttgtagttggatgtcgtggaccaaacgccagaaagtgttcccaaaacctgacgttaaattgcctgaaactttaaattgtgctttttttctcattataaaaagggaaactgtattaatcttattctatcctcttttctttctttttgttgaacatattcattgtttgtttattaataaattaccattcagtttgaatgagacctatatgtctggatactttaatagagctttaattattacgaaaaaagatttcagagataaaacactagaagttacctattctccacctaaatctctgaaaaatggagaaaccctctgactagtccatgtcaaattttactaaaagtctttttgtttagatttattttcctgcagcatcttctgcaaaatgtactatatagtcagcttgctttgaggctagtaaaaagatatttttctaaacagattggagttggcatataaacaaatacgttttctcactaatgacagtccatgattcggaaattttaagcccatgaatcagccgcggtcttaccacggtgatgcctgtgtgccgagagatgggactgtgcggccagatatgcacagataaatatttggcttgtgtattccatataaaattgcagtgcatattatacatccctgtgagccagatgctgaatagatnttttcctattatttcagtcctttataaaaggaaaaataaaccagtttttaaatgtatgtatataattctcccccatttacaatccttcatgtattacatagaaggattgcttttttaaaaatatactgcgggttggaaagggatatttaatctttgagaaactattttagaaaatatgtttgtagaacaattatttttgaaaaagatttaaagcaataacaagaaggaaggcgagaggagcagaacattttggtctagggtggtttctttttaaaccattttttcttgttaatttacagttaaacctaggggacaatccggattggccctcccccttttgtaaataacccaggaaatgtaataaattcattatcttagggtgatctgccctgccaatcagactttggggagatggcgatttgattacagacgttcgggggggtggggggcttgcagtttgttttggagataatacagtttcctgctatctgccgctcctatctagaggcaacacttaagcagtaattgctgttgcttgttgtcaaaatttgatcattgttaaaggattgctgcaaataaatacactttaatttcagtcaaaaaaaaaaaaaaaaacggcacgag

SEQ ID NO: 892 - DNA, 2501 bp, Homo sapiens
  SITE (521): n equals a,t,g, or c
  SITE (548): n equals a,t,g, or c
  SITE (550): n equals a,t,g, or c
tcactaagcctcccagctcggtagacatggaagaaaaggtgtccttcctgcattatagaaaaagcacagatatgccagatgtgtgcttcaggcctggttcttgatgtgttaattgaggctaacaggttttagatgattcgtttcatttctaacagaaccagttgttcaaaactattgtcttgtttccagtgccaaagctgtggatattcaatgatgtttatcactctccccctgccgctgcagtcctaccctgcactgctaatcctccctcagcaaacagatgcccctgggaacaatgtaggggtgagcacaaagaaattcaggagaagaaagtacattcatgtaattcaaaattgttatctctatcataagatagtaaaaagcctttgttcagattttttattgtgagcagtgttgtattttttgttaatgtttcaaggggataggttgatattttgatatcacttagaaccgagtcggtaaactacatatttatctttgatcaactaagattctgtttntaaagaaaagaggacatctttggctantnatgattacgtaacagtgaatggcaggtgccatatggatccttggagcacagacggacatcaaccagcaagtatttctcagattctaccctaaaatatgacagtatgtcaggtgtggactaatatatgtaatagctttcaaaaggaactgaacaactagcaagtaaagagtaatttatattaaaagatcccaataatagatggactatggcaagaacctctgaactagtctctctgcttcttctctacctctttacagtgtattatctacactgcaatcaaaatcttccttccaaatgttaagtaactgttcaatggcttcccatgggactcggaataaaagctcacactctttacaatggccctgcaggttcctcatctcctacctccagcatcttcactgtccctctgctccaaccacactgcctctttcttattcctccagacctcccaacacagccctgcccccaagacccttccaatgactctgatcctcttccctgcgctacccagtgtctcactccatcgattcctccacatcctgccaaatgtcacctaaccagaaaggctttgttgaaccaccccagataaaataaagtcccctgcctttacccatcactctctcttgcccggtttaattctttctagcacttacattgtgataatttcttttctgcctcctgcctcttttcattggaaaatatattacatgagaggaggtttgctttattcattgctgaatgttcagcacctagaataatacctggcacaaaataggtcctcaattattatacccaattcctcccagttctcttggaagtttctccattttaccattgaaaattccacatccttgtgattcactttgtcccagtgaattccaaacagttggccatcctacccttaatagatagttgttgaatgaaggaaaggaatgaagaaaaaagaatgaggacagggaaggagggaggaatctaggacagaaaagaagggagagaggaaaaaaaggatgttaatattttcttgttctatatgtagaaagcaaaagagtatttttgtaatcttttttcagcaaatgcctggatcaaattcaatatgattttaaagccatgagaccttctcattcttggttttgatgttgcacggtatcataatacatctgattggaatttcaatatcaggtttaatatactatgcaagctggtataggctctgaaattatgcatattcatgagagcaatcacacccttacttttgatataactggcaaagtaaggtaccacaagagaacaataatcaaagaaaaagggaggactaccagttgttatttacttatgacattttactggaaaaacttaagcaacatgaaagactatttctaaatgaagtactaaaactaacaagacaatgttataaagtgtcatattttctttccttttatacaataaaacattgaaaagctccaccactatgcagccacttcaccagatgcaataatatccaaatgtgaaagtaattaataatattgtagttttaattcccttggtatttcagagatatcctttgaacagcctaaatcaaatcatactggtacttatgagaaatagatatctcttgtgagtccttatattgtgcttcccaagaacctacagtgcatttcagttatttaccttgaaaattcttcagcccatccagagtgggtttggaaatttgtaatcattttgtagaatgtgataagggaggacctgtcttcctaaattctcaagcttggaattttcaagtcagtgtcaggaccataggctctctaatgcatatatatttgccctgagcaaataattatttatctctgtgcttcggtagttgcatctgtatgttaaaaataagattattgctatgttgatttcttatgacatgagagaagaggctttaaaaattaaaaaaaaaaaaaaaaaa

SEQ ID NO: 893 - DNA, 672 bp, Homo sapiens
ggcacgaggctctgccttccctggtccccactgcccatatctgtggactgccccttccaaagacccctggggggggtggggcattccgcccacccctttcccccatcacttctcgcctgtcagtgattccatgtttcgtaacgggggattctctgcctttttgtatcaaagaacaagcaaatggacccccgcccgctgcaggcgcccatagccatcgggtctctaaagctgagtggctagcagcgtttgtttgtttgtttttttttttttttctgaaggtgggacagtcacttcctcctccctccccacccctgtcgcatccacgtgcgacctggaggactggtcagaaccgttactgtgaatgagtgaagatcctggaggaccctgggccccaggccagctcccatcgctgggggacggtgaacggccatgtgttaatgttacgatgtttttaaaagacaaaaaaaaaaaaaaaacctcaaaagtttttttaaagtgggggaaaaacatccaagcactttaattccaatgtaccaggtgaactgacggagctcagaagttttcctttacaccaactgtcaatgccggaattttgtattctgttttgtaaagatttaataaaagtcaaaaaacttgcaaaaaaaaaaaaaaaaaaaaaaaaaaaaaaaaaaa

SEQ ID NO: 894 - DNA, 1947 bp, Homo sapiens
  SITE (1947): n equals a,t,g, or c
gaattcggcacgaggctaactgaaaggtcaaaaattacatccatcagtcatggttatgtgcaagtccttgtagaagcttttattaaagtcatgctaaatcacaagaattgacatttgtaccaatatctgaaacttcttcatgttttttcaataacatacagcttctgcctgtgtagatattatgccatcagttggttctcaaaagtattttaagtgcttcagatgtgtgttcccattatattttgaaaacatgaaaaatgctttaatgcatgtatgtaccagcagtggttacttgcatgtgtagtgtttttcaagaggtctgggtcttaacaaaatgttttcctttatctcagtgctcttctgcctctttttgttggtgtccttgagaacaatacaccttctattccttcattggttacacctttcctgtgacatttagcgagtttcaaacttacttccatatgaggctaagaaacctcaaawttcaggaattgggaaaaataaaattagcacttgcagaagtagcagcagatgggaaaatgccttgattgacattttctttcagcatttaaaatttttggcattttacagcttcatgacaaacagttttgtgcccataccttagaaaatgtggtgctgagttaaataaaggctgtttgagcactggagcagaaaaatgcattatttgcaaactggtggataattttgtgccttctcttctggccaccaagccagtgtagaaacagcaaaaatgtcataaaaattcttatatttaaaacaaaaacaaaagcaaaaacaaacattgaattaaattaagttttgtaattttaaactttaaaaacttctactgaaaatatttccgccaaatgccatcaatattttagactgtacctcgtttgcaaaactgctttgagagggaagagtggacaactcccatcagccttattctcttgagaactatattttggttcctagtaacagcctttccaaagctctactcttggtttttattactcataaatgtttaaattagaaaagaagggaccttgtacatgtgaaacctaattgactctctatattttggacaatttatgtatctgaaatgtgttgtctctgttatatgatgttatttttgccaggagactacaggttgatttagcttgatagctgaaatttgatggaaaactgatttccatttagtcttaccaagtgttgcttctctcttactagacagatatccacttagtaaaatctaaagcagtatgtaaatgaaaccagcaaagagagtagggtttattttataaacattcttaatgctaagtaaccagttgttcaatttattatatgtgtctgaggacattaaaacaccataagrttgtaataattggttgtgccaatgtgtgagggatttacctttaggctctctgtcaccagtgatttactagtgttagctgtttaacacattatctgtatttagtagtgattatttatttacaagttggtggtaattcagcagtcaggactctaagcttttatagttgaattgaggaaatytcgcttttattcatttagctggcaactgcctttattgcagacctctggtgcttggctttcaaggaagcctatgagatgccaaaatcacacctttagagagcaccttgctctaataggtgatgcatgagcaaacagtgagatttgaaggggttttaacataatttagaatgtgaaaaaaatatcaattcatatctttcaagtactaacccctcaaaaaagcccacacatacaaaatatgtgatgtgataccactttgtcttttaggtctttaagtaactgaagttaagcacagaaaaaaaaatcacttcatggaaatttcagtaagaaacccaaacttctaaaaattgcttgcagatgagctaaaaaaaaaaaaaaaaaaaaaactcgggggtn

SEQ ID NO: 895 - DNA, 2311 bp, Homo sapiens
  SITE (2301): n equals a,t,g, or c
  SITE (2311): n equals a,t,g, or c
catacgcaagtcacatgaccatttaaatgtgcaaatgtaagaagattcaatgtgtttacatcaaatgacatattttattgatttattgcagattcagtgcatatgagccaaattgttgagtgtgtaagagctatattgtgtattttattaaattaatatatagttgtgttgcaaaaatatttgggcttatattgtaaatggcaagtgttgccttggtagctgtcgaactctatgagttttgttttttcctgcttccttttccccatggagtgtgggaagcagtgcctcagagcaaagtctcttgtttaatgtatagtctaccaagtactacagtacataatctgttcaaaatgtgtttgagtgagctgatggagctaactgaaaggtcaaaaattacatccatcagtcatggttatgtgcaagtccttgtagaagcttttattaaagtcatgctaaatcacaagaattgacatttgtaccaatatctgaaacttcttcatgttttttcaataacatacagcttctgcctgtgtagatattatgccatcagttggttctcaaaagtattttaagtgcttcagatgtgtgttcccattatattttgaaaacatgaaaaatgctttaatgcatgtatgtaccagcagtggttacttgcattgtgtagtgtttttcaagaggtctgggtcttaacaaaatgttttcctttatctcagtgctcttctgcctctttttgttggtgtcctttgagaacaatacaccttctattccttcatttggttacacctttccttgtgacatttagcgagtttcaaacttacttccatatgaggctaagaaacctcaaatttcaggaattgggaaaaataaaattagcacttgcagaagtagcagcagatgggaaaatgccttgattgacattttctttcagcatttaaaatttttggcattttacagcttcatgacaaacagttttgtgcccataccttagaaaatgtggtgctgagttaaataaaggctgtttgagcactggagcagaaaaatgcattatttgcaaactggtggataattttgtgccttctcttctggccaccaagccagtgtagaaacagcaaaaatgtcataaaaattcttatatttaaaacaaaaacaaaagcaaaaacaaacattgaattaaattaagttttgtaattttaaactttaaaaacttctactgaaaatatttccgccaaatgccatcaatattttagactgtacctcgtttgcaaaactgctttgagagggaagagtggacaactcccatcagccttattctcttgagaactatattttggttcctagtaacagcctttccaaagctctactcttggtttttattactcataaatgtttaaattagaaaagaagggaccttgtacatgtgaaacctaattgactctctatattttggacaatttatgtatctgaaatgtgttgtctctgttatatgatgttatttttgccaggagactacaggttgatttagcttgatagctgaaatttgatggaaaactgatttccatttagtcttaccaagtgttgcttctctcttactagacagatatccacttagtaaaatctaaagcagtatgtaaatgaaaccagcaaagagagtagggtttattttataaacattcttaatgctaagtaaccagttgttcaatttattatatgtgtctgaggacattaaaacaccataagattgtaataattggttgtgccaatgtgtgagggatttacctttaggctctctgtcaccagtgatttactagtgttagctgtttaacacattatctgtatttagtagtgattatttatttacaagttggtggtaattcagcagtcaggactctaagcttttatagttgaattgaggaaatctcgcttttattcatttagctggcaactgcctttattgcagacctctggtgcttggctttcaaggaagcctatgagatgccaaaatcacacctttagagagcaccttgctctaataggtgatgcatgagcaaacagtgagatttgaaggggttttaacataatttagaatgtgaaaaaaatatcaattcatatctttcaagtactaacccctcaaaaaagcccacacatacaaaatatgtgatgtgataccactttgtcttttaggtctttaagtaactgaagttaagcacagaaaaaaaaatcacttcatggaaatttcagtaagaaacccaaacttctaaaaattgcttgcagatgagctaaaaaaaaaaaaaaaaaaaaaanctcgggggtn

SEQ ID NO: 896 - DNA, 2311 bp, Homo sapiens; identical to SEQ ID NO: 895
  SITE (2301): n equals a,t,g, or c
  SITE (2311): n equals a,t,g, or c

SEQ ID NO: 897 - DNA, 779 bp, Homo sapiens
ggcacgagatagaataatgcagtggatttctatcatgctaatttattttgctttggagcaggtacctttcctctatggcattattttcttgcatttctcataaaggggaggatgcatcccaactgaatggctcactggcatgtcttttatgtgttcagttgccattcctagctttggaaagtttctatctgtccatgtgtatacaagtcaatgccccatttttgtttttcttttaaccgaggtgtagataaggaaaagggacatttttaattacttaataaccggaaatgcagatgtgtaaggagaatgagaggaatgagttaaagtggttatgcatttttctatagatgagccattacagcaaggaattttacagttgacttctctgaacctagctttaccacagtgattaaatcctatttagaaaggggaatctgatttaaatgtgtgattccttgtatttgctcctatcacaaagatatattaaaggaggtatgccattaatgaaatccactgtcctgagtattatctttcctcctgttgtactttctcagagactatggcagaatatctggatcttccttggattttgtacacatattgtagtgaaatgtgtcctacatctgaaattgcatgggactcatgcccagcaatctggttctaggcctttgacacctgataatatgagagcaattggccagccaatagccataagcccagaggattttagagcttcatgtgtggcttttaagagcaggtttgaaaaaaaaaaaaaaaaa

SEQ ID NO: 898 - DNA, 715 bp, Homo sapiens
ccacgcgtccgaatcgatggaactatacatcaggtgtatgtgctgaagcggccacatgtggacgagttcctccagaggatggggcagctttttgaatgtgtgctctttactgccagcttggccaagtatgcagaccctgtggctgacctcctagaccgctggggtgtgttccgggcccggctcttcagagaatcatgtgtttttcatcgtgggaactacgtgaaggacctgagtcgccttgggcgggagctgagcaaagtgatcattgttgacaattcccctgcctcatacatcttccatcctgagaatgcagtgcctgtgcagtcctggttcgatgacatgacggacacggagctgctggacctcatccccttctttgagggcctgagccgggaggacgacgtgtacagcatgctgcacagactctgcaataggtagccctggcctctgcctgcctcccgcctgtgcactctggaacctctggcctcaggggacctgcctgtcctcagctccctgggagctgaaagtgaggatactccgtgctccaggccacagggtgaatgtggccatgcctacctgttttgtttttttaagaacagaaacaactattttaaaagaactcttttaagaaatttcataaagggacatgcattttactgggtttgcttttcttaaaacataccaaaaaagaaaaaaatagaaaaaaaaaaaaaaa

SEQ ID NO: 899 - DNA, 2053 bp, Homo sapiens
ccacgcgtccgctccaggcccagcctcctgcttcccgagggcatgtacaggcccagcctctgcctcacagcagactctccacacccagctcttccctgtctgcggcctctccagtccaaagctgctgctgccttttggcagcttgtacaggctcagctcctccctcacggtggcctctttcagcccaactcatgcctcttgcaacctgcccaagtgtcagctcctgtctcacactggcctgttgagggccagctcatgcctctcgtggcctcaacaggcccatcccctgcctgtcggcggcctctacaggcccggcctctacctcacagtgggctctccaggcccacctcttcctcaccgtggcctcctggggcaatgctcctccctctcgggagcctctgcgggcccagctcctgcctcccagtggcctctgtagaccaagcccgtgcctcagggcagcctttccaggcctagcgtttgctgctttgcatcctctccaggccctggacttcctccagtcggcctctccaggcccagctcttcctctcggcggcctctgcagggccagactgtcgtcaagtcggcctgtccagggccagctcctgcctcccggcggcctctgcaggcccaagtcgttctcaagtcggcttccccaggcccagctccggcctcttggcggcctctccgggtgcaaaagttcctcgagtcagcctctccaggcccagctcctcctgcctcccagtggcctctttcggcccagcccagctcatgcctcccggcggccttcccaggccccgcttttgactttcggtggcctctgcaggcctcgacaaggcccggcctcctgcctccagaaggcctgcacaggcccagcctctgcctcacagcggactctccacgcccagctagctctcgcctcactgcggcctcccgagtccaaagctcctgcctctcggccgcttcggcaggcccagctcccgcctgccagtggcctcttcaggcccatggggctcattcctcacaacagcctttccaggcccagtttttcccttccggcggcctctccgggcccagaacctcctcaagtcggcctctccagacccacttgcagcctcccggcatcctctccgggcccagctcttcctcccggctgcgtctccaggcccgactttggcctcccaacaacgtctttggactcagctcctgcccagctcccagcggccctggtaggcccacagcttcccgaagccaagctccccaggcccagctcaggcctcacggtggcctctccaggccagctcctgccctctgatggcatctgcaggccccaaacggcctccggttggtgggctcctctaggcccagcttgggcctcctggcggcctctgcaggcccaaatcgtcctgaagtcggcctctccaggcccagctccggcctcccggcggcctctgcaggcccaagtcatcctcaagtcagcctggaattgggcctggaagagagcaagtcggcctccccgggcccagctccggcctcttggcggcctctccgggtgcaaaagttcctcgagtcagcctctccaggcccagctcctcctgcctcccagtggcttctttcagcccagcccagctcatggctctcagcggccttcccaggtcccgcttttgacttttggcggcctcttcaggcccagaacttgacctccagtcggcctttgcaggcccggcctcctgcctctcaaaggcctgcacgggcccggcctcggcctcggcctcacagcggactctccacgcccagctagctctcgcctcactgtggcctccccagtccaaagctcctgcctttcggccacttcagcaggtccagctcctgcctgccagtggcctctttaggcccagctcattcctcacaacggccttcccaggccccgtttttcccttccggcagcctcttggcctctaatttgtttatcttttgtgtataaatcccaaaatatggaattttggaatatttccaccattatatattttggtaggtaaaaaaaaaaaaaaaaagg

SEQ ID NO: 900 - DNA, 396 bp, Homo sapiens
cccacgcgtccgcaaggctgcagggtgttgtgattgtgcctgtgagtagcagggtgcactcccacctgggcaacagagtgagaccttgtctctaaaaattaaaaaaaaagttaaaaattaaggaaatattctttcagtattcaagaactattctccaagtcagcaaagaagctgctcacatcattgacagatgagttgaagttccaacatatatgtctttgttgtttcacttttgtcttatttgttaatgcaaacaaaaatatcaaccaatactctcatgggagctaacattcttttgtcgattgcaaccataaccataggttggctatggatatgagtttggcaaaagtcaataaaagcattctatgagaaaaaaaaaaaaaaaaaaaaaaaaaa

SEQ ID NO: 901 - DNA, 916 bp, Homo sapiens
ccacgcgtccggatgaagtttacattaatgttagtaatgtccttggagctaagtcttcgaaaagtactctcaagtgtgtaccctttagggaaatataatcatgaatgagaaactaggtggtctggaagaggaatgatcaatgatgacacttattccaagttctcagcctcacagagcaataggagccagctcgcttaatttctctgtttccatatttgcaaaataaggattatctgtgattatctgtttccatttagtggttgctctgtgaaatatttgaaatcagtgtagtggtgagtggatgataatggtgagaagcgtttgggagctagggaaaatagaagtgtctgccccctctctgttttgctattcagtagctgtaactgtacagattcttcctcagattgaaactccacttcccttgtttcccggtggttagtcccactcctgctcatgcgacataagaacatatataataatccattttaatatatttactaaccaggtccttttgttgtgcaatattttgtatacttaattcagtccttcaacaaatgcttgcctactagaacactgtgttaagtgctgaggttgcaaatggtttcttgtttaactttcattcaacaaatactgtatttcatctgcatctactacataacatttcctgtggtgggtgctgagaatgcaaagttaagatagaaacttgaccttgagaaacatatgtccagtgagagatacaggaggaataaataatacttaaaccgcatttatgtttatcattacattatcatggctttttcctagtaaaagttatgtaaatgttatttgatgtttctgctgaacatatgagcatgataagctgccacatttccaaaataaagataaggaagttgtcattagtaaaaaaaaaaaaaaa

SEQ ID NO: 902 - DNA, 1860 bp, Homo sapiens
ccacgcgtccgggaacctagaggtcctcattttataaagcttttcatgtaaaattcccctgaacaccataaaccatactttacatatcgttgctttaattccttttctttgtgagagggcttctgcaatgttaagttagctaccatataaccatgacctcagtgttctgcaatatatgccttcaactgtttttcatatgacatggatttgagctctcctaccatcctgatcatcttttctgggtgcgtttcagcttttctatgccacataaaacattgtattagaaaccaaaaatagtactaaaggagtggtataagtaggacagagtacagctcagtgctgaaactagcagtaacttctagccttgttggccctttggggcttcacagaggaatggctgtagataaccggagatgttattcggctgggatgcgctaggagacagttccttggctgtttagtccagcatctgtcctgcttggttaggtgtcgcgtttgataggtgagtttcttgatgtcctgattttcaaatatgttaaatataattcttgattttagtttgttcttatttgatttagttctatgtttgaatgctatctgctcacagaggcttccttgaccatcttaactaaaaatccctaccagtcactctctctccctccatcctgttttagttttctttgtaacactcacattccctgatattatattagccttctttctcttctctcctcctcctccctcttcctcttctcttgtttcctcctccttttccttcctttttttcttcctgaactccctgtccttcctccttttctgcctcccttctttcctttctctccatctctttttcttcctccttccctccctctgtcttggattttaagctgcctgagggcaggaacttgttcaggaacttttgtttgttatccaaacactcagaataatactgacacatagacacatagcagatgctcaatacataggtgttaaatggttgaatacatgtccctttacatcctttcccctgcccccagactgtccagttttataatggaacgtgtttgggttcatgccagtaattcatcatgtggttttatgtcctccctcatcctgaaggaagagggacaggtgactgtgttaccattgctgaaggatcatggaggttccagaagctaatgagtgctggtgccttcccagcagtcctgaccatgttacttttctgaatgacctttactgtaatccatccaaggagtccccagcccccacctcaagtgctgttggtaagagagctttctatccaggaactgtgactcataattctgccaggggaagctaacttcttgaataagataagttctcataccagccacattgcgtcaccgtgggagcaggaaacatgttgtaatcccctcagcccatctggcacgtactcatttgccttccttatgaagaggtgtattgtgtctgacagtgatgccacttcctagttggagggagaggaacaaaaaggacatgttgttgacaaaaacgaaaagagcaactggctctgggctagtgggggaagaaagaaatcattgcgcatcttgagggatcaaccaacctctctgcacatgaaagtattgccttttacaaggcatctgtggatgctgacagatttgttggtctttcatgaggctctccctgtgctcaggttcccatctcaacggaaacacaggttgatgtgaggaacaaagcagaaatgttctgaaaaccctaaagcaatctacatgcgtatcatattagtaagacatttattttgttctgagtccttccatgtgggccttttaagagaatcctcaaatataaaaaaaaaaaaaa

SEQ ID NO: 903 - DNA, 1490 bp, Homo sapiens
cgaaaagatgataatgatgaggaggaggaagatattgatttttttgaagatattgattctgatgaagatgaagggggactgtttggaagtaaaaaacttaagtcaggtaaaagttccagaaatctgaaatacaaagatttttttgatccagttgaaagtgatgaagacataacaaatgttcatgatgatgagctggattcaaacaaagaagatgatgaaattgctgaagaagaagcagaagaactaagtatttcggaaacggatgaagatgatgaccttcaagaaaatgaagacaataaacaacataaagaaagcttgaaaagagtgacctttgctttaccagatgatgcggaaactgaagatacaggtgttttaaatgtaaagaaaaattctgatgaagttaaatcctcctttgaaaaaagacaggaaaagatgaatgaaaaaattgcatctttagaaaaagagttgttagaaaaaaagccgtggcagcttcagggggaagtgacagcacagaagaggccagagaacagcctcctggaggagaccctacactttgaccatgctgtccggatggcacctgtgattacagaggaaaccacccttcaactggaagatatcattaaacagaggataagagatcaggcttgggatgatgtagtacgtaaagaaaaacctaaagaggatgcatatgaatataaaaagcgtttaaccttagaccatgagaagagtaaattgagccttgctgaaatttatgaacaggagtacatcaaactcaaccagcaaaaaacagcagaagaagaaaatccagaacatgtagaaattcagaagatgatggattccctcttcttaaaattggatgccctctcaaacttccactttatccctaaaccgcctgtaccagagattaaagttgtgtcaaatctgccagccataaccatggaggaagtagccccagtgagtgttagtgatgcagctctcctggccccagaggagatcaaggagaaaaataaagctggagatataaaaacagctgctgaaaaaacagctacagacaagaaacgagagcgaaggaaaaagaaatatcaaaagcgtatgaaaataaaagagaaggagaagcggagaaaactgcttgaaaagagcagtgtagatcaagcagggaaatacagcaaaacagtagcttcggagaagttaaaacagctgaccaaaactggcaaagcttccttcataaaggatgaaggtaaagacaaggccttaaagtcctctcaagcattcttttctaaattacaagatcaagtaaaaatgcaaatcaatgatgcaaagaaaacagaaaagaaaaagaagaaaagacaggatatttctgttcataaattaaagctgtaatatattttgaatataatgtaaatattaatgtgtaagcttatattgtgtcattgttctgttttataataaaattcttgagaaccttaaaaaaaaaaaaaaaaaaaaaaaaa

SEQ ID NO: 904 - DNA, 783 bp, Homo sapiens
cccacgcgtccggagttactggaacacaagcgctgtgatactgcaacaatctgataacccagacagtactgagtgactaactggtgggcgatatatacagcctggatgtgctggacaaagggatgattcaagggtgagatagagtggatggcacgagatttcatcatgctgctcagaacaatgtgcaatttaaaatttatgagttgttcatttctagaattttctatttaacattttccgactgtggttgactgtgggtaactgacaccatggaaagcaaaactgtggataaggggggactaactgtaccagtaaatgctgcctcatcacctacacccttggtttacttctcagataaactcaggaagtttaaatggcattctgagaatctgtagctgcaacatagtgagcccaggagtcccggtccagcagctagtattaaattctctgttgctagcttggacctctctcgatatctaggaattgtctgcagtgtgcggtggcacagtaacaaccatttgtttctcaacaagaatctgataatgttgcttgaacctcctgaaccagtgctgcatgctctgcttcttcatatgtttgtccttagatttgaccaaaaacaataactgataatgtaatacagattccccagctccctgtgagctgggttgagcccaggaagtctgtacaagagagcatgtctactgggatttaaatagcccagaaacaggcagccggaatttcttatactcttgtgctctaaaaaaaaaaaaaaaaaaaaaaaaa

SEQ ID NO: 905 - DNA, 1900 bp, Homo sapiens
gggacgccatactaggaaacccaggtctatttgttatcagagtaaggatcaagccagatagcctgttatgtaatttctccgataaaagattttgaaagcaggtgctgtgggcatctgtatggggaatcgcactcatagaattattttcatttgtaaatatttggtatcaggccaagcaagggaaagaagctttactgtattaccatctttcctggaaaagattgatttttctctctcccttaggggatatgaggtatgatacctgcaaccaaaataagctggctgttaagtgctctctccttaactattgtccaagcaatgtacatcactcttgcctagatgagtgaccatacttttttctttgctgcttggtttttctatcactaaaaagcaaatttaggtggaagatggatgggtaagtcctttgtccttgtcaaaagaatttagaaagggtaaaggtggtgggatttgaattcttttaaacggtttattcattggaaaggcaagtgagtggcagttgactgtagaatcttgggaatttttgaaggaatttaagagctgtacttattttaaataatgaggaaacaatcagagagacttaaccagggtggcaactatggaagagtgggggtagaatccaagtctacagttctacggcactgctttgtttattttttcaatcaagcacacatgagggattgcttaataaattcaagagttttctatatagtttgggattactacagacacaggtactctagccatgtgactatttcagattagtgttcccattgctctccatcctatttttcatatctaaatgtgtcatgattttagaatctctttgtaaagaaaaccaaaaagagccatgcccaaaagaatgagcatgaaatgaagcaattcaagtatttagaatttcttcttcttttttttttttttttcaaaattctgagttaagaaagttcattgccaacagttgaggataaatagctctattgatttaggcaaatgaatgagaagatttaaacatcatcaagactcccaaagttggtgtaataaaagttgagatgttttgctagatgctgagagaaaaggcataaataggccatttgtgctcctgtaaacaaatgaaattttgtaatgatcaagagacagcatgatattataaaacacactttggactcatcgagacctggctcagagttgtacctaatttgcttatcagcatttggttagaccttagacaaattttataacctctctaagcccattttctttatctgtaaataaaggaaaaagatctgtttggatttgggacaggagagttgtctgttttatagggtaatgtttatgaaaataatttatcacctaggtacttagtaaataccagtttctgtctctgtttttcttcaaagctttgttgacaatgtaggatattgccaactaatcctttgacttgagtgcttagccatgccccaatccaggcagcatgaagaatgatcaagaaggggacacctagtggcagttgacctttgaggatctatcctaggatcaggttactgatttgggacctctgaatcagtacatcataacatcgagagtgatctctgccaaaattaaaattctgtcagaacagtataagcagaaggaagacattaggtctttctgaaatatggagctgataacttctatcagttctgaattctgtactgtcccacccccaaatcatctatattgttgcatgtacttagctttgtgccttgaattgctatttcctttttatcttgcactcagatggtatttttagagatgtttcttcaatcaaaacaagataaagttaaaaaaaaaaaaaaaaaactcgagggggggcccggtacccaattcgcccgatagtgagtaa

SEQ ID NO: 906 - DNA, 1900 bp, Homo sapiens; identical to SEQ ID NO: 905

SEQ ID NO: 907 - DNA, 732 bp, Homo sapiens
ggcacgagaacaggacagggagaccttgtgatggcggggcagggaccctgttcgtagggaagatgaggaggcaagggctgcctctcacacctccaggttctctaagttctggggagggagcgccccacctgctgaggtcggtcctctcagccctgcctgccctggcctgggctctcccagcctcccagccctctgccccctcagatggctttttgtttttgtttttttttgcatccatcagagactgcacctctgtgtggcaggcagggcatgggttttagtcctggccactgaccagctgtgtggccctggccgagtcgtagccccctggagcccagcttccatttctataaaatggttgtttcgggagagaggggcaggctttctgtgtgactcgggagttcttccgtgagggctgccagggggtggtgtgccaggacctcaggctgggcctttgtgctggccttgcagtgggtgtgtggggaagtcactgtcccactatgggtctccactacccagtcactgaccctgggagaccccttctgtgtgggagggagcgggggctggctagcgggccccccagccagggatcccagaggctgagggttggggagaggaagccatcatctcattacctctgtcagtgcaggggtggctgctgcttcccttgtgcacttgggtcgctgtgattgtgaataaaagtgatttcgtaccaaaaaaaaaaaaaaaaaa

SEQ ID NO: 908 - DNA, 802 bp, Homo sapiens
ggcacgagcaaacccaagtcttgagcaatgtttttctcaaaaagctgctatccaatgatataggaaaatacattgtgttttcctaaacacacttttctttttaaatgtgcttcattgtttgatttggtcctgcctaaatttcacaagctaggccaatgaaggctgaatcaaagacatttcatccaccaatatcatgtgtagatattatgtatagaaaataaaataaattatggctctaacttctgtgttgctgtttatcttgttatttttcggcgttatactaatgtgtttattgagagcattttaccttccagacttctcatggctaacttttggtctgtattttgctccttagatgtgaatatttcttattagtctgcttcctgctacgcaatgactgcatttctatcatttctcagtttgttagtatatgtggatagtattctactgtataaatgattgcaaagtttatcaaaaacaaattattatatgtagcttttctacagtgctttgctaaaccatgtagtactagttaagtcttccttgaaaataaagatacactcttataggggacagttcctgttcactcccaggaaacttttttaaaagatgacactgaatgtttattgcactttagtgcagtgaagtggcaataaaacctaacatgaatcaaggttgtttatggcagatgcatgtgttgctttacagagtttagcaaaagctcttaattttatgtcatactgtattctactgaataataaagctaacattattcaataataaaaaaaaaaaaaaaaaaaaa

SEQ ID NO: 909 - DNA, 846 bp, Homo sapiens
  SITE (4): n equals a,t,g, or c
  SITE (6): n equals a,t,g, or c
tatntncaagctcgaaattaaccctcactaaagggaacaaaagctggagctccaccgcggtggcggccgctctagaactagtggatcccccgggctgcaggaattcggcacgagattttaccttacactgaatgttcttaatatgatttggtacctaaagtaattgaaaaaaatgcagtttcctttaatccttgactataagttatactatgttgcgtacatggcaaatcctgcaaatatagattaaaaattaaattagcccattgaaatcctttataattctgtcattttcccaaggaagaatagcattgtacatatgcaatctttattttattctttattgcttatcagagtgagtggatgaaaacatttgtaaggctgcaacataatattaaaatgtgaataaataaatgttctgataaaatagaaaagaaagtaaattacagtgatttccatcatattatcactcttgaattttatcatctataaaatgagagataaaaatatctcactgaattgttacttatatcaatttaaaatttgctagtggtttgaaaataataatgtactgactacatgtatgctgttattgtcagtgtttccttctataaactgttctttggaaaaattaagttatacataaaattcatattaaactttttacagaaagcatacatgataaacagtttatggtacttctcagaatcatttcataataagcaatttatttagcttaagttccaacttactgttcttattataaattgcaaagcaacctgtcttacattcttacattatcttaaaataaatatttctgcccttgaatcaaaaaaaaaaaaaaaaaaa

SEQ ID NO: 910 - DNA, 1434 bp, Homo sapiens
ggcacgaggtttcagggaggatggggtcgacccttgcgatccccagaggccccccatggctcctcctgggctggctgtcttcctcctgtgggttctgatgccacctgggccgacggcgtcttctcagcccagggcggccgcgcctccggtgagtttcagctgagggcgcgcggccagctccgagcctggctccgggtgcagcaccggcctgggacctctgctgtcccgtgtaggggtgccctgcaaatatgtgatgaataagtgaagaaatacgttctatcttctaacttgccggatgttagaaggaaaccaagcttatgcttctcatttatagctaccgttaaggattggacagaagcttagctttttgggtgagacggacaacagtgtttttagaacctttggcaaggaagagctggaaagaacatgtatttgaaagtgactgacaggtcttctggccctagggggccacctgagcaggtgcacccagcttccctccaagacagaaaataaattaagaaggagagcaggaagggccccggcagactccagacgggagggggtgctgcccgtcaggcagaaggagcttggaagggaggggccgtggccatgggacgtggaggtggaagcgagggtcatcataggtctgcacactcgggttgagtcccccttccccatcacacacaggacagccagcagtgagctgcttaccccaaggagtcaagggggttcttgggcaacccctggtgctggagccggcagtggacagcaccgcagccagaccttgcttatttttggctcatgaggaacatctgtgaccgttccctcccctggccctgggaggggatgtgtgacctccactcaagacagccatgcggctcctccggctgcgggcggggagggcatatttcccagcacaggcccaggactgccagctgagaggctgggaggggcccctcacccctagactctgcgtgtgaagccaagcgtggagcctcacagggaatctgagatgggagccagtgagatgggggcaggacccagaggggagaagaggtcctggggatgctgtggatctggatccagcgtgcgggagctgaggttccggagtgaaacactgcctttcatggaagcacgtcttcctgtcacccatcggcttcattttaaaggatgaaaatgtatcagacattcaaggagagctgcatcacataaaagaaagaccaggcaaagaaacggaaaataaatggattgagaaatgtgaatgactccaatcattccaatcattggaatgaatggattggatagaactccaatccatagactcagattagggagatatatttatataataagaacaggaaactgtgaagatgaaataagacaaaaaagacacttttgagattaaaaaattactgcaaaaaaaaaaaaaaaaaa

SEQ ID NO: 911 - DNA, 761 bp, Homo sapiens
ggtacagccagcacaaaggcccgagcttgctgtgttcaaagaacagacaaaaaaaccgcatggttgaaatgtaatggaggtgtgatatgtaagatgggtgtggagaggtgcaaggtggccagcccacatggggcctcttaaagactgtggttagacaggtctacgaaaatgtcagaaagctttcaacagggaaatgttgacatcaggcttcatttttcagaagatctggcttctgtgtggagaatggactatgttgggacaaaagacgaagtgaggagattagatagatgccaattttaccagctccggcaagagaggttgaggcttatgcttggttagcactggaagtgaagaagtaggagcagactggattcttttctatcagatttggagtaccattagccgtataaatcattgtggggcggggaatgcctggtgccgtggctcgtgcctgtaatcccagcactttgggaggccaaggttgggagcattgcatgaggccaggagttccaaactagtctgggcaacacagcaagaccctgtttctacaaaaaaataaaattaaaaattaggtagacgtggtcacatgcaccagtagtcccagctactgggaaggctaaggctggaggatcttttgagcccaggattttgaagctgcactgagccgtgatctcaccacggcactccagcctgtgcaacacagtgagaccctgtctcaaaaaaaaaaaaaaaaaaaaaaaaaaaaaaaaaaaaaaaaaaaa

SEQ ID NO: 912 - DNA, 441 bp, Homo sapiens
ggcacgagggaagggggtgcttggtttgaggggttaatgtgaggcctttttgaaaaatgaatattttgataaaaagaattcttgttttagcacagttgatgcacataagtgattctcatatttgttgtataaactggtttaatacatttggaacatagttggattacattcatttcctgggaaagctagcttaccatacattcaagtttataaaacaatttgccataggcaaagccatttaaaaagttcattctgaaattatttcatttacctacagtgaaataattgtgaactaagtagtctttctgaaaactgttgggttctaggcattcctgagaaattgaaagtggctacctttcatgtcaaaaatgttgatctattataaataaaatgtttttgcatatgtttttgaaaaaaaaaaaaaaaaaaaaaaaaaaaaaa

SEQ ID NO: 913 - DNA, 452 bp, Homo sapiens
ggcacgagatttcctatgcttaaggcatgtattttcagtaagcagttaaaaagacagcatgacttttttattaaaccctaaataatcatatatagcttttctggtttattaatgtatagaataattctgcagtggtagaaatttaacaggggaattttatccataactatcaatttcatactttacctagataaccagaattatgtgacttgtttgttgaaagtaacatgcgttgtatgacttgtttgttttttattgaagtttgcatctcaaatgataatttaaagtttttgttagtgaaagtagggcagtgaccacacctttatataactattattaccttgattaattgctacattgtaaaagaaaatattttctacaattacagaatcctcagaacaactctgaaaacaaatgaggtattatccccaattaaaaaaaaaaaaaaaaaa

SEQ ID NO: 914 - DNA, 1699 bp, Homo sapiens
gcagccttttcatggttcttttaatacttttcatacactgccctcttgtaaggtgttacaggatcctaatgaatgccttctgtattgttgtattccatactagttagggcctaacaaaagcatggcatcgaattgtgtagaggtgactgataaatacaagaaggaaagaagaaagagtggggaggaaataaggggaaaggaagacagaaagaaagagaaaggagagaaaaagtcaacagagcatgagacatagcattactaattggctgaggaatatcaaagttagtatctctaccctattattttcctatttctttcctgtcccaaagctaagcaagagtggaattatctccccaaagtcccttgtcctcctctgattgttacagctggatcagggtcctattaattgwtgrtgasggtcmctwgcctgtttccccaggtaaccatgagcaccttgagctaagtcccytttcttagataccattttaaccagttcccctgactccagcctttctgctcattttattgcatacacaaatgtcaggttaacctgcagcacagttgtagtaaacagacaaaggcttgcgatgtctccacactgcccaggatggcctgcatacttgagctgatctactagccctttgcaattcacaatgatgtgcaaaatattgcctcaatctggtattcctcactctttgktaattctgtctttcaaaatacattctgaaaatacatctcaaagagaatctcacagtcctcaaaatctcttaaaatttcctgtttccctgatatgtggtattcctctcattcttatttcatgagaggtacaattgtataaaaaaagtgcttgcaagcctgaaagatgtaccctttgccacattcagttctatgcccttaggtaatttgcttagccattaggaatctgtgtttccaaatcttcagaaaagtgtcttagtccctttttgcatgctggcaacaagtgaaaaactaccctgcttgtagcagaagcttaaactcctgtgatgaatgacagaagcaacagcatctaaccctgggggcacagagagacagggactgagaagagtaagggacagggcagttggatccagatgggcttctgtttttgtacgatcatgatcccttctttacttgttagtatgaccagcaagacattaaaaaatatttcctttttccaagaccatataaggaaataaaactatttagcaatctgatctctcttcagaatgcttttcattaaawgatatgagtrkttattgcttaatagtggactcttcaatgccagcatcccccagtaacaaattagtataacagtatgctcttccacttgcttcaaaacgtgctttctgattactgtcataaaaaataggccaggcatgttggctcacgcctgtaatcccagcactttgggaggctgaggtgggcgggatcacgaggtcaggagatcgatcgagaccatcctggccaacatagtaaaaccccgtctctactaaaatacaaaaaattagctgagcgtggtgacacgtgcctgtagtcccagttactcgggaggctgaggcagggtatcgtttgaacctgggaggcggatgttgcagtgagccgagatcatgctactgcactccagcctggtgacagagcaagactccgtctcaaaaaaaaaaaaaaaaaaaaaaaactcgag

SEQ ID NO: 915 - DNA, 1612 bp, Homo sapiens
  SITE (806): n equals a,t,g, or c
  SITE (923): n equals a,t,g, or c
  SITE (1607): n equals a,t,g, or c
gttgaatttgacccaaagtcaggtggtcagttcatattgaaaacatagaaaatcatttgtcactttaaatgttcatgctcagtcatttctttaccacctgtctgtgtgcaacttggaaatttctggagcactgatgactgtgcatttgtgatttcctttaggatgccatttccatttaccaattgctttcctcagcctgcaattgtgtcttcattctgattagtttattccatttagattttaagaatgatagttgatgactgcctttttcccaatgttacaatagtagaaatgtggtatcttacattttccaaacattttcttctcctgggctttcctgtaccgttcagtgatggagagctcacagttcctattgagatatttattttcattactatccttacatagaacgcatttccagaactttttccttccatkcaacttatagctcctctttaaaaacaaaattattctatactccatgctttgatactctaaattcaaccggtcatatttttttttcttttcctttctctttgactggtcaattcagaaaaggaagtccagttcgagtgttcagatgatggtgaggatctatctgccagatttctcctcctgtgaaaattcacacttaggaataaaagtcttatttacctaagatagtgtaagtaagtggagagggtgtaggaacattacaggtcagtgttagtcaactatcaaaacacggtacttctcttacatattacattgttttttctctgaaattgaatttgttatacatgtagatagtatattaagaggtttgntcttttacaaagtcaattttctctttgaaaataaaaagaccatgacagaatgaatgtctgtatagtgatcagtaaaaacaaacraacaaaaaactatatgttttttttaatgttctntatggtggctaaaataggagtgrtttataggacaccwtaatacattcaccatggagtttataaaggtgtgaaagtgatcttacaatgtaccaatcctagttaagtacctttaaaggaaatgtttattaaccttcaaacaataaatttaacacctgagaaataggaatatcttgcccatgcctcataagagtaattcagtgcatcatacaattatctgatttgattgattcatgattttttaaaaaagaaaacaccttgcttctattaacataaaataattatatcacacaaaagtgccagagtttttgtatttttaaaagacatctatgggccaggagcggtgtctcacacctgtaatcccagcagtttgagaggttgagacagacggatcacctgagatcaggagttcgagaccagcctggccaacacggtaaaaccccatctctactaaaaaaaaaaacaaacaaacaaaaaacagaaattagccaagtgtggtggccgtacctgtaatcccagctactggggaggctgaggcgggagaatcacttgaacccagaaggcagaggtttcagtgagccgagatcgcgccatggcactccagcctgggcaacaagagcgaaactccatctcaaaaaaaaaaaaaaaaaactcgagggggggcccgtacccaatcgccctataccntctat

SEQ ID NO: 916 - DNA, 963 bp, Homo sapiens
ggaattcggcacgaggtgggccagggcgagaatgtcacacgttaagggctgatatttaggcacaaaggggaagggcccttgctgtgtgtgagctagggggtggcatgacatgcttggctgggctcatggttgctatttctgcagatgtcaaagaagttctgttaactgatgggaatgaaaaggccatcagaaatgtgcaagacatcatcacaaggaatcagaaggctggtgtgtttaagacccagaaaatatcaagctgcgttttacgatgggataatgagacagatgtctctcaactggaaggacattttgacattgttatgtgtgctgactgcctgtttctggaccagtacagagccagccttgttgatgcaataaagagattactccagcccagggggaaagcgatggtatttgccccacgccgagggaatactttaaaccagttttgcaatctagctgaaaaagctggtttctgtatccaaagacatgaaaattatgatgaacacatttcaaacttccactccaagttgaaaaaggaaaacccggacatatatgaagaaaaccttcattacccgcttctgcttattttgaccaaacatggatagaagattaagcttctcaaagacgaagaaacgtatcaagtgcatagggaatatttttacaaaaacggaaatctgtaaggggtataatcgcctgcctgcgccctttgcagcatttcacgtgtgggctatggactccacctgtcctcacccacgttattccccagctgccctctccagctccctccccgcctctttttacactctgcttgttgctcgtcctgccctaaacctttgtttgtctttaaatgtgtataagctgcctgtctgtgacttgaatttgactggtgaacaaactaaaaaaaaaaaaaaaaaaaaaaaaaaaaaaaaaaaaaaaaaaaaaaaaaaaaaaaaaaaaaaa

SEQ ID NO: 917 - DNA, 2234 bp, Homo sapiens
  SITE (1337): n equals a,t,g, or c
  SITE (2228): n equals a,t,g, or c
ggaaacagccacctctgtccacggtgcccgccgatggatacattctggagctggatgatggcaacggtggtcaattccgggaggtgtatgtggggaaggagacaatgtgcactgtggatggtcttcacttcaacagcacatacaacgctcgggtcaaggccttcaacaaaacaggagtcagcccgtacagcaagaccctggtcctccaaacgtctgagggtaaggcccttcagcagtatccctcagagcgagaactgcgtggcatctaaagtggctggcaagcccggaggtaaccccaccactgcccacattcctgaagtgtttccatgacttgctctgcattctgcacagagccgctgttcctctcctgcctttagagagcctatggtatgtggatgtgatcaaaccaaagattccacatcggcagttccaatggcttgggccggcggcttcctttgataacaatctaaataagctgcagttgaagaagctgaaaaatgaaggcctgaatgtgcccctggtgtgtaagacaaatgtatctaggctctagagcaggctcccattctccaccgatacacatcatgtgccagttttgcccagatgattctaaattactctgtagtacttgcttgttctgagggtgggacctaggttctttccagtcgtggatttgtatgactgaatgtgtttcaaatgggtggtggggtgctagagctgtttagagagggcctgttggctgctcctggcttacccacttagactgcctccgtttcatacccaaagcggaggccgtcagcaccaggattgagacttcctgtgggcaccaaacaggaagagaccagcaacttcgcattacccgccattttcatctttgccagtcccttcagtcttggctaggctaccgagagccaccatacaaggttcatctctagagaatttttgcttcttagctatactttaaatattttggtcatcaaagacaagtaatgtgtctcagatgagaggcttgaatttgatggccagatataacctctgaggcttttaacattttcattttaagagtaagcaagacacatgaaattaaacctacaaggaggtatttgtggctggtgccaaagcattctgacactttggggtgtcattttaatcaaagaaatcacccccccacctcaccgggattctccataacttccctctgcagaactaattatgktgattttgktcaagttcaagatgktagctaaaagaactatggtggtgttttttttcccacttcccacaaacctcaacatgtgccagtcaccctaaaatgcttyacatggttaaaaacaagcacnattttgaatcctacagcaaggatgaaaggcccctagccgtgaaaacagtgctttggggagcagttgtcagtctaagtgatgctattccaagagaaggatatgctgagggaaaatgcccacatgaacctgttcccatttggagtacagtgatgtggtagctacagcttcccccagaattatcattttagcaccttctctcagggatgacctatcagtttgagagcagttgcctcttttctcaaaataccatactaactgctaaagccctccaagagtctttcctagatgcaacgcagaaggcccttgctggtgatggcctcatttcccatgtgtgtacaaggtggtttgattgaagagtgaagtgcatgcctgcagagcagagagaaatttgtagcaatgttgctaatatgtgttatcagatctgcgggaaaactatttctawtcataatacaycatgggaaycatactattctggtaaaaatcagttattagcataacagcctgagcacttatgtctctcgtttcatcctgcaggaggatgtagcgcctcagtttattttaatgttcataagattatggtgtctaatttaataaattacaggattggaactgcgatccttggtaccacagtcacagaactgggggtcattttcctagatgaaacaaacggaacaagttctcttccaacaaagaaactgtactgtagaaattaatttcctccatgaattttatatattgtgtacaaatataaggtatgtatctgaatacaaagaaaagcctatcatcatatagatatcagtattctctgttactgcacagaagtaattttctcatgatgaaataaagttcacacacatactttctccataaaaaaaaaaaaaaaaaaaattnctgcgg

SEQ ID NO: 918 - DNA, 1661 bp, Homo sapiens
ggcacgagctacactggaagtggggaggggcagtgtgctctgggtagctgtcctcctctgtaatggcaggagctgggtatgcctcgtgacctcttggactcctgctcacattatcactgctgccttcccagatgagctgtgcaaatagatggcggccatgagtggaattggaaacgaggttggagggagcttctgtctgtccagtttggggcctgccaagcctggcatggtgagggtatggtggagccaggaggggccactatgggagccgggccaggaagctgcattctactgagccttttacctcttgcaaggacctgcctttcaggagacttcggtctctaaaggccagggatggaagcttcagggagactctccagctcctgtttagctctttggttcagacctaagtggcgagccacttgactggatgggacctccagccagccacagcattggaatccagcctggctcctgcactgcctttcatattgatgtccatgacaatcccagctgtcttgcagtacatggcacaggcagccctggcatcttgaggagggtgttcagtgtggtccctggcagaatatgagcctggggcagacaggatgtggctttagaccgtgaacagggagccatgccccaggacatacgaccctgtgccccacactcgcccacactcactcctggtcattaatcacagtgctcatgggcccctgattcaaaggaagtgccagctgtacatgggcccaatgaactttactcaagattagaggactgtttaggggcatttgaaatgaattgtggaaaggacatttgtgagaccatttgaaaggtcactcaggggtggtacaacaggataaataatgaacccattacaaggttctagtgaaccactgtggccttgggaactgaatttcatcactttggaagccagagaaaggcactggaaatagctttgcctttgcacagaggggagttttcttctgcttaactggatccaattagaaagtgattcaccgaacacttattctgtgcgagggtcttacagtaaagactcagtgtggcaaggcccctgttttccaggactttacaatcctagttgggagtggggtgaggtcaggggtgtgtaagttgaacactatgatgagagcaccctgaggcggatgcagccagctccctgtgaacatggacaacatgacagggctgggtctagacactggaaatgggtccacctggtttactagacttgagctgaacccatttgtacaattagaggaatttatctattcaccaaatatgcatatctcttcaattattaaagactaccatgtcctactttcagtcgcccagaaatagaccctgcaattccagtgccagtaactcatgtcagaggtgatccctggagacactgcaggagagtgggacaggaagacagggagtgaaggtaggcagcaacggttccttatcccagcaagtcatgagtatggcagccaggtctcatcctgtacagaatagccctcagcatcatccccaccaaggggcaaggaagccgggtgttcattcccccacctccctctgtcatttgctgagggctgcatttgaggcattaactacccagggattctgccatgtcctgctaggagaaaaaaaaaaaaaaaaaa

SEQ ID NO: 919 - DNA, 533 bp, Homo sapiens
  SITE (515): n equals a,t,g, or c
  SITE (525): n equals a,t,g, or c
  SITE (528): n equals a,t,g, or c
  SITE (529): n equals a,t,g, or c
ttcggcacgagccaacttctatataactcaggaatttactctcaaacaacactgtcaattagttacttatctctctggaaatgatctgggaacatggagaggaaagggaggaaggggcaaaatctgaccacttaaatctaagcatattagatcattttatgctagaaagtcctgaatgatgtgactttcgttcttgtaaaacacctctttccatagattcatggcccaaacagtatataaagagtggggaaggaactgcatttgcaaatagttcaaatcattgctccatcttaactacgcagttcacaaagtgtgaagaaatttgatcatctcaaaaaagataatggggaaaaaatatgttttgttctgtgactttaaagtcttgcaatattttacataaatgataatgggtgctttaataagaactcttgatacttttgttattgtattcaatatatgcatataatacaacaggaaaaaaaaaaaaaaaaaaaacycragggggggccgggacnaatccccccnatnngaat

SEQ ID NO: 920 - DNA, 2099 bp, Homo sapiens
  SITE (2090): n equals a,t,g, or c
  SITE (2091): n equals a,t,g, or c
ggtgccattccacaggtagaaacactcacatgtgcttagaaacgctctgctttcctccttgattacccaaattctcattctgagcttctatttctccagatctagactcgggaatttaatatctgaagactcatatagggctgatctaccctaacttgcaaaatttcatgcatatttcatacttacactcttcatatgtcagtggtgctattgtttggttactttctctatctgtgtggtttcatcaccagtctattcacccctatataaaacttaagatttgagataagaactggaatttawatgacttmggaaagaatgtatcttggktagaatataagagtctgaaaagtctgctgtgggtgctaarctggctactaagggaaatgctamcagaaatttgtcatatgtcttcagagtattgtctggcaactgattaaaacagaggaagagtgaaacaacatctgcttctctccacctcacactgataaaatggttgaataaatgcactttgcttatggccatgaagaacacaggggacttcatctttccaagtgttttcatacaatgctcaaggctaattcttttggtcctgatgttttatttcttagcacctgctggatcaagaagcacccacaaggatcatttctcaaaaatgtctgaaactatatctattctgactatgaaccttgatcacaattcaaacccttaggctactgttctgattgttttcagcattacccactaacttttgctttctatttccatattctgtattctgggggcactttttatacagagtctgaaagtgctattcttttttttttttttttgagacggagtctctctctgttgccaggctgcagtgcaatggcacgattttggctcactgcaacctctgcctccggttcaagcaactctcctgactcagcctcccgagtagctgggactacgggcgtgcaccaccacacccagctaatttttgtttttagtacaggcggggtttcaccatgttggccaggatggtcttgatctcttgacctcctgatgcatccgcctcaggctcccaaagtgctgggattacaggtgtgagccactgtgcccagcccgaaagtgctattcttattatgacctacagtggtaatatttcacttaaaaatcagtgctatgcccattgctggttaacaagctttggagaagtattaggttgaaccatagaaactgccacaactgttcaaatattgaaaattttatatgcttcagctcatagtctccttcacacacattctctttcatatttttttataattttattttttgtatgacttaatgggcacatgctgatttcctgtatgtcgtcaacactcctgagccatgagggtaagatcagagctgcaggagtccagacacgtactttgtcgcctgccaagtgaaagacaatgaatggagttatctaaattttycagtgaactttttggtgtctatgttgtctaattttattcccttactttgtgtttaagaaagatctaatacccacagagaataccaaggctattaaagtctaagcaggtgacctacctcaaagcttaagttcctgttatcataggcctcgtttctcaaatttgtataaatgtacatgtgatggaaaaccagaagatgcttggtaaacatggtcagttttactcaatgatgaatggtttcagtcatttttttgtattaaaggaaacataaatatactatggagtaaaatgcaaacactacacggttttttaagataaattctgacacttgaaaggcatgttctgcatttagggctattgccagccccagaaccatgggatgaagttttactccttctgctggtagaggaagtttagtggaaggtttgagaacctgagccctgagtgtaggaaatgcatagaagtagcaaagtctgaacaacactgagaactacacagtaaaattagcacataggatttattatcctttgttgaatgagtatatgagtatatgatgatgctgctgatgatgatgacaatgaccacgatgatttaaaaaaaaaaaaaaaaactcgagggggggcccggtanncaagcgcc

SEQ ID NO: 921 - DNA, 1861 bp, Homo sapiens
  SITE (54): n equals a,t,g, or c
gagcaagtaatgcccccagcgcccccagcccagcccactccccgcatgggaggnccgccaccaccaacacctcatcatccttctcatcgctaacaccaccacctccatcggcacccaagcgggcatcatccccccacactgctcaggggaggggagggatcaggcgatgagactgtgaggccaaaagaagggggcctgttggaggctgggaaccccgcagcgcgaggctgcctcatcaacggcaagaggaaaggaggggtctcgggacatctccagaccctaccaactgggagggtcccctcctccttccctactcctgggacggcagcaaggacatgggggctgctgttagcttctccgtcagaggcctcatctcactgtagccctggaacccagggtccatcttgcccttcccccatccatggttgggaaagaagctcagcccctcacagtggcctcaagtgtgatgccttacaaaagcaccactcagatgggcagctggactctggtgtcctgagactctgccctcttcccacagcctccctgccccacccatccctgcaaagccatttttcagacagagccattcctaagaacactgaagggctggaatgctggctggccactctctgcctcagtggcctccctacagcctggaagaaggagggtcctgattgccaaggaaacctcctcattgggctaaggagacactggagtctggagtgtggagccccacagtcttgcaggtcacatgctctccttgcacatctggcctggttgtacccactggcctctgcctctgccctgggccaaaagggcccctccttgccaggggagagacagccacggtcctctttggccgatgctgtattctcattttggcccttgttcttaggcccgtctgcccgccytcctccatctaacctttcctgttttatccgcagcccttttcttctttgagttagtaaagatttattctgtaacctgacactcatctggccctttgcagtttgccagccatattcccatgtgatttcccactggatccaggcccccatccggctggcaggagggggctctgacgtrcaggttggaaatcagaagtctgtgagagcgcgggagtgcatggcagctctgggtcccagacctggcccgacccctctgcttcacctccagctctgctgctcctctactcttgggtcgagatccctttggagccacagcgaggaaccctgtggtcctcaggcaggtgtaccttgagtcagccaggagccctcttttcctgtgtcaaagcctgccctcgggctctgctcacctctggtgaccctccaagatgcccctgccctcagtttcccctcatgatctggcctctgcccccttctctagccacagcctctagtacactttagcaataccaccagactagttagagttccccactcaccaagcaagacatgcagtttcatgcctctgtgccttcgctcatgctgtttcttccgactggaatgccttcccctgctcctcctgccttgtctgcctggcaagttcatctctcacgatcccctcaaaggccccctcctccaggaaggcaacccctgtgcccctcccctccaggctacctctgcactttgtcaatgcttctcttgtggcacttatcacactgtattttacttgtttacatgtttgtctccccttctagactgtgaatccttaagggcatggactgtatcttatgcatctctgtatttctgcgcctagcacggtgcctagcacacagtaggcgctcaataaatgttgaatgaatgaatgatttaaaaaaaaaaaaaaaaaaaaaaaaaaaaaaaaaaaaaaaaaaaaaaat

SEQ ID NO: 922 - DNA, 993 bp, Homo sapiens
agaaggattgccccagagacccgtggtggacttcatgggtgctgagtggcccgtgtgacagtgatgacacgaaggcttcggcgtttgagtgggtgcaggtgcacgccagggcttggtgcttccctgcctggccctggagggagctgggtggcctggcttcaggggaagacaggagccaggacacacgtcagcccagcaggtgtggggggtgctgcagccctcggcagtggggtcaggccctgggggatgtttccaatggtgggcagcctggccaggccggagaagacatgttcacgggcatctatcagatgcccccttgaggaggctgagttatttgagggctgctgcaaagtacgctaggctcaaattctcttttcccagccagagccctggccacacggactcagaggggccaccggggtggggaaaggacccctccccgaccccccgcagccactggcctccagctctcggccacagaatggcctctaaggctgactcagccgctcccttgggctgtggcagcaggaggcgggggctctggctcaggccccggagcctgtgcagcttgcccatggccctaggcagcgaggggacagcctgggggacttcctgcctaggcaaggtcattggccgggcctggcctgtggatagtggggccaggggccggcccaggccaaatgagtgccctccttgttatgacaccaagtgactacaagggaggcaagacccctccaggcctctcagccgacactgggtcccaccacacacagtgactgtgccgtgcagtgcaggttctggccttttccttgaaggcatctggtagacccgaagccacgctctcgggccgcacatgcacgccgcagcaccagctgccctgagctgcttgtacaaccaaacacctttcccctcttctccagctgtaacctggagagtcagccatgccttgtcttttgttctcataaatartcamtggggccgggcgcagtgact

SEQ ID NO: 923 - DNA, 1080 bp, Homo sapiens
ggaattcggcacgaggtgcccttccccgtatacttctctggactcctttctaagggggagaagatggtgactccattttatattttgcttgccttgttggttagcatttttccctcatccttaaataaaaattccttgagggtaggactatgttaagagtagatctctttacgttttcttttaattttactctcaccgaattcttcttccccaaccaaaccaattctttggcttctgttgcattttcctcccttcgttaaggaaagagataccattgctatcaaactaagaactctgcaggtggtattctaaaggaatgatcttttcccaaggacagttttcacttggcaggagaggggtagttgggcgagcactccacatgcatgacgtttatagtcaccacatccttcaggctgtgttatgaccaatgggtggagatctaatattaaagtcaacagaatgtcctcagttttaatgcatttctgtgggttgtcagaactttagccatctatgtctggtgtccaaggattggatgtgcatttgttcgtatttctatcacttgtaataagtaaccatactacgtccttttgaaagtttgggaactggaattgtttgcatggaactcagaatgtttcatactttttttcctatagctttctctttatatggataagtttgaagaattccagactaccatggcaaaaagcaatgaactgtttacaaccttcagacaggaaatggaaaaggtatttacatatttttagtagaatagtatatcaaatggaatttgtataagctcttttaagtgtgattactattttgctgagtttcctttgttatgatactgtcttcattttctctttagtgatcctccagtggcatttttggtcattttgccctcaatgtaccccaagtagctaatgttctctatgctcttagaattctacctttattatagtgaaatcctatattaaatgcaacttgttagaaataaagtggtggtttttttggaaaaaaaaaaaaaaaaaaaaaaaaaaaaaaaaaaaaaaaaaaaactcgaggggggcccgtcccaattcc

SEQ ID NO: 924 - DNA, 955 bp, Homo sapiens
ggcacgagtgaagtttgatgtcatacgtatcatttcattacattactttttattgccaaataattcattatatggatatgtcacattttatttattcataagttgatggaaatttggattgtcccacttcttggttatgaatgttgctacactaaacatttgtggacacatttttgtgtggacatatgtttttatttttctggattatgtactcaggaatggaattgctgccttaatatggcaactctgtttagctttttgaggaactgccaaactgtttaccaaagtggttgtaccattttctgttttgttcagcagtatataaagggtccaatttcttcgcattttggctatcacttgttattacatgtctttctgatgatagtcattgtagtgagtgtgaattatttcattatggctttgatttttctcagatgactaatgatattgagcatcttttcatatagtttttgatcatttacatatcttctttggagaaatgtctattcaaatcctttgcccatgttttaattgggttatttatcttttaattattgagttgtaagggttctttagatattctagatataattttcttgccagatataatttgcaaatattttctcccattcagagtgttgttttttcacttcattgatcttgtctttgaagcagaaaagtttttaattttgatgaagaagtccaagttatctattttttctttcttttttttatttgtttgtttttttgtgacacagtcttgctctgtcgctgaggctggagtgcagtggcgtgatcttggcttttgcaacctccacctcctgggttaaagcaattcccctgcctcagcctcccaagtagctgggactgcaggtgtgtgccactacacctcgctaatttttgtatttctttttttttagtagagatagggttttgccatgttgtccaggctggt

SEQ ID NO: 925 - DNA, 1164 bp, Homo sapiens
ggcacgagcacatgcgcccgataggtccttctgagcctttctgtggctgcacttggggacccttgtggaccatggggtgtggctagggaacccctaagtttcagactaaaggaaagatcctgggtgatgctggctttttgcttctttcttctgccctcccacctcagcttgtaagcggggatgtgtgtatgtctggggagaggaggtgtagggtgcgtatgtccatggggggaggggcttgtgtgtgcagtcattgtcccaaggtgtttccagtagcgacttctgtccccctatccccaccctggtccccactttgcgcccccgggctccctgcctttggtgcacacaggatcctgcccgccccccttgccagagccagagaagggggttggggccattccaaggaggcaggactgaaacccttaccagggttactccccaacatccttttgcctgagtcaccctctaagcgctttaaccacgggcagctgcctgttccccagacagtttttggtggggggggtccagggtcccccttgctggtacctccctcaccctctttttgtttttccatctgtgcctgttccttccacagcccaggcacacagaagcccaccttcttccccttaggaggagggatagtcaacacccctgctgtctctctgtcactcacacactgatttatggggtctgagctgggctgttcctgcaggatggacaggacccagcgccctcttctccccacaggctgtaaatagacttccaatcaccaggccagcccccacacaccctcactcattccagggaagcccaggtaggtggtgaacccgctgccacgtctatcagtcctcttgttttatgcaaagatttactgtaaagtagatttctttccctccctccgccattcttttattgtaaatattgtctctaaatgtgtaacatattataaagaatttataaggatttttaaagatgttttgctcatttacaaaagtgttgtaacagtgttggacaaagccttccaccccatgtccgcatggctcctttcactgtgtccttgacacacctctctggcaacaactaaaatttcctgcttctgaaaagtcctgtcttaaaagtacagtctatatcttggaaataaatagctttcctcaaaaaaaaaaa

SEQ ID NO: 926 - DNA, 1929 bp, Homo sapiens
tcgagtttttttttttttttttttttttttttagatgttgtctgtatttattttctacctttatgaaacaagaacctgctaacaggtaaatcgtaaagtaacatatttttgccctgatgccattagtcacaatgccatggggtaactgctatgtgatttcccatttgcaaggaagcatattaattcagtttctgctcaatatacaattaggttgtagggatatagatatctcatttgagttatctgagtttttcatctttatatctaaaaatctaatctgaaaatagtaaaacacatttaaaaccttagatgctactgtagtaaaagttatgtttataaacatttcagtatattccttcaacttcaagaatcttgaatttccttgctagaaggcttttttcctcaaagattccttttaggcttactttggtgttcaggatctccaattataaatgtagtctctcagcaccacattccgtaaagatgatttcccaagtaacggtatttgactaagttgctccagagtgttagggtgcaaaccacagttagtaagctccttatgaacaacctccatatcaagtactttgtccatttgcaggcagatgttaaatacagcagttggctcgtgtggatacagtactgcagagaaagatccactctgtgaagatttgagcagcatggtcagtgaatgcagagaatgaggcatgataggacctgtaatctccaaactaaattggtctctgtatccagaaagagcttgtgtcttcacattcacactccgtgccttaagcatttgcattgtggcacctcggaaagcaacaggggacaagagggttggaggaagtcctgcctgtggacctgaggtagcaactaaactcttagagttaatcaaaaaattgagcaatgtaaaggtgttgattccttttaccaacacaacagattcaggtctgtgatccatttgtacttcatgtttctctttacgcagcttgatagaaagtatgtctggctttttaattttatcttgcacacccatctcttccagccaggaaaaactttcctcttcatcytcatcactgatggcttgctccctaggaaattgctacagttagagtccctatttcacaagctgttcctgtgcaaatctatttcatgagtccataagtcagtggatgatataaagttattttaatcacatactccccatatcccaagcttgttccagatgctgtctccttcttatggccactttcttttattaaaggcagagaaaattcaatacctatatgaggaacaaaaatgtaactgagttgtcatttaaagtatttaacaggcatgctgtacttttagagtgtaaaaaatttgaaatgttagtttttacaaatgatctattaaggcagtagagttttcaagctttcttcacaaacctacaaacatgcataaaacgtattctccttgaaagaggttcgggaaacaacacatacatgtaacactctttcataaatcatattgtattccagttcactttttgaaaaagtactgattgggcccattaagtagatttcatgatccactaatgggtttactcagtttgaaaattttgttattaaaggggtaattggtactatagaagaatttctagaagagtatattcagatagtgactatctggcccaatatgtgttttattttagagatcagagaacactatgtggaaggaacagtttaaatcaggagtccccaacccctggactgtggactggtactggcctgtggcctgttagaaaccgggctgcacagcaggaggtgagcgactgtcgagtgaacattactgcctgagctccatctcctgtcacatcagtggtcgcattagattctcacaggggcacgaatcctactgtgaactgtgcatgtgaggcctcgtgccgaattc

SEQ ID NO: 927 - DNA, 1444 bp, Homo sapiens
ttttttttttttttttttataggtaaggaattcttttctttaaattaagtagaaaactacgtggactacagctctagggagctcatccaggtctctgtgatgtcttcgatttcgtttcttcttcatttcctgcatgtgcttccactttgggccccccttgtttctctgtctccgcttctccctgtgccacatctgttcgcagtactggtcgaggctgaagtttgggctgctaagatttggatgtagtctttgtatctcaaccgtgactcagccaatagatccttgacctgcccctcctcatgctctgccctctgggtattttccatctgttcattctcaatgacattcaaagtcagcttcactatggtgtggatgaaagtgtgctcctgggctttgcagtaatacatcccagaatccttcttctgcaaacttcgaatcagtagcccatattccgttttgatgatctttcatcggggcttcaactcctctcgatgctcatcccctgacctctggatataccatttaatagttgctgttggggattaggtatacattccagaaaggtgagttaaattcaatgccaaaaatcacctttcatcagcagtttcatgactaatgctgttcttggatgtccccagcactgggtgattgggtccccatatttaacatcttggcgtctagctctccttttagaagtaggagcatatcgagagcatgcatttccatcccaggcacagtagggtctctggcaagacaacagtctgcgcaagctttcccataagtgtcgcatctgtgcaaggagagctgaaccaatccatctcgggaaccaatgtacaattgttgctgcttcagagacaattccatgttcaagatgattgatgagtgcttgaatatctgcaactcctccagcactacctcttccatattccacttttcctttgaaatgctgacaactttgaggacagttccaatgtctgttccaagaaacattacatcgtactggccatcttctgcaatgacatgatccaccactatctgtgtcagtctgtaatccacattgattctcttgaacgttggtcctcctgcaactgggtatacggacttatacatcacagagtgccgctttatgaaactgatgacatcatctggaaaatctcgggtggacttaatcagtgggtcataggttttgcttggacatgtaccaggccgtggataaggaattctcccatcatactgcacccaacgatggtctgcactttccttatgagcatatggaccattaaaaactgctctgatgtcagccatgctatacacacaaacagcagagcctttgaagatggagctggttgtagtaaagactccatatactacaggatttctttcatctcttgtggggagtaaataaatatcttgaagctcatcaaagtaagtatctgctcgtgcc

SEQ ID NO: 928 - DNA, 878 bp, Homo sapiens
gaaggctgaaacgtgcatgtatataccagcctctctgggcacactctctctgcatggtagccagagcaggttctggctgctcttcaggctaatcgtctggcacctggactctggccacaacatcctctgatgtgcagaatccacttgaacatctgcaaaaaacttcaaggggaggagttgttttttgtttttttgtttttgtttgttttgtttttttgccactttacgaattggccacatgataggttgaggtgagccgaggacacaaaccttacacaggtaggcagcactaagctaaaatggattaaaaataactaactcaagcatgtcaaccaattagtaaatagaagaattgtcagtaaagcgtattgaaagaatatcatctaggatagcatttgatttcaggctggatgaaaaaataatcttcgaattttagagaattagaggaagccttcaaaattatgatgaaatattcatgatagtggtgatcatgatgggaactacaagttattgagggcatgtgccaggacccttgctatgcattacctccgattctttttgttttgttttgtttttgtttttgtttttgttttgagatggagtctcagtactttggaaggctgatgcaggcacatcacttgaggtcaggagttcgagatcagcctgaccaacgtggtgaaaccccgtctctactaaaaatacaaaaattagccaggcatggtggtgtgtgcctgtagccccagctactcaggaggcttaggcaggagaattgcttgaacccaggaggcagaggttgctgtgagccaagatcgtgccactgcactttagcctgggcaacagagcaagactccatctcaaaaaaaaaaaaaaaaaaaaaa

SEQ ID NO: 929 - DNA, 793 bp, Homo sapiens
cggcacgaggacctgtccagcagcattctggcccagagccgtgagcgtgtcgccagcgcccgcgaggccctggaccacatggtggaatatgtggcccagaacacacctgtcacgtggctcgtgggaccctttgcccctggaatcactgagaaagccccggaggagaagaagtagggggagaggagaggactcagcgggccccgtctctataatgcagctgtgctctggagtcctcaacccggggctcatttcaaacttattttctagccactcctcccagctcttctgtgctgtccacttgggaagctaaggctctcaaaacgggcatcacccagttgacccatctctcagcctctctgagcttggaagaagcctgttctgagcctcaccctatcagtcagtagagagagatgtcccagaaaaaatatctttcaggaaagttctcccctgcagaattttttttccttgttaaatatcaggaatatagcccgggtgcggtggctcacacctgtaatcccagcactttgggaggctgaggcgggcggaacacctgaggtcaggtgttcgagaccagccaggccaacatggtgaaaccccgtctctactaaaaatacaaaaaaaaatgagccgggcatggtagcaggtgtctgttatcccagttaggaggctgaggcaagagaatctcttgaacctgagaggcggaggttgcagtgagccaagatcgcgccattgcactccagcctgggggacaagagtgagacttagtctcaaaaaaaaaaaaaaaaaaaaaaaa

SEQ ID NO: 930 - DNA, 1441 bp, Homo sapiens
ggcacgagcttcagaaaattaatcacatacaatgtatgtgtcctcttttgaccttggaaatctgtatgtggtggagaagtatttgaatgcatttaggcttaatttcttcgccttccacatgttaacagtagagctctatgcactccggctgcaattgtatggctttctctaacccctgcagtcacttccagatgcctgtgcttacagcattgtggaatcatgttggaagctccacatgtccatggaagtttgtgatgtacggccgaccctacaggcagttaacatgcatgggctggtttgtttcttggggttttctgttagtttgtcttgttttgctttccagagatcttgctcataccaaggaatcacgcaaccactaaagctatccagttaagtgcaggtagttcccctggaggaaataatattttcaaactgtcgttggtgtgatactttggctcaaaggatctttgcttttccatttaagcttctgtttgagttttgccctggggcttgaatgaatcccagagagtcgttcggatggtgggaggctgcctaggaggcagtaaatccagtcacagtgcctgggaggggcccatccttccaaaatgtaaatccagtcgcggtgtgaccgagctggctaacaggcttgtctgcctggttttcctcctacacgtggacattattctcctgatcctcctacctggtccaccccagggctaccggaaggtaaaatcttcacctgaaccaattatgagcagtctccttactgaaggtacagccggatacgtggtgcccccggggctggtgttggcagccggggggaggtgcctgagggtccccacggttcctttctgcttttctgaatgcatcaagggtacgagaacttgccaatgggaaattcatccgagtggcaatggcagagaaggataggagtggaatgcccacacagtgaccaacagaactggtctgcgtgcataaccagctgccaccctcaggcctgggccccagagctcagggcacccagttcttaaggaaccatttggaggacagtctgagagcaggaacttcaagctgtgattctatctcggctcagacttttggttggaaaaagatcttcatggccccaaatcccctgagacatgccttgtagaatgattttgtgatgttgtgatgcttgtggagcatcgcgtaaggcttcttgcttatttaaactgtgcaaggtaaaaatcaagcctttggagccacagaaccagctcaagtacatgccaatgttgtttaagaaacagttatgatcctaaactttttggataatcttttatatttctgacctttgaatttaatcattgttcttagattaaaataaaatatgctattgaaactaaaaaaaaaaaaaaaaaaaaaaaaaaaaaaaaaaaaaaaaaaaaaaaaaaaaaaaaaaaaa

SEQ ID NO: 931 - DNA, 626 bp, Homo sapiens
ggcacgagttccttccccaccagggaggacaacatcttcatgctgtgattgaagcatccattcagaacacgaggcaatattgtagtccacagggaatggatgcttcacttgatctccggaccttggctgcagaggccatcgcagcttttgaaaagtgaaggggttaattcccattggtgtctttgcttatagcatttttctctaacctataacaaggagacattacattttactttagaacatgagaatagcagttttgctcatgacttaccattccagctgcatgggaaagcaaagcagaaaacagtgccccaaatggaaaaaagatactcacacagaacaaaacagttcttggtcttgttcttggtcttgtcaaaccttgcctgatgctctttctaaagtcaaaatatgaatgctaagaaggcataacctacatccttctctgatttcttcagcagggtcaaaagacagttactagcaatggggaatgcttgtcactgtggagaaagagttttgtatatgtctgataccgttgttataacaaaacaaatttttttactatagttttttgttttctacctgcacgacaacacataaaaaaaaaaaaaaaaaaaaaaaaaaaaaaa

SEQ ID NO: 932 - DNA, 518 bp, Homo sapiens
ggcacgagcaacaatggcaccccagtcgtggccaccacatactcggtttctgctcagagctcgatgtcaagcagacagatgactgaagacttcctgtaagagaaatggaaattggaaactagactgaagtgcaaatcttccctctcaccctggctctttccacttctcacaggcctcctctttcaaataaggcatggtgggcagcaaagaaagggtgtattgataatgttgctgtttggtgttaagtgatggggctttttcttctgtttttattgagggtgggggttgggtgtgtaatttgtaagtacttttgtgcatgatctgtccctccctcttcccacccctgcagtcctctgaagagaggccaacagccttcccctgccttggattctgaagtgttcctgtttgtcttatcctggccctggccagacgttttctttgatttttaattttttttttttattaaaagataccagtatgagatgaaaaaaaaaaaaaaaaaaaaaaaaaaaaaaaaa

SEQ ID NO: 933 - DNA, 1830 bp, Homo sapiens
ggcacgaggtcacccagactggagtgcagtggcgcgatcttggctcacagcaacctccgtagattctcaatccaaagtcctaaccacccagatatgatacaaaacattttgttcttaagtgcatttttctggggagagggtcctatcatccccacccttccgcacacagttaagagctgccctctatgggagccaggctctttcccacagaatgtcagcaggagcttggaagatgatccgagctccaccccacatgcctgctctatgggacagtgcccacagctgccagccttcccccttaccatggagccaggcacaccaggcaagccaggggctccccgaaggccccggagctccagggtggcctctctctcctgcagggcccggtggcccaacaggccccatggaaccactcttgccaggtccaccaggcatgccggctctccccttctctcctgcctggcccttctgtcctgcagctcctggatcaccctacaaagatagatacttagtgctgtcaaatttacatcatgatgtctcaccaatctgctcttttctctccaccctcccaccaagcccccagcgtctccctctagactgtggccacagcatcctgacaggtcactccacctcactgccccagaatggtccttctagaagacagttctcctggtgttactccctgcttagaaattctgatggctcccaaatgtcctcaggataaagcactcattcgttggccgggcatgcaaggccattcattatgtggtcctgatcgttccttcctcagcctcctctccccaccctctgcctcccaccagacctcactggtgatgattctctgattctgccatgttgttatggtcctgaatgcccttcccctcatctctctctatccagtgcacccctcctgagctaagtgttcctgttctctccgcagcctctccgactccccaggctgggttgggtgctcctccctctcatcccacagcgctatgtctcatgtcttctggaaaacttgccaatccctagtgtaagtgtgactggtctattgtgagcacctattgttcagggacctctgtttacctgaggccaggacaagggcctggaatgtgagcaggagcaagggagtgctcgggaaatggaaacaatgaatgaatcaatcagtcaatcagtgagtaaatgaactggagatttccttccccccaaccacagctaatgaccccatgtgagaaattttcagacactatcctgctccaagttctgcatttttgccccctgcccactggccttcctgtgtctcctctctgtggctaaagccgtaacttgcagctgggcttcatccactcgtgagcttctcctctcaagcccagccagtgcccactcaccttgggaccaggaggtccatagaatccctgctttccagggggtccctagaggaaagcaaaagtcagaggtgaagtccgggcagcatctctgaggctccctggggaggcaggtgcagtgaagaggccccttccacagcctgaggcccccaggtgtgtccagcccggctctgtgtgagaaaggagcgcagcctccctgcccagctggaagggaaaataatgtcctctggggcatggccttgtttaagcatgttggctgggcccccatcacagatgaagagaggcgagaagtcagaatgagagggccagtctgtggcatactggggggccctggaaagactggtacccaggagatgtttgtttggaatttattattatcattattattgttgttgttgttgtttctttttgaccaggtacagggtttaaaaaaaaaaaaaaaaaa

SEQ ID NO: 934 - DNA, 1022 bp, Homo sapiens
  SITE (476): n equals a,t,g, or c
  SITE (1010): n equals a,t,g, or c
gattgtaagattgtgaagatatataaaattgatgaattaagagaaattatgccactttcctatagtttctgtgttctgtttattgtatggtgtattcactcttggaaaatatgtaatagttgtgtatccagaatatgtgtcttcacctgaatatttaatctttatatttacaaaaaaataagttccacaagatggacaaaaatggtccatgatatttagcttaaattgtaaccttttgttgtgtatataaaacttccttggaagaaaataaccttattgttttcttaaagctaaacagaataggattggtactcattaattatgtcttgcaaatattttctaaaaattcaaccactctcctaaaatggtgtttaaatattttgtagggcagaatatgcatattgcctgttagcaagtaataattcattctcatagagaaatgggtttttacccatggaagtaatcttttttttttntttttwtttttattttttttttattattatactttaagttttagggtacatgtgcacawtgtgcaggttagttacatatgtatacatgtgccatgctggtgygctgcacccaytaactcgtcatytagcattaggtatatctccyaatgctatccctcccccctccccccaccccacaacagtccccagagtgtgatrttccccttcctgtgtccatgtgwtctcattgttcaattcccacctatgagtgagaayatgcggtgtttggttttttgtycttgcgatagtttrctgagaatgatgrtttccaryttcatccatgtccctacaaaggacatgaactcatcattttttatggctgcatagtattccatggtgtatatgtgccacattttcttaatccagtctatcattgttggacatttgggttggttccaagtctttgctattgtgaatartgccrcaataaacatacgtgtgcatgtgtctttawaaaaaaaaaaaaaaaacccgggggggggcccgtaccattgncttagggggggg

SEQ ID NO: 935 - DNA, 1077 bp, Homo sapiens
  SITE (476): n equals a,t,g, or c
  SITE (490): n equals a,t,g, or c
  SITE (1036): n equals a,t,g, or c
  SITE (1040): n equals a,t,g, or c
  SITE (1052): n equals a,t,g, or c
  SITE (1062): n equals a,t,g, or c
gattgtaagattgtgaagatatataaaattgatgaattaagagaaattatgccactttcctatagtttctgtgttctgtttattgtatggtgtattcactcttggaaaatatgtaatagttgtgtatccagaatatgtgtcttcacctgaatatttaatctttatatttacaaaaaaataagttccacaagatggacaaaaatggtccatgatatttagcttaaattgtaaccttttgttgtgtatataaaacttccttggaagaaaataaccttattgttttcttaaagctaaacagaataggattggtactcattaattatgtcttgcaaatattttctaaaaattcaaccactctcctaaaatggtgtttaaatattttgtagggcagaatatgcatattgcctgttagcaagtaataattcattctcatagagaaatgggtttttacccatggaagtaatcttttttttttnttttttttttttanttttttttttwttattatactttaagttttagggtacatgtgcacawtgtgcaggttagttacatatgtatacatgtgccatgctggtgygctgcacccaytaactcgtcatytagcattaggtatatctccyaatgctatccctcccccctccccccaccccacaacagtccccagagtgtgatrttccccttcctgtgtccatgtgwtctcattgttcaattcccacctatgagtgagaayatgcggtgtttggttttttgtycttgcgatagtttrctgagaatgatgrtttccaryttcatccatgtccctacaaaggacatgaactcatcattttttatggctgcatagtattccatggtgtatatgtgccacattttcttaatccagtctatcattgttggacatttgggttggttccaagtctttgctattgtgaatartgccrcaataaacatacgtgtgcatgtgtctttawaaaaaaaaaaaaaaaaaaaaaaaaactcgagggggggccccgggaccccaatttcgcctataggngagncctattacaatncactggccgncgttttacaacgccg

SEQ ID NO: 936 - DNA, 1077 bp, Homo sapiens
caacaatgggcccacgaccaagaccctgggtgttcagaccccaaggccagggctttcccgctgcatcaagatgccaatccctttgtgggcttcaccagtgcccaagtctctatggagaatgagaactggaagccactgctaccgtctacccagcaccagtagtgccgatgtgccacactgcccagttgaggcccctcacgctctgtgcccctagatccttcaggtccccaccctcagctgtcaccaccaccctccccaggggactccatctgagatgaggcctcgtcctcctggaagctgaggctgagaagggtggagcttggccctggggaaggcagaccagggtctgatggcttctagggatgctctgcgtgtgtctcagcaccgctatctcagccactttcagccttatgcacgtagaatgaccacagccactcgcatccgtatagcactttaaagtttctgcagtcctttgacacataggatctcatggagcctcacgtctactcccttctgcagatgaggaaaccgagagaagtggcccaaggtcacgcaactctgagatgccacatttcatttgatcttgtacacattttcttttattccttcttttttcctcctttcatttcccactacgcacaaagagtttataaacactgttctcagaagagtcacagtttggggtgagatctggaaatcaagaaatgggtgtccactcttttctttcattagctaggatctactagatgcattatactccatacctgcttttcccatggccgccctacggaaaatcccatccacagaggccagggctacccaagcccctccaggtgagctgggcctttcctttatgaacctccatcctcccagccagctacagtagggcctcctcaccccgtaccccacagctagacagtgtcagcactcatctcctcctcccacatttctggagcttttttttttccttccccattgacctttgtggtcttctgtgattatttatgctgcctcccaaggatagaattgaaataaaatgttttcaacttatcaaaaaaaaaaaaaaaaaaactcgag

SEQ ID NO: 937 - DNA, 1309 bp, Homo sapiens
ggcacgagaggtcgtaaggcactgggcaaaaacttttccaagaaagttcatggtgcacacgctgacctaaacactggccgacattcccaaggtttttttcattatggaagtgcatggccattgcatggtatccagaaaacaaagaccagagaagccagactttataccaccatctggaaacatttaatttgtgctttaggtaagtgttagcaaatatttaggatgattgatcaaatcattagtgtgtttatgagtgcatggtgtaatttttactaaagctcacatttcttcaggaactcgattcaactcctttacattcctggttattttcatttacttgatcttgaggtctcatctggcagagctgtgcaagctgggacctttgtggctcattttgaggagctgtttactttacctgttgatgggaacttgcaggtgggaggcagccagtcttaaagagtaccttgttagcaagtgtggaagagagtccacgcagacagacttgccctatgtggtgtcccctctgccagcccagcccttgggcacattggcacctacctgaacccgagccccctcatgcacacagggagccgcacctccctcacacgctcctcaccagtgtgacatggtgtgacgtgctctgtgggtccacaacgggcccactccacagctctgtgcacagcatgctgggtcagggtggtgctagattaataagatgagggtgaatgtcaaaactgagcactttgagtactgtgggcacactgtcacagggtttacccaggaaggaacaacccctgggctccagaagcaggttgaccaggccagtctgagttgtagcattgagactcatctagcggaagtcaatgaggaaggaaaactggctgagaacagctgttgtttcagttaaaatctcagaatgatgcattgaattcaaagttacaacacagcaaaatagtatatgtatttttttaaacctcaaaaatactgtattattaactttaaaacatttttggctggtgtggtggctcacacctgtaatcccagcactttgggaggctgaggcaggcagatcacgaggtcaggagattgagatcatcctggctaatgtggtaaaaccccgtctctactaaaaatacaaaaaattagccaggtgtggtggtggccgcctgtagtctcagctactcgggaggctgaggcaggagaatggcatgaacctgggaggcggagcttgcagtgagccaagatggcgccactgcactccagcctgggcaacagagcgagactccgtctaaaaaaaaaaaaaaaaaaa

SEQ ID NO: 938 - DNA, 910 bp, Homo sapiens
ggcacgaggctctgggcatggtgctccctgtcatctgctgggtagaggtgctctgggcacagtgctccctgagtctgctggacacaggtgctctgggcacggtgctccctgagtctgctgggtagaggtgctctgggcacggtgctccctgcttctgctgggtagcggtgctctgggcacactgctacctgtatctgctgggcacatgtgctctggaaatggtgctgcctgcatctgccgggcacaggtgctcctggcgctgtgttgtgggatatgtacatccccagccatttgctgtccttgggcaacttagcaatgtgcgatggtattgttactttattttttagaagggacaagaaacacagaggtgagacatagaaaaggaaaacggatctatttaaaccttctcttgtgcccccatgggaatgtcaggcactgcatctgcaggtggcattggtgtggactcctgtcgacacgcaatgtactgtctgtccatcagcaggtctctcttgtgaattcctcctaaccccgccttaaggataaaaacgattcctctgtgggaataatcatcttagtttgtttaagctgatataagaaaaaatccagcagtccgggtgtggtgctcacgcctgtcatcccagcactttgggaggctgaggcaggtagatcacgaggtcaggagatcgagaccatcctgaccaacatggtgaagccccgtctctattaaaaatacaaaattagccaggcgtggtggtggacgcctgtaatcccagctactcgggaggctgaggcaggagagtcgcttgaacccgggaggcggaggttgtggtgagccaagatcacgccactgcactccagccggagtaacaacagcaaaattccgtctcaaaaaaaaaaaaaaaaaaaaaaa

SEQ ID NO: 939 - DNA, 2894 bp, Homo sapiens
  SITE (103): n equals a,t,g, or c
  SITE (2876): n equals a,t,g, or c
atgctgatgttcactgagtgtgtgctggacctgacagccatgaggggaggaaaccctgagctgtgcacatctgctgtgtccttgtaccagatccaggagagtntggtggtggaccagatcagtcagctgagcaaagactgggggcgggtggagcagctggtgttgtacatgaaagcagcacagctcttgcggcttctctgcatcttgccaaagcccagatcaagtccgggaaactgagcccatccacagctgtgaaacaagttgtcaagaatctgaacgaacgatataaattctgcatcaccatgtgcaagaaacttacagaaaagctgaatcgattcttctctgacaaacagaggtttattgatgaaatcaacagtgtgactgcagagaaactcatctataattgtgctgtagaaatggttcagtctgcagccctggatgagatgtttcagcagaccgaagatattgtttatcgctatcataaggcagcccttcttttggaaggcctaagtaggattctacaggaccctgcagatattgaaaatgtgcataaatataaatgtagtattgagagaagactgtcggcgctctgccatagcaccgcaaccgtgtgagcagcaggctcatcccgtggaccggtggtgggaacgtgaggtgatgcctttgggattacagcttgagttctgtcaccccatccccaggaaactgtagcttcttaactggtgactaccaaagaacaagcagtgatttgaaaaaggaaaaacaatccaaaaactacatatttgtaggaaatctgccttattggagaaaatcaccctttccctttttctttgtagaagcaggagcaagagtgtttggctcccagtttggacttggtgaataaatgtaccttagaactaggataatcggtacagttattcttaaagataattaaaaatgaaacaaagtgagtgctcgtcactgggttcatcagagcagtgtgtgaaattccatgtgtttgctgaggtgtaaaggtaaatgtattcacccctcatccaggcagtttgatatttggagtaagtttgtttaaatctgagcatgcatctttaaacagctcaggaagaaatagcttaagaagaagtgaaacatggatcttggaagaaattttgaaatcttcaatttgatcctaatatggatacatgttaatcttccaaaatctttcatattgcactaatttattaaaacaactgtgtattggattttgtaatttaactaaggcacaatggacttgtttaaaatattttacttgattgtatacatagaccctttccagaattcacatgtaatctccagtgaacttttaagtggttaaaacttgtattcatgtgaacctttgcacatttttttttttttacttctttatctacacctacagattttctcagtaatgtttttgktagcttttggttccattttttattgtgcatgcagaatgtacattgatgcctgtgaccttaggtttattaaaggctaggtttatttgggcagtattagaaacaaaatcatggatcaagagatactcttgataatttgaatagggccaaaacaaagttggtgacctaaaggcttgttagtgatgtggagttcctacatgcagtgagtggaaaatgaagttcgttttctcttaggaaaatgggcagctgtcttctgcctaatgtgtatttttcatgttaattctgacagttcaccaaatagctagtcatggagaatgcaggcagttaacttaatatccctccaggaatggttcctacgttgtgtattatttggtttcttttacttacctgcttgaatacttgaataaaccattcaccaattttaatccttttattttaatccttttacataaaataatctgaactctttgacaaattgcacagagctctttggcattaatctaattttaatgtactgataaaaacaaacatggttgtcctttactttgacaaagtaatgtaatttttaccttatttatctgtatgaaattccagtagttaatttgaacatttatttatatgacgtttgtatttttaggtctttaatacagtgtttctacctctcatttgtaactgcatgcattattcttgaaactaggtaaaactcactgaattgttgtgtaatagcctttttattattgcctgtacaaatgtatattaaggtaaaataaaactgacaaagtgtttctagggtgtagctgggtacatattaagtggcttgttgagccaggtacttccttagtgagtttagagacttggccatgaatatcctttgtcctgccccaggatttagatcttggctactgtcatgcaggcttccaggaacatagactgttttacctccacaaccctatttgttattagtgatactttattttatataatattttttattcacagtgaaatttcattcatgttctttcagttatcacctgtgttatctcagttgtaggtttattctatcctctcctcttcctctcccatttcttttttaacacaggatgaaacaggttcagagaggggaagtgattggcctaaagtcaggaactaggcaagtggtcaagccatgctttgtgactttcaagttaattcttcttgttcttgtatattaaaggtcttggggtagatggtgtgtgtgaaacagtgaagtctcaacagcagaaaagaacaaaatgtaaattcatgaataatggttctggttatacttccattatcaaggctaattaagagattttgccttgagtatagcaataataaacaaatattcggcacgagcggcacgagggggggcccggtacccaattcgccctatagtgagtcgtattacaattcactggccgtcgntttacaacgtcgtgactg

SEQ ID NO: 940 - DNA, 837 bp, Homo sapiens
cggcacgagcctaacacccagtaggtgctcactaaatgatgttccttattattatggtgattaccactgtactcttttcagatgaaagtgttcggtcacctggaacctgtgagtatgtggtttttgatctgtgactaaactgttcacccatttcccagtttctctgctctgtcaaatatcaacattttaccaggtttctctgttgttgccaaacctgtcatttttatttggtgtggcttcttgggaaacttccatggcccatttgatgggaatcaaacagtgaaaacaaggacagatgcagcagaggtggcatcaggaacaaatgggtcataagaacttaccttggcagcagccccagaatggtcaggaggaaaggcactttaaggtatcagaaggtagaaaggagaggttggatgatagaatggggaagggattcctcctcgtgttcacagaagtgaatcaatgggagacacaaggttaccacttaatattcctgctctcctaggcatgggtcaggtacatcttcagccatgggtaagtttgttcaacaaatgagtgatctttgggaggctgaggcgggcggatcacgaggtcaggagattgagaccatcctggctaacacgatgaaaccccgtctctactaaaaatacaaaaattagccgggtgtggtggcgggcgcctgtagtcccagctactcgggaggctggggcaggagaatgtcgtgaacctgggaggcagagcttgctgtaagcagagatcgtgccactgcactccagcctgggcgacagagcgagactgcatcccaaaaaaaaaaaaaaaaaaaaaaaaaaaaaaaaa

SEQ ID NO: 941 - DNA, 1377 bp, Homo sapiens
gcacgaggaaatcagaaacaagacaattatttgcagtgctgtcaaacaagccagaaggagaaaatcaaggtagaatgccccactttccagttgccttaggatagcaggctgcagcctcagacttgatcctgtcattctcctctgtctcccacatctgaattgataattgctgcaaaatgtcattagcctacacttcatccatcagggctcttggattcttacaccacgacttgctgtgcaaggtgtttattgcatcttcaaagtgaaactttaaattattattcaaacatttattttccttttgttttaaaaagagtccctacaatgatcacttctaagatttttttttaccttcccctctgcagcacacacagctattcaacaatgatttctaaaattcatatttcaaatttgtatctctccattttgaaacattatagaaagcatgggatgcttgagacaaatctggtttctcctttgaagtagctgttgacaacctactctcttgaaaagttagatataattcttaatcatgtttagtggaaatttgtttacctgtccatctgttttgctgtttcattgtaaggaagatgagaagtgttggaacagcttccctcccctaaaggtattctagcagaggcgagacagcaacttggcgggcatgttgcataggagttaagtaccagatggggaattgcccatgtgatggtgaagagtctctcacattgattttcttccttttctcctcttctctcctccttctcttctctcctctttctcttctcttctttctcttctcttctgtcttcctcttcctcttctcttcctctcctcttcctctttctctctcttcctttttctcttcctctttctctttctctttctctttctcttctcttctctctctcttccttccttctttctttccttccttccttccttccttccttccttctttccctccctccctccctccctcctccctttttctttttctttctttttttttggtttggcagagtcttgctctgttgcccaggctgcagtgcagtggtgtgatctcggctcactgcaacctccacctcccgggttcaagcaattctcttgcctcagcttctccagttactgggactacaggtgcataccaccatgcccggctaatttttgtatttttagtagaggcggggttttgtcatgttggccaggctgatctcaaactcctgacctcaggtgatccgcctgcctcagccttccaaagtgctgagattacaggcatgagccgctgtacccggcctgattttctatgattctgcctttaaaagacagcacgtataccaagcctttttcagaaagcttttctcttaactccttctaatg

SEQ ID NO: 942 - DNA, 1319 bp, Homo sapiens
  SITE (65): n equals a,t,g, or c
  SITE (1298): n equals a,t,g, or c
  SITE (1302): n equals a,t,g, or c
  SITE (1305): n equals a,t,g, or c
  SITE (1319): n equals a,t,g, or c
tgccgaaggcttgtggcctgaccgtgtgtccccctgcagatgagcatcccactgctcctccaggncaaggtggccctcgtggagcgctatgtggccggcttcccggacctccagaggaggctgctggtcctcatggattcctggtgccagcccggctttgacatcaaggacgttgccaggtgagtcccgtggggcgctggcagctggcaccagatggcatcctgggagccctggttagggaagggagtgtaggggggcagcaggcgcgtgggagagctctccccaggaagttctggtgtttgggtcacagctgccatgtgactgcagctggagcagctgcctctggagaggagcggctggggctggcaggagcacagccctcttctcccgagtgaaaagagttaactgctcttagaagaacgaaaataattctccgtggtggctcttctcatgcaggcatggcaaccgtactgctttcttgttcatccattcctttgttctttcatctaataaagtttttggaagcacttggtgtgtgacgtctgtcagcaattacagagaaaaggcagcacctgacaaggagcccatatggtgcctgtatggattcagggaagccatgtgcatgtgtgtgcatgtgtgtgcatgtatgtgtgtgcccatgtgcatgtgtgcctgcaggtgyscatgtgtgtgtctctgtgtgtgcacgtgatatgtgcgtgtgtgcacgtttgtgtgtgcctgtaggtgtgcatgtgtgtgcatgtatgtgtgtgcctgcaggtgtgtgtgtgtgcatgtatatctgtgtgtgcattgtgttcgtttgtgcaggtgtgtatgtctgcgtgcatatgatgtgtacatgtgtgtgcctgcaggtgtacgtgtgttttcgtgcatgtggtgtgtgtgtrcatgtatgtgtgtgcctgtaggtgtgtgtttgtatgtgtgtgtgcatgggtgtgtacgtgtgtgcatgtgtgcctgtgcatgtgtgtgcgtgtggtgtgtgtacatgtatgtgtgtgcacgtgtgtgtgcctgcaggtgtgcgtgtgtgtgcatgtgtgtgcgtgtgtacctgtgtgtgcactgtgttcatgtttgtgcaggtctgtgtgtgcatgcatgtgtgtgtacgtgtgtgtgcctgcaggtgtgcatgtgtgtgtgtgtgagatatgagggatgacatctgggaggggaggggcttcctgctctatatctggtcaaggtgccccgagagtgaagcaagctgaaaggtctgtgaaggctccagggcccggccactngccnganaatcccggcgagcn

SEQ ID NO: 943 - DNA, 2014 bp, Homo sapiens
  SITE (70): n equals a,t,g, or c
  SITE (1324): n equals a,t,g, or c
  SITE (1520): n equals a,t,g, or c
ggaacgtgagcaggagattgaccgctggagggtgaagtgtgtgcaggaggtggaggagaagaagcggganaggaactcaaagcagccgctgatggcgtactatctgaagtgaggaaaaaacaagcagataccaaaagaatggtggacattctacgggctttggagaaattgaggaaactgaggaaagaggctgcagcgaggaaaggggtctgtcctccagcctcagcagatgagacttttacgcatcatcttcagcgactgagaaaactcattaaaaagcgctctgaactgtatgaagctgaagagagagccctcagagttatgctagaaggagaacaagaggaagagaggaaaagagaattagaaaagaaacaaagaaaagaaaaagagaaaattttacttcagaaacgtgaaattgagtccaagttgtttggggatccagatgagttcccacttgctcacctcttggagcctttccgacagtattatctccaagccgagcactccctgccagcgctcatccagatcaggcatgattgggatcagtacctggtgcatccgatcatcccaaaggcaacttcgttccccaaggatgggtccttcccccgctccccagcaacgacatctgggcaactgctgttaagctgcattagtaaagatgctccaggagtgtggtccagccagcgctctttccagctgtaaatattagcgatggtgccatcttttgctgtagactaaactgcaacttctaaattccatgtggcattcccctaccctgaagttatgctttccttctgtgctctgtgctggccagaggtgcctcttgaatcagattaatgtggtttttcaggaaaggacttaggtgaactgaggtttttaccacaggcagtgaatgaccttggttcaccaaatttgcctctgttttgaggggcttggtccagagtgacttgttaatttactctaacttccttgtgtgttgatgggtaagtacactcaaacactgaatacaggtgtgtgatgggtagatttcacagcccttctactaatagtgagtgtgaaggcaagcttgatgcaaaacctcctgamctttcctacctgaagagccctttgacttctaggaagaaaggtcaaaaatgttatcttcagttgtgttaatcccagttttagtgcagcttaggaggctgctagttaggaagatggcagtggctgtaggctgggttgccagaaaagatggtggcctagtcttattattcagatggagaacttagaaaacctgaagagtacccaaattggattgtattttaatggacaatggctgtatttnttccatgttagaaggatcctaatgaaagcacctgttatttttaagtttctaagggtctagttgttcagaatccccaaggatatttccctaacctcactcagtcacattgtaggagccagtgtagctatggaattatcttaggaactcaagcttctaaaactatccatgtagtcaaatctaggggaaaaagcaaatnaaaatagtaaaatttggccgggcacagtgctcacgcctgtaatcccaacactttgggaggccgaggcgggccgatcacgaggtcaggagatcaaggccatcctggctaacacggtgaaaccctgtctctactaaaaatacaaaaaaatattagctgggcgtaggtggtgcacacctgtagtcccagctactggggaggctgaggcaggagaatggtgtaaaacccaggaggcagagcttgcagtgagccgagatcgcgccacggcactccagcctgggagacagagcaagactccgtctcaaaaaaaaaaaaaagtaaaatttattttttatattcattaataaatgctgttgtgcttggagatgatcactcatataacatgtcatttttttggttctgttttggtttggtttttgccaattattttgttatatttccaaaaaactaaataaaaatcatttttattttttaaaaaaaaaaaaaaaaaaaaaaac

SEQ ID NO: 944 - DNA, 1200 bp, Homo sapiens
gatgaaatgtagcttattgttttcagctagtttaaattggtcttgagacaaatggaaatttgtttcttaattacaggctctagatgactttatagaacatctctgggctattatcaagtacttgcttaagaaggacaattccacttgaattatatattttataccccaaaggaaaataagtttaaatttaattttaaccagatgatgccatctgcatggagtcactctgttgtcgtgtccacacgtccaggatatgtttaatgaatggtgtttgtttactttattggtcttagccaaatgagtaaagacctggagactgggcaatttgagaagacatttaggaatccctggcttttctctgttgatgccaccatataagctaaggatgacagtgggtagggaatgtgtgtggaattcctgtgtgattcactgtaactgtggtgtgctaaatgcatggttaagctagygtmagcatcstcttcctgtaagttaaagatcccttctgtgagcaggactcctgcgtactcatgtatattttgaaatatgctttacaggatattttaggacttaataaaagatgactgatgtgtaaggggacttaaaaggaagaaaaaccccttcttctgtagggtagcatatttgggattataattttcattttctttaggttggtttcatwtaacttttttttttttttttttgagtcagggtcgtgctctgtcgcccaggctgtagtgcatggcacgatctcggctcatgcaattccgcctcccaggagaattgcttgaacccaggaggcagaggttgcagtgagccgagatcatgccattgcaccccgactctgggcaacagagccagactctgtctcgggggaaacaaaaaaaaagtgtgctttgtcaagagaagcaccagcagacctctaagaactgctctctaaggctgcggtagcaaattatctactattgcaggtgccttattggtagagggctctgaagagccaaaactgtatatgcaacacttgtaagataaaagggactttaataatcaagattttcttgaagatttgttagaaataatgtcttatttctggtaacctttccctttttgtatttataactctactaaccaaattacctatcaataaaccattactataatattttaaaacaaaaaaaaaaaaaaaaaaaaaaaaactcgtag

SEQ ID NO: 945 - DNA, 1295 bp, Homo sapiens
tatgaatttatacactgagtcttgtcttgtgtcctcttttcctagcaaacaatatggcatctaaaacccagttctactctgaataattttttctttacaagatgctacagtatgatacaccatgcccacctggagagaggataaaggtgatggtggtaggacagaatttccatccgcaatctccgttttgagcaaagaagcatggaggatggaagtcattgctgggaccccggagtagagtggtggtgggggaacagggggaacatcagactgccgaggtatgagtttgggttctcatcttcttcccaggaggcttttgaaaccccaggatgatgcctcctagagccttgctgtcaaattcaataggcaataacatgaaggatttactcagccaggctcatgagaccagctctgaggaagctgtgcttttcttgtactgatcggtgatgtgcatcaccctaagggatagtaaacagatgaaacccagaaagtccagtcaaaagagcaccctctgggawtgaagrtctagtgaagactggggagacagatgaggaaagatcctgaacaggagccactcattccagctttgtctccatagcctgcccgcccacgatggatgaagtgcgtggaggagacaggcacgttcttcgagcccacgctggcggctttgtttgttcgtgaggcctttggcccgagcacccgaagtgctgtatgtgagagctcttcccagcccacatccctccaccccttcctacccaaagcagccttccctcttctattaactttgactttctcagtggtgtgtgtgattggggaattgggcastcagagaagggcyactgasagagggaacccaaaggcctgctccatccctggtgtggaaacagttcagcttcaggccacaaattctccatgacatgctctcacttggacaagtcacccaactttcctggtcttgtgtttcttcaaccatcaaatgagaaaatcgagccaggctcggtggctcacacctgtaatcccagcactttgggaggctgaggtgggcggatcacctgaggtcaggagttcaagaccagcctgaccaacatggagaaaccccatctctactaaaaatacaaaattagctgggcgtggtggtgcatgcctgtaatcccagctactcgggaggccgaggcaggcgaatcgcttgaacctgggcggcagaggttgcagtgagccgagatcacgccattgtactctagcctgggtgacaagagtgaaactccatctccaaaaaaaaaaaaaaaaaaacctca

SEQ ID NO: 946 - DNA, 2163 bp, Homo sapiens
ttttttttttttttttttctgaagtggtgaattttaatattgtataaaaaatccaacttgttccacaagtacatatgtcctatgattttatgcatacatccatatacatatatcaaggtaaagtccaatacaaaaaaacagcatttcctatggccagtgttctacagaagtaagactgtgcaaactttatcgtatagtcaaatgagattgcacactaaggcaggatgaggcagaagcaagttgtgtccacagtatattacaaaataccttgcatagcttattcattctcacctggtaaattcatcttagaattctgaaggatttttttcctagataaatttatacaagttagtgtatacttcttgtctttgttctgtggcaaaccaggtttctcagtactgattgttttacttcacaacattattgatttaacaatagcctgagctttggggctctgcactgcgttcattgtaatccgtgatacaatgactacaaatgtgtcgcgatttctaatcttcatctgtatctcaggcgattttccagggcttccattctctgtgtcatttcttctaagcgctgtgttaattttcttacttcttcgtttgcaaggttctggaacattataaggttttcacatttgcattgatcgtgtttttcttccaaagggcttcctgaaggttttgttgaatgggaaagcttttgtgtagaccgtaaaagattgtcttcttcaaacagatatctgtgttgcactgttggctgttggaccatttttggcagttcccctgctggagagtcctgtcttccatcggagtcttctagagcttcacagatgcctttcttgagtttttcacttatctcatccattgtgctgaagtcttcggcatagaagagatgcttgtttgtgggctcagaggcaatctcttgtagttcctcctcaatggcttttcctaccccaacagcatacatagtgataccattggccttggctttactggcccactcggagacgtcatcctgagcccgtccgtcggtgaacacaatggctgctctgggcacccttgtggaaaggggcctggccccttctccttgggtaaaacttctctcaaacatgtgtttcagggccagcccagtcatagagccctttcccatgtatttcatgtgggccacggcttttttcatgtctttggctgagttgaagtttctcagagtgaactctgtgtggacctgtgtggaatactggagcagccccactcgagcggctttgggggaaattgtcaaggaatctataattccagtgacaaactgcttcacgacctcaaaattctcttctccaagactcttggatccatcgatcacaaagaccaggtcaattgggccttcagtgcatttcttgcaccgtcttccgtcctcagctagaacaaatccctctgagcatttgcagatgtaggaattcccattattaacacaaatgtgttcgcagccatggtgggttgatttgcagacatccttccttcggcagcgtttcccatcctcagtgagccggaatccctccaagcactcgcacgtgtatgagtcgtcactgttcacacaaatgtgttcacagccatggtctatagcttggcagacatctttccttctgcaggtttttccatcttcacggagtatataaccttcaaagcactggcacacaaacgaatcttcactgcttacacacgaatgttcacaaccgtggtcccccagagcacaagagtccaattttgcacacgtcttcccatcgctgcggagcacgtgtccctcaggacactgacaggcaaaggatctgtccatgttgacacaggagtattcacaaccatggtcactcagcaggcagtaatccacccgggagcaggtcttgaggtcctcgttgatgaggaagccttctgagcactggcagacgaaggaatcctccgtgttcagacacagctgctcacagccatggtcctgctgtgcacagtggtccactcggctgcaggttttgccattggggtccagagtgtagccacggtggcagcggcagtagtagctctcctccatgttgacgcactcatgctcacagcccggtttgttcagtgcacagtagttgatccttctgcaggttttcttatctggattcaggctcgtgcc

SEQ ID NO: 947 - DNA, 1781 bp, Homo sapiens
aggggaagggaggcgaaggcctgaggttttccatcttcattctcttttgttattaggagaaggtgaggcatgggccaatcccattcctgccttccagtgccccaccacccttctgatcttaggggttggatgggtcatctgtccttggtcagaattttctcaccctagtactcctactggcctgaccagggctgactgggtattctaatgaggagctgggaagtggggtgacatagctgaccttagtatcaacccccctcttctccaactcttgttttctagtccaggatatgctaaaggacgaagattttctattgtttccaggccctcagaccatccttgctgtcccttcaccctccatgcccctgccatcctcactcacttctcataaatggatctgggggttagagtggaggaaataaaatcctgaagtggttgtcagtgcttgtgggatgcagtggtcttcaggattctccccgcattattatgtagttgttcagaagctgttgctactgcgtctctctgtctgcagggggcacttgttcctgaggtcctcgcctgggtcctgacttctgtagtttctgtgaagacgtggctgtcctgtgggctcctgtgtgtgctggctgcgccctgagctccgagacagctgcccataacctgctaaggtcagggcccagggcccccccacagcatggctgagggaccccttcccagtagggctgtcccaagccccactccatggggccaggtttcctggccacttttgttgatagcagatggatcaatattagtaaccccatccaagattgaactgtgaaagagaggttccaggggtatctccctcagtgccagttacttagtgatgtgttacccaggatgcagcaggtgtgtgcaggtatcttgctctctaggcctgtgtgtgtgtgtgagtgtgtgtgtatatgggtgtgggtgtgtttgtgtgtggtggttgtggggggggtgttggaggttctatttcatttaaaaatgtattcatttccctggccccacagatgcttccctccatactttttatttgctctgtttcctcagatttattttgtcttgccccattgcctctccttccttgaactctttccttttcaatctcaactcattcactgctgttgctcatttgcccttttccatgtattttttcctacttaggattttccactctatctttgtggttcatgaggactttgcctcttctcctgcctcattccctgactttctctagttagatgtcagtcctaaataggttttcctcacttcaggcctcacccctcaccttgtttttttgggggctccagggaccaatctggggctggaaatgttaggaggttgccttggtgctgccccagatctgtccagcagggggcagtaagtgatcttggtagtatccctggctgctaagcccttggcaggggtggtcctttctacattcccattcacttaacagctcttttgggattgggtgtttcattccatttctgcccactccctctcctctcctctctggtaggtttaattttatgctttccctgattccagctttctgcttcctgaggactcccgctccccccaccccaaagtttgtctgtggtgttatagtggtaactgcagttcctcctctggaatgtagactgtatatgtttaatactcaccttctctatccttgctcaaaatgtgggataacgcgatgactgtgaccctggttggaaattaaacttgttttatgcaaaaaaaaaaaaaaaaaa

SEQ ID NO: 948 - DNA, 2151 bp, Homo sapiens
aaaggcacgcaaaacggaaaagcgtgtgtaggggagcggaaaaggaagtcaccaccgtggcctgcgacgaaatggcgaaaagtcttttgaagacagcctctctgtctggaaggacaaaattgctacatcaaacaggattgtcactttatagtacatcccatggattttatgaggaagaagtgaaaaaaacacttcagcagtttcctggtggatccattgaccttcagaaggaagacaatggcattggcattcttactctgaacaatccaagtagaatgaatgccttttcaggtgttatgatgctacaacttctggaaaaagtaattgaattggaaaattggacagaggggaaaggcctcattgtccgtggggcaaaaaatactttctcttcaggatctgatctgaatgctgtgaaatcactaggaactccagaggatggaatggccgtatgcatgttcatgcaaaacaccttaacaagatttatgagacttcctttaataagtgttgcgctggttcaaggttgggcattgggtggaggagcagaatttactacagcatgtgatttcaggttaatgactccagagagtaagatcagattcgtccacaaagagatgggcataataccaagctggggtggcaccacccggctagttgaaataatcggaagtagacaagctctcaaagtgttgagtggggcccttaaactgggattcaaaaaatgctctaaacataggaatggttgaagaggtcttgcagtcttcagatgaaactaaatctctagaagaggcacaagaatggctaaagcaattcatccaagggccaccggaagtaattagagctttgaaaaaatctgtttgttcaggcagagagctatatttggaggaagcattacagaacgaaagagatcttttaggaacagtttggggtgggcctgcaaatttagaggctattgctaagaaaggaaaatttaataaataattggtttttcgtgtggatgtactccaagtaaagctccagtgactaatatgtataaatgttaaatgatattaaatatgaacatcagaattactttgaaggctactattaatatgcagacttacttttaatcatttgaatatctgaactcatttacctcatttcttgccaattactcacttgggtatttactgcgtaatctggaacatttagctaaaatatacacttttggcttaaaaattattgctgtcaattccaataataattcttagcttataaccaaagagcagtgtttaaaaggagagcttctatacaaaacctattcctggcgttacttttcatacaatttttgttctgttttacctggaaataatttaccaaaataactgagtgttgctgctaaagaacaaaagtggggaggtatcagggaacaagaaaacaagaaagggtatgatcaatcattttcttctgctccaaacagctggagtaaaattcatgggaaatggcccttcatttaaaaaaagatgtacctcactacccactacaaatttggaactttgttcttttcaataattagttttctattgtaaattacctactaaacagtggtagccatgacatggaaagtcaactgattctacaattggacattcatttgtgtgccctggaatttccaactagtaataaacaactactgttgatgtagttttaaaccacttgaagggactcatgaagcatcctgcaacataaatttgcatttttacatcagatttcttttttttcctgaaaaacaactaaccttctaacaactatctttcaaaagtaaatgtaataaaaatgcacaacataaaatgtttatgatcccagcaatacactttttaaaaaatgtgaaagtcaaagaattaagttctagttctgactcatcacaagaggtcaaaagtatttgctactgtaacattcaattcacatttgagaatcatggtaaaaataacttgtatttgccttaccatcatgatcctactgttgagttaggaaaatatggttagacagactcacattactttttttcagaggtaaactctagattactgtgtcaacccaatactatttggccatagatgtaaaaactaccaaataaaagtggattttgtggtctacaaaaaaaaaaaaaaaaaa

SEQ ID NO: 949 - DNA, 1829 bp, Homo sapiens
cggcacgagattggagcctatttagtggattttatgcagccaaagatgtttcttgttgttgttgttgttcttgcttttaactaatttgcctcccaggagacagttgaaatgtctagagacattttgattattatgcctggcaggacgccactagtggcatctagtggatggagggtaagggtgctgctaagcgtcctcccatacacaggacagcaccccccacaaagaattatccaaccccaaatgtcagtagtgctgaggctgagaaaccccactctgctctctaaccaaaattagacacagaaagtggagacattctaccaccctgacaacatcaatggcttttgcccatttaaaacaagaaagaggaatatgtatccaacccaaaacaacatcttaacattctttctaataggcttttgcaaaaatagttcatattttataactgtcttgcagcatggggtataagtgtaatcattgtaaaaatgaaacctaatcattgtaaaaatgaaacctaatcatggtaaaaatgaaaagagtgcctcaaaacatctgaagttcttagcaaaaggcagcctgtcttcagtgggcacttttggatggaggcaggactagggtatcagtaggagtgagaacaaaggtcagaaaaatgagtacacagcacatgtatactgattaatttctttcttttttccttcttttgatggagcaagactgtaacagaagcctgagagtgaggaagggctttggcaactattactgtagacacagtagtttactcaattttatgaactcttagtcctgggctggaattcacgcctctgctggaattgcacagacaaaacgtgcttgcgaggagtaaggtggcaacaaaagaaaaatgcaggcaaaaacacgcctcattttgaaaccggatctgagcatcctagagccagagcctctcccagccaacattgctgagttgagcagagtgacagactccacactggagccagccccgcagctggccataaggaggagccacgagcaggtgctgggaagacaggcttttgaacgcacactatgctgatgtctctttctgtgaagttttctacatgagtgacgttctcaaagtctgcaacacagtctgccatgagatgccttttttcctctgggaacacaatgctactttcgtgattggctgagtaatggcccccaaagatgtactcttcatcctaatccctggaacctgtaaacatgttaccttatatggcaaaagagacttcgggcaggcacctgtcatcccagatactcaggaggctgaggcaaaagaatcgctcaaacctgggaggcggaggttgcagggagccaagattgtgccaatgcactccagcctgagcaacaaagtgagactctgtctctaaaaaaaaaaaaaaaatttctcagatgtgactcagtgaaggattttgagatggggagagtatcttggattagccaggtctgtgagaactcctgacgtctgaagcttgactcccaagtttccatagcaacaggaaaaaaaaaaatctatccaaatctgaagattgcggtttacagctatcgaacttcacaactaggcctcaattgttccggttttttattttctttacaatttcacttagtctgtacttcatcattttgacagcatcttcctccctcctttaattaatggaatcttctgaattttccctgaatgtttaaagatcatgacatatgacttgatcttctgggagcaggaacaatgactactttttctggtgtgttaacatgtcggtgccgaattcgatatcaagcttatcgataccgtcgac

SEQ ID NO: 950 - DNA, 1581 bp, Homo sapiens
tttagtgtaaattggcaaattttatttaaacctaatgaatccatgtaagactggactgtactgtctcgattatggagtctcattataacagcatccttaggggttacattgtggcactacctaaaaggtaaaagtgctgcaataagggctctgcaggcaattccatcacaaaaccccatggaataggatcacctcccaccaatcttttgctaagcactactctctggtaaagagtacagaagtttcaatgttttgatttttttttttccaggttggcatgatacaaatggcagcacacaaaaacaatgttaaaaaataaaccaaataaaaggctgtacacaagaacttatgtttattgcaaacaaacaaacaaaaaaaaaaggaaagagaggaaaagagaaaatggtcagaagcacaacatataaggttaagaatttaaaagcatcttacattctgccctaatggcagcataattaatagcaacaaacggccgtcttgctgcctgccgcagccggagggtatttttgcagacctgacgagcaaattttgtgaaatatgtagtatgaaggaagaaagcttggcgggtcttcactgcagactttggactcccagtgtttcggactggcattccctgcatggcctggcgggacacgtgacttctaacacgagggtcctctgtagttgggctaggagataacttctcttcttctgactgggtgggcattttcaagcctccatattttttccaataaagccaacaaattgcacataatctacactgcatattaggtgggccccaagaataccactggtgagactgtgtagcatagcagctctcacaggctctccctaagagaggattctgaggctggaacgtggtccccacagctccattcacagcaccaggcttcccattactagtggatatttggttgggatttggtttgctgtaggttgggatatatacttgtttcagtttactctcagcttctgctgcttttagacgtttctgttgcacatatctgtcagtagttttccacatgtaataatattcaatgatgctagtcaatgatttccaaggaagaaaatcttgccgtatgtcattgaagtctttgccatatttttccagtgcctcttcaaataagctagcttcagaggctgaccattcctccatttcatctctgcataaaacaggtcctccgagtggtactaagacactaatggcactgctcaaatcatagctgtgtctatacaatgtatccatagcgtgaaacaaggtgatgtctcgggaagctgcagcagcactcatatgcaaactaggctgcctcacagaactgctgcaatccagggctctggcgaatgtcccaacagcacgtgctacaactaaaaactggtcaatctgtcgatccgtaagtgggctatttggatcccaaactttaacttccaattttgattgttccctctcatctgattctccttctaacagcatttctggaatgtctgcttgatatctaggtcccactctgatttcacctcgtgccgaattcgatatcaagcttatcgataccgtcgacctccgag

SEQ ID NO: 951 - DNA, 1263 bp, Homo sapiens
ggcacgagccagaaataaatggcctaaatggaggaggaaagacccaaagtcttcctctaatgtgttctgtctccaagcagtgaagagaatgctttggttttaaactagttaatcagaatgatatagccctccttcctggaatgaacctttctcactgccccccttctccaactgttggtatgtctcaatagttccttccccacatatgcaagaggctgccagaatcttagaaatagcagcctggtcttcagaaactctcccctagttcctacctttcctcctcctcccctggctctactctctcctcactgtctaagactattctgagttgtggatactggacactgtattttgaaccagttctttggctctcttctcagccamctgatcatttattaggcatatctctttggtggttcatcctactttctctccagatatcatctggattcctggtatatctttgtgggggtggggagcagccctaccctgtaactgtaccttgtccagctcctcaaatccaagtttctcagaacccagggcttgaaaggaaarattcaacactaaagctgtagctaataaacacacagggttggaagttacccagcatacttgtagacatagaaaccttggccagaaaagcaatgacttgtccaagtcactgagaatagtaaatgacacagaactgaagtcccacagtgtctggttattgtttttaatgtaaatgtactactgtactatagcatacatacacaaaggcaaacaaatcagaaatatacagattgagtctctgaatgaagtttacattttggttctgaggatgaagctcggaattttttatcttgcccaaattcctatctaaggggtctgggggagtatgccctagaaaccacaaattctcatcacatgggttttatttaaccttgcatatcatgacttattttccaatctgactttggcataacaaggaaaaaaatcaaaatgttttaccccaaaatatatttccttgccataccttgaaattgccctgcaaagtctctcgtgggaaaaatccacattatatggagaatctccttccccctttgttttccttcgtctctttccagatccgggagataatcagctaagagccaggcaccgctttaggtctgataagaaacattttacaacctgctcgctctctgaagtctgctttctgagagattcctctgcacaatacaacctcgtgccgaattcgatatcaagcttatcgataccgtcgac

SEQ ID NO: 952 - DNA, 1347 bp, Homo sapiens
ggcacgagggaaactccatggccccatcctcgccagatagcgatccctagtgaatggcatagatgttgttcagatttactttgaaagaatcaagtatgtgaatggatggatgaatggaattgtgaagcacagatgagctctttcacactccaaggacacagctcatcctatgcttttggacacttcttccctgtttattacaatgactattctccaggttgttgcactaccgctgtatctgtacataattctaacttggcacctgtggccttttttgtgctcttatgtgtctgtatttcccggcagagtatacgcccttgaatgccaggaacttgtttccttagtcttttttatatatctagcatataagatattgcttagaatatggtagacatcactgaagatttgtttcagtagttcatattttgtaatgatactgaatggttaaacaatccctttctaatctgtctagcatatatgtgacttttgtttatcaagtgtcacacaactgcttcaaggcagctgtgagatactagaaaccaaaattcttactcctatgtctgtgtcatcccagatgtgtgcttccagatggcagtatactacactatctgtaaaatatatttgcaaagccaggcacagtgttacgcgtctgcctcaggaggctgaggcagaagaatagcttgagcccaggagctttagtctagcctgagcaatataatgagactccgtctcttaaaatatttgcccaaacattgaacctaaatttgaccatgcccctagaaataattcctaatctttagaaaatagggcagagaaacattattttacaccatggagatgagatcagcagaatccagactataagaaactacaggacacatgacctagtttcttctgtaaataacttgcaaggatgaaagatggaggatgaacctatagatttaaagagacttaagagacatattaaccaattgttaattggatcttatttgaattgtgatttgaccgaactgtaaaacgaatacatttatgagacaatcggggtaatttgaacattggtggggtatttggtattagaataatggttttatcattatgttagaaagaagggtcctcatctacattctcaaacatctgtggctgatatgatatgattcttggaatttgcttcaaaataataagtctggatgttaagtgcattggaaatattgatgaaacgaaattggccttgataattgttgaagctgggtgatggctaaaatgatggttcattatatatgttcatctctatttttgtatgtttggcctcgtgccgaattcgatatcaagcttatcgataccgtcgac

SEQ ID NO: 953 - DNA, 1277 bp, Homo sapiens
  SITE (150): n equals a,t,g, or c
ggcacagcagctactcaggaggctgagatggaaggattgcttgagctcaggaggtcgaggctgcagtgagctgtgatcatgccactgtactccagcctgggtgacagggcaagtccctgtctcaaaaaaaaaaaagaaagctgtgtgctnaaatactattttaagcaattataatggattaaaaactcctttaatcttcacaacaatgttttttctttctttttttttgagatggagttctttgaaactcttggattaaatgactcttcagagctttctttgctttttgatactaaggagtggcatgtctggggatttttatagcaaataattyctccttggctactatccttagaattccaagtgtttttaatgaaaagaggagacttgtttttagtgatgttagttgtttttaggaaaggtgttctgcagtgtttttcgctaaggtggctcacgcctgtaatcccagcactttgggaggccgaggtaggcagatcacttgaggttaggagtttgaggccagcctggccagcacagcaaaaccctatctactgaaaatacacaaagtagccaggtgtggtagtacactcctggagtcctagctactcaggaggctgaggcaggagatgacttgaacccgggaggcagaggttgcagtgagcctagatcgcactattgcattccagcctggacgacagagtgagactgtcttaaaaaaaaaaaaaaaaacataaaatggagaggtagaccagcttacgggaggtgttgcacttccctctgccactggagagactctggatctgcagccagggagcttgtgaaggcttcttgtccacggaaatgagggcggcagttgtgactttctggatggtggcccagaggaagcaacactggcagagcctcttctgtgaagcagctctgagagcaattttgtgacattgaaagagcaaaggataaaacgttgaaagctgatccagatctagaaaagtgtttggcaattgctggaaaaggtgtagaaatgatgcttgctctgtatcgtaagttatatggtgagaagaccacaagcacggttcaaactcccctcagaaattcttttgcacagaaattaacactttaatcctaaatgtttccaatgttttaacttacagtatgctaaataaacattctttctgtttgtttgttttgttttgttttgttactctgtgcatttatagccaatagagtttttctctcgtgccgaattcgatatcaagcttatcgataccgtcgacctcgag

SEQ ID NO: 954 - DNA, 1456 bp, Homo sapiens
gcccttattagatgcccaatcttctaggcaacataactacaagccaaataaaccttttttctttataaattacccagccttagctattcctttatagcaatacaaaatagactaagaagacatgtggcctgtggaccaaatctgatgtgctgtttttgtgaataaagttttcttgagacacaggtacactcattcattacatattgtccatggctgctttcacactacarcagcagaggtgaatagtcatagcacatactgtatggcctgcaagctmaaactgtttactatctggtgctttacaggcaaagctttgccaacctctgrgtttaattgattggggttaatattattcattcatttgtttattcatctatttaacagacagttaacaagtagctaccatttgccagacactattttaagatctaaggttatagcactagttacattattagacaagyytatgatcctcaatttcttaatctagtactacgtatgtttgtcttttatttatttggggtagactatgctctgaagtttttataatgagatatgtacctctatgccttggtttagggtctcccacaagcagaccttcaggcagttgttttggtggaggcatcttatttggatggtaagaaaacatgaacaggagtggggaagtatgaarggaaagggaaggcagtcaaaaaagagttaattaccaagccacctgccatagtgcgtgatagaaacttaaycccctgaagaaactctgggaaatctgtaagcacacaactcagaaacacctcacctaagggctgaggagcagaggaatttataatccaactcttaagtgtcatcggtagatactcatgtgtgtgtatgtatgcggggggcaagaggtgggatggtttgattctttgtttgccttgkatggtgaatgcctccatatcaataaactccattacccagcactatattttgctcccttcccctaccccaagggtacagaactctcaaagttcactgccacacctgttttcctagtttcggtagctacctattaaccagaacttgaaacacagttattaaataattctttacttcttgaagcagagtaagtgcttccttactcaagccatattagaacgtggggacagatcttgaggaaggcaagtatcatctcccaaggctgcctcctaggtgaagcttctgcttggtctcccagcaaggaaaggatgctatattctaagaataagatgtggataacttctgaagtctcagagggttaaggagaatctgagagttcaagagtctggagtgcatttacacagatgtccctctccctggacatatctcagggttttccatcttctttatctatgctctgccttagaatgttggctggggctgttgcttcaacactcgtgccgaattcgatatcaagcttatcgataccgtcgacctcgag

SEQ ID NO: 955 - DNA, 1728 bp, Homo sapiens
ggcacgagaggccaccggagcccacagctcaacaggcttgggtccccttccatgctgtgggaagtttgttctttcgctttttgcaacatagcttgctgctgctcactctttggtttcgtgccgcctttaagcgctgtaacactcactgcgaagtctgcaacttcacttctgaggccagccagaccatgaacccactgggaggaataagcaactctggacacaccatctttaagaattgttaacactcaccaggagggtctgcggcttcattcttaaactcagcgagaccaagaacccaccaattccggacactgtggagagggaccagtggtgggcagggctccagaactccaaagatcgtatgttctttgtcttctgctaccaggtggatatggaaggaccatcaggtgggggtggggctaggcgtgcctgagctcagactctccttgggtgggtcttgctttggctgctgtgggggatggaggtgagattcccaggtcagtggagttgtgtacctagaaggattatggctgcctctgctgagtcatgcaggttgtcagggaagttggggaaagctagcttccatgcacactgaaaggctggtctcactcccacaatgccccttgtgatagcccggagtctgtttccaggccgaaggcgaatctggcttgaaaacttacctgaggctttctgcctcccgaatgacaaagaaatgggcttcagttcttaccccgcctgtgaagtctgcaagcctgattcacgccctcccccgagttctggccgggaggcttccagccccattcaattttttacaaagttcagctagagaggttcttctccctgtgaagttttaccccctgctcctctggccacccccctgatggatgtctgccgtgccaggcaggaatgggctacttggggatccagcggccttccagtgcctttgtgctacttcctctactcctgtatgttgctcagctcggctctctaacttgactcagctccaggtaaagtcacgaacttctcccacaaacagactttcagcttctccagtgggggtgtgtgttcatgagacgagggtctccctttcccatttccgtggttaggggacttaaagtatttggggtgtctcccaggtcctgcaagagcagtctgcttccttcggagggtctgtgggtcctgtcaggattgctggtctgctcttgcagtccatctggagctaaaattcacaacgcaagcctccgcatgctgctctgtccagagctgccatctagttctgcctcctgtctgtcataatccctcatgacccttgagctttttttttcatatgattgttggcagcatgtatgtcttcttttgagaagtgtctgatcaagtttttgcctatttttaaaggttttttttttttgtaaatttgtttaagttccttgtagatgctgtatattggatctttgtcgaatgcatagcttgcaaaagttttctcccattctgcaggttgtctttttgctctgttaatagtttcttttgctgcccagaagctccttagtttaattacatcccattcgtctatttttgcttttgtcacaattgcttttggtgtcattgttataaaattttcgtcccgtgcctatgtcctgaatggtattgcctaggttgtcttccagggtttttatagttttgtgctcgtgccgaattcgatatcaagcttatcgataccgtcgacctcga

SEQ ID NO: 956 - DNA, 498 bp, Homo sapiens
aaacgatggaccctctgccctgtggcctccctcacatctattactgtactttcacactcctacagttgagcaatacttctctgaactcatgtctctatcaaaaagtgagagagtgctctgcctctggctagctttgccaacaacacgccctgccctctgcagacatgtcagcctttgcccaacacctaagggtgaaatacagcatccaacagcacagcaggcagcatgccaacagcacccgcccctgggaagccccaggtgctccccagagccacaccgggcgttgataacattctctgcatccgggaatcaggccctggcctccctctcccctcctcccctcctctctccattccccccggatcctcaggatctgttcccatggcttcaatattcccttgcatacagatcacccaaagctgtcctcgggatgccctgcccgagcccctcaaaccgtcctcgtgccgaattcgatatcaagcttatcgataccgtcga

SEQ ID NO: 957 - DNA, 502 bp, Homo sapiens
ggcacgaggttcagggtaaatgtctagtgtcaaagttctggcaggctttactggggaaagtggtccccagttggtgtgagaaaaaaaaaaagtagaaatgctgattcccatgatctggtaggattttgattctgcttctgaatggctgaaaagctttccaaaacagcttccatggtttatgccacttttatttatgtctcttactcttttgtggcagagtggttgcagtaggaagtgaaggaaaaaatttatccttaccacaccttcctcccaaaccctgttagttcaactaggtaataagcccaccattaggatgcctcagaccataaggagctgttcatttcaggactgttcctcaggatatgggcattgatttagttaatttggcaagtcttcacaagtattatcttttaaagtaagacctacacaaaaagaagcagtctcattagaagaactctgagctcgtgccgaattcgatatcaagcttatcgataccgtcgac

SEQ ID NO: 958 - DNA, 1099 bp, Homo sapiens
gtggcactccagctggtcctgcataggaccgagcctgkgsctgtggctyctcaggcagagtggcaggtgtttgcagtaagcagtgtcagctattactactttatatttgactgatactataacaccagtatgatcttcctaaatcatataacaaaatctaagttaaaataacaaaaatgaaatacaatgactattcatgggtatttggtattgtgctaagtcctagacagttatttggataattgcaacaatatttacaccgtgacatggtttggctgtgccccacccaaatctcatctggaattgtagctcccataattcccacacgtcatgggatggacctggtgagaggtaattgaatcacaggggtgggttttycctgtgttgctatcatgctagtgattaagtctcatgagatctgatggttttataaacggcagttcccctgcacacactctcttgcctgccaccatgtaagacatgcctttgcccctcctttgtcttctgccatgattgtgaggcctccacagccatgctgaactgtgagtccattaaacctctttcctttataaattacccactcttggatatgtctttattagcagcatgagaatggactaatatacactggaaactgagacttcatttggtcatttttgacaccatgccaccagaataaaacaggtacaggataatggatcctaccattgattggaaatgatcatctgcaggaagagcaccaatggaatacaaagggtggaacccaaatgcctctatttcagcatgtccagtgtcaaatgttcaaagaattgtatagcactttatataaataagactccaataattaaacttttctatatttctctgtcacttaagggatcttggaagctgagtttcctttggcgccaaagagaacatggactggacagaagaatttggaagtcataagtacaaactataactttaggatttgttacagaaataagtattgtatcttctactatattttcatttttatggttttataaataattctaaaatgcagctaatttctcgtgccgaattcgatatcaagcttatcgataccgtcgacctcgag

SEQ ID NO: 959 - DNA, 1757 bp, Homo sapiens
  SITE (10): n equals a,t,g, or c
  SITE (1293): n equals a,t,g, or c
ccccagtccnttaaccatcccacacttaacctagggcgtttgctttgtctttgaacgtcctcacagttttagatatgttaagctgtaaaaagttttaaccttttctaaactacttttgcttttmcctttcgttttcctccttttggtttttgtattatcagtacagtcaatatctgattgcagttacagatcccaaatctgatgatttggaactagtatcaggtctaaactttgaattcccagttgtttcagagattttcacattttccaattcaggatgcgatctcttcctttttacttccttctctgctgtttcctgtgaatcatgaatcacttttgtcttactaaaaggagcctttccataggtcctgagtcttctgccattccacctgcgcagccataattcagttccacttcaaaattattctctgcagtagctttttgtgccaaggttgactctgaagaaaatgtcctatcagtctcactccctggaatatgactttttgawtcttctcctgaagatgtaacagaggaactttttcttttagaaggtgcatctattttgtgaatattggtatgcctgtgcttgtgttctgaattcmacatatcttcaragtctgagtctccatttagagcctgactaagcacttttgtactaccttcggagtcaggatcaggtggcttgccttcacaggcatactgttcacttggtacttcacaatgtacacttccttcacaatcactcaatttcttcttagctgtagtacaagcaagatggagaggttttttccttccatttttgcttctagtgtgcacattttctaaactgacatcttctacatcactcatgagcttgatcttattggcagccgtagctgcacatcttcgagtaatcctcaggagacctgttctggcttttgatgatttcttaaccacctgtaaactactgtctgagtcactggaacagacccttttcctggaaatttttctgcttagtccattgtcttgtgatgcagaatctaaaagttaaagagcagatttctattaatcttttgtaagtctaaaggaattatatgttcaatattaaaaacaagttcagaattcgtattaatttgaagggggtattgcagtgaatggaatggtacacacctattagtatagtcatatgttgctcaacagcaaggatacgttctgagaaatgcatcgttaggctatttcgtcttaagcaaacatcacagagtgtgcttacacaaaccttacagtacaccctactacacatctaggttatatggnatagcctattactyctaggctacaaacctgtatgacatgctactgktctgaatcctgcaggcagttgtcacacaatggkaagtctgtgtctgtgtatccaaacagaaaaggtaatgcactgcactaggacttgaggacagctatgattacttcactaagcaatggaaatttttaaccttcattataatcttatgagaccaccactgttatgcagcacatgactgtactttaaagcagtaactttttcatcctcagcaccattcacaaattcaacacattctcaataacatcccatgatcttgacactataatattaacatgaatacaactaaactgtttaccatagcactagcatatgcaaagtaatcacttaacactcagcctctctgaaactccccgtaactccccaagctccaactcgtgccgaattcgatatcaagcttatcgataccgtcgacctcgag

SEQ ID NO: 960 - DNA, 1326 bp, Homo sapiens
ggcacgaggccgcctcaggtctggggtaaaatctcacggagggtggcaatgaggaaagcctgagttattttccttcacagaataatttgtctcccatgagggtttttttattaagggtctgggtcacctctctcctgtggccgggggcgctgctgtcagctgttgctaattaacccatatttgggcagccagaccccgcaaagcccatgtactttcctgaaccttcagagtaaatgccatgcatcagcaccaaacacaaagcctgcgcctggctctgacatttggagagcttaccctgcatgtactttaccttaaagctattgacagtaggagattaaagtcctcgtgatgcatcctcccaaggcagtggacaacagagccagcaccagacagagcatgcgaactcaggagtcacagtttagcggccaaactcagggctcaccctgggcctctggaaaacgctgggcctgatgagccatggcccacactgcagttttgacactccacggaggtgccaagatctttggagaatggtgagaggctggatgtgttaagatgcataccacaaagtgtagctccgactcaggagccccgtgccgtgtgactggatgggcgtttcaccacaagcgtattgtttctagacccctgtctcagcaggcaagctaaggggtgagtggttcactgaaagacacttgtagaaactgccactgggctggccactgggcacacaagaaactcagctggcaagtccaggggctggtgtgaccatctcagatctgtcactaacccccagtgatgtgaggtgtcattcagctctcagggagtcattgtggctgctcaggccacttcgttcttcaagtccctgcctgattcaggctaaatgaaggccgtatgggtcaggctcactctgcctccctccactcagtgtatatgtaacctcagtacattcttgctcttaagatgccaccacggccacccaaccaccgagaacgtgactttcgctttgaccttggaggtgaatgtctgtggtcattttttggctgcccagcccctgagcctctccctgtgtgtaagtcttggagagaggcccacccccccggccatcacagaagctgagaaggcctcagggctcttcctggggctggaggctgggaggcaggcctgtgaacctgggctcgacagacggaagccctccttaggatctgcctctggagctggtagggcagaggaggagggactggctccgaatttattctggtgtcagtagcagaatctggcatccagtgttggcctcgtgccgaattcgatatcaagcttatcgatacc

SEQ ID NO: 961 - DNA, 1237 bp, Homo sapiens
aggcaaaagatgttgtccaaagtccaggaatatgtaagttgaaagctatgtgtgcagcagaaccttatttctgagttacacagtttagtgaccttctaatggaaaaaaacttcacggagtgtgttttccactgccttctgctcaccacactgaggattacaagaggaaaacagctacaccagagtcaaaagtgatcagacctctgatttcccaactctggcagagaagctgcaacgcgccgcgcatacacacacacacacatacacacacacttacacactttccagccagctcagccgacttcctctgagagatgacaccactttgcagcctccctgtgggacagagtggaacttgtaactcactttcttgtgcctcccaggactttggctgcctagaaggaagagaagggagtgctaaggcttctctgagaaactcagagcttcctctgcagccctgctcctggccagcatgagaggagggagcttgaaccaagagtcctctcctggaggggaaacctatctaagaaatattttctatcaatcagtaaggctctcaaaagccattactgccaacatcatttcttatttgccatctcttctcccccctttaaaaatgtccttactttttccctttttttcccgtcttttctttcttgtccattccctttcttttttctgacggttttgtaaaggggaggtaccctgcacacactctcttttttgtttttgtttttttaattttactttaagttctgggatacatgtgcagaacgtgcaggtttgttacataggtatacgtgtgcgatggtggtttgctgcgtccattctttttttttttattttttaaaatcctcttccttcatttctccccttctgcctccttctatccccctgtcctcaatctttctgtttttcttgctttctcctcatttttctctctttcttgtctccccttcatagctaaagttaccgtccttggcacaggactcgggttctgaggagtgacacagcaggagttcatcctggggaccctctcgcaggcagcgctgcacatagggaacctgtcccggctgtgggaggccaggcagcctccccctccaaggcagagccagacgaggctgtccatcctccttgcatttctctgtcaccttgttcagacggcctttgacttggggggagccacgctgatttacactcgtgccgaattcgatatcaagcttatcgataccgtcgac

SEQ ID NO: 962 - DNA, 1127 bp, Homo sapiens
  SITE (336): n equals a,t,g, or c
tgccgcaaactggcatgggccaaagctgctgttagtctccttttgcccatctgtctcagttgctattcaaggaagggcatactaaatctaatggttggaaaaaaggagcagaggggccattcaatgccaagcatagacagtttatgtttcactaattacactcaaagaacctgggccttatcagctaaaaggtgatttctctttttcactggtattaacattgttacttattgcttatggtaaattttttttgttttgttttgttgagacgagtctcgagtctcmaaaaaaaaaaaaaaaaaagtgaaaggcatgaacgctgtaaagaagcccagnaatggctgtaactgaatgcttcacaagtctacgatttcaaaaccatacactatcctataacaatcccyctacttataaccyctgaaagtttaaagaaagaaacttacttaatgacatcaaagagatgaatttccgwtytacagatgcagtaaaactctttataacagagttttcgtcttgtccaagtaagagtgtatatttggttaagatacgtgagttaaacatttgcacgtaagcaaagtaatttccatgtttttcagtaataaaaattaaaacaggatgtctgaatactacgaaaaactttgtccatttaatcacttcttcatcagagataacagtttcaattttctgctgggggtctgcaagcaaggcctctaaaccacgaacagcaccttccttgaagagcaccaagggttctgtcccttgcactgaaagtatcctatatacttctgctgacaatgtagctttaaatactttatccaggtttacatcttcattattccatattcttaaaaccttattatcgtgtacaacaacatactctccagtttgaaagttgcacacagctggacatgttataatttgaccttgtttcactgaccagctccccaagggtttctgatcagaaaccttatagaggatgactgtcctgccgctgtctgtcactagaaactggtctgttttgtcgctctgctccacgcctaggagtccttcaggcccggcgctcaggactaccgaagacaacgtgaattcttcctccagcgctgccattttgcggacgcgtgggtcga

SEQ ID NO: 963 - DNA, 1391 bp, Homo sapiens
gaattcggcacgagattacatgataaatgcaatagaatgctaatccttgttctagaaaatttcaagatgttcacttaaaaaacctttcgagtcatttttaaaattgtagtcctgaccttcagtacgtgttaaacaggttttttcaaaatttaatgaggatgagttttcatatgatagtcattttacttcagagtattacaaaggattcaacaattttagtataaaatagcagaacttgttacatatgtatggtctattactagctcagtctaaattttgcacatctatggrgtctaaaattcaattgggattacatccaactttttgtttaagtagcaaagtaaaaaaattaaaatgcctagtcttaaatgaaccatagtttgagactccattctcttctcagccactttctggcttcacaagagcaactgtagcttttggatattaggtgagatttggacatttccataaagcaaagcatgaatagaatgctggctgcctttcacctcatctcatccattaactgtgaaaggtgagagccagccttatttttctaaatatcatgatttcaatatgtagcaaatgatacaactgaaaaataatttttggtatctacattatgcttagagttaacatctaaactaaccaccatttcccactcaaatatttatttaagtccctggaaaactttaatcattattgttgacttgtttttactcatttwcagatgtttcttttcatttgttatttactcattagaatattcacttagtgtaaggararatkgctgttcttggagatacraagacttcaaggagtttacagawttgsttgggaaaattagagtwtcwtaawtgaagcaaactgctagatgaatgtgctggtttacatatagaatttgtttctttctagaccagtggttctcaaatgtgattcctgaaccactggcattagcacacctgggaactttttaaaaattcaaatttggcctggtgcatgtggctcacacttgtaatcttagcaccttgggaggcctaggagagaggacagcttgagcccaggagttcaagaccagcctggacaacaaagtggaacctcatctctacagaaaataaaaaaaaaaaaattgccatgtgttgtggtgcatgcctgtagtcctagctactcaggaggctgagatgggggaacacttgaatctaggaggttggggcagcagcaagctatatgatctgattgtgccacagcactccagcctatgtgacagagtaagagcctgtctcaaaaaaaatatgcaaatttgaggttttatcctagacttactgaatcagagactctgggagtggagctcgtgccgaattcgatatcaagcttatcgataccgwcracctcga

SEQ ID NO: 964 - DNA, 1856 bp, Homo sapiens
  SITE (1176): n equals a,t,g, or c
  SITE (1181): n equals a,t,g, or c
ggcacgaggtttctttggccaagtgggagaagagaactgtgacgaggcattggggaaggccaggggctgtcaccccgtcacagctgtgtgcatgggcaacgcatcttaggagagtcaatggagagtgagcatccacagttgactcccttaaaaccagctcaggccacacccaccccaagaagtctctgaggacatcttgagggatgcaggcccaatttaaaactcctgcctacagcaaggtgtctgtcttaatactaacacactgcattctatgggtctggtaaacatctgccatctccaccccatgggagcttcttaagggaaagcattgagcttccttctttcattcactccctcagtcgatcagctggtcagtcggtcagtcaccaataactttgttttttttaacaaatatgcctgagtacccactgtgtactggggcagatacagctgaacaatcctctaggaactcacaggtttataagagaaacaggaaaaagtggaggaagtggaaggaagccaaagcatccatcctttcactttcactgaccactgagtgggtctcgctgggtctcagtgaaaagaaagccgtttctactgctttaaccctttccaatgcatgtcccttcagacagagtaacccctgtgagctggtaatcaaacagaatwttattcaagtgaawcaaacaatggagaaatatggagtaccccaaatttcctccctttaatttgcacattttgaagtgccgatattagtaagtagtttatttacatgaacatacaggaaatttaacctttaagagtttgtaaaatacggcttagtttaaatgcatttatttgtctaaaattcctggtagttaattgtacttttttttttggcaagttttcacttgaaatctcaaagtactttaaagtaagatggcattaaaaacagcaacaggaataagccgacgtgtcttaagggctcaccatgtttagacactaagtgccgttaacatgtatcactatttactccttgaactcgtcctatttgttattatatacacaccatatactgtattattattattgtctcagcttcaccgataaggaaccctagcttggtgagttcagaattgctggcaggttagggaggaatggacagtggaacccagccctggctgtgcccagaccccntttcntctgcaatactgtctgcytctgaggcgcatggagtccttctccagctcttcaaagcgttgcaggtccatgttgtcccaacagaatttaaaagtgcaggccagcatcacctgcaaagtcccaggttggaagagaacytcgtctatacttctacgggcagataaggtcagaagtacattttccagtcgccacgtaagctgcagctctctctagataaacccgtgtctggaatagaagaaaatgctccccacgtgctggtcttctctgtgaccttttaattctggggcccggggctcccttgttggtcagctcttccctccacaccatccatgtgctgaggcctcaagccaccactgctccagcctggacstcacccstaaacccagtcttgtgagtgcattttctacactcccactaggtgtttaaagacttctcaaccttagtgtgtcccatagagggttcctgagckccccccagagctctgcstctcccatctttcccaccttagtgaagtcactccagatcacttcctgtcacctggaaaatgtggagggtcctcctggagtcctctgtttctctcgcaactcacactctgcacacaagtccatggaatggattcaggatccagcctcgtgccgaattcgatatcaagcttatcgtataccgtcggacctcga

SEQ ID NO: 965 - DNA, 1558 bp, Homo sapiens
actttaaagatttaaagatactgaagaggttaaaaaaaaaaaaggccctcactgagcctatgtaaagtgatgaattgctccacaaagtgatgaattgctccgcaagcaacatgcagaaatattgcactttagtgttgtaactcacttacattcctagatgatgttcatgtaataatagttcatacatgttgaatgtcaaacacatgccaaatatctcacttgtattatttgtaacttttttcccacaatattttagggttatatagatggctttgagactcagagaggccaagaaaatattttgtgggtgaataactagtaaattggaaagctggagttcagacttttgtttacatgacttcaaaacccatctcttagtctgtacctcattggctctcagggatctttcttagacacctcattgtctatgctctgtgatagtttgaccagttgtgtttgataaaagagatagagatgtacaaatccaaatctgcaaatccttgaccatgtaccatcattcatgtaggttctattctgattcaggacctgcttggagccttctctccaactcatatggcattctcccatcctgacaatcttccctgagtcttctgcaagttgtagaattgctcctccccctctgctataaggcctgcatataaaattggctgaggaatgtgcttggctcttttcctaaagattataaaatgatcatgaccctgtgaggccttaatgccctacagagagaagccctaaaaatctaaactcaaggaaaactgtgtttttcatagtccagactcatttgtattaaatagatcacaaccagataatccctgagaaatttattatatcaaagtttctcctttttgagttgatctaaaggctaggaagagccttgcacatacctttgargatagattatgtgtatgtgtatggctaggaatttacgtgtattaattccttaaccatgtatgactgagctcccatgtgacaccaaactttctttttctgagccatttgttgtgagttctttgtgcttttttaaccttgtctcctatgttttcctacaaaccacgtctccactagccatactgaactcaatatttcttctttacatcattttaggcaagctgtacattactggaaagagatgatgggtaaatatactaggtgaaggcctaacatgtgatttagctggctatgggtttaaaagctcatcagaagtgaggttgctgcacacaaaaaaaggagaagcagcagtgaatattagcaaaatattctctaaaagctcttcttttctaatatgggtcctggggaccctgtccactcaaaggagggtcttcaaatttgggaaatatatgaattttagcagcatcacagattttattttactgttgttttgtttttagtaagtgaaatctgagtccacatgcccgaagaacttatatcatctatgtgaaatcatatcttggagaaaatgaataggattggggacagtggcagcaaatcttctcgtgccgaattcgatatcaagcttatcgataccgtcgacctcgta

SEQ ID NO: 966 - DNA, 1858 bp, Homo sapiens
  SITE (490): n equals a,t,g, or c
agccttactgatgcattctcgaaaacctgttagggtcctaagcattctccagttagtattgggactttacccctcctgtaaagatgttatgccccaaaaatgaagtggagggccatatcctgagggaggggagggatctycagagttggaagagtgatgcctttttgtccgcacttatatgaatacaagaatgtcatttctgaagctccccgtatcctagcttctggaatagcttttgttaggcctgctagtctgaggagggatccyaaaattccggataagacagtcccccaccctgatggggstttgggcaaaaattatgtctttctaattggtgagcccgggtgcctaaagaaggttaacagagtcctggagtttatactagaaatgattcttacaggagaaactagaaaagcaccagagacagggagtggtttccagaagcgggactagcctcagagaagagaggcaagagaaagttttkctgacnmgcattaggayccaggaggcaaggstcaggataggtaggatagatgggcgagtctcgcttgggcaacatgacttcgagagttctgctcatggccacagggtcaaccaacttgttgtcaggaccccggagctgaatggctttcctctctgtcgaccctcggctcagcccggaagtacaggaaaagcggaaagctggttccaggcaaaccaacactcccaactccgaagagtcaggggttgttagagagccctatcccggaaagcctgacacccgtgtctttagtccagcggctgtgctagtcagttttaactggccgctagtcacttttaactggccgacaggtgcctggtatttagccaccgaattctaagggaaaacaggacagaatagcaagtgaaaggggtcagatggtactcactgcttggcaatagcgtcagccccaagtgaggatggggaaggggttttacagtcctctataagcaggaattgtcccagtctgatgtggctgctgcgtagtgcccgctggcctycctcttgatcttcarggggtgtcttctgcccagctctcttcttgcttctgctaacttgctgatgcatgctgctggcgcaactgtccttgcgcatttggactgggcttgaagagggaggaagtattcattcccttaagctttcaggcttgggggagaatctttcacaacccaatgatactcttttaaagttactttaaaatgtgcaataaagttttgttgactgtagtcatgctgttgtgctatcaaatactagatcttatgcattctatttaactatatttttgtatacattaactgtctctcccctcactcccttctcagcctctggtaaccattatctagtctctctctccgtgagttcaattgttttaatttttagcttccacaaataagtgacaacaggcaaagtttgtcattctgtgtacctggcttattttacttaacataatgacctccagttctatccctgttgttgcaaatgatgggatctcattctttttttatggctgaatagtactccattgtgtatatgtaccatgttttctttatccattcatttgttgatggacatttaggttgcttccatatcttggctattgtgaacagtgctgcaggaaacatgagactgcagacctctttggtatactgatttcctttcttttgggtatatactatgagtgggattgctgagtcacgtggtagctctatttttagtttttggggatcctccaaactggtctccatagtgcttgtactaatttacattcccaccaatggtgtatgaggattccctcgtgccgaattcgatatcaagcttatcgataccgtcgacctcgag

SEQ ID NO: 967 - DNA, 1760 bp, Homo sapiens
ggcacgagaaatgagcccctcgatcctaacctatcccactttatagctggggaaactgaggtccagagtcatgcagcggtttgtcggattatgcgggaacatcatcattatttggccatgtgtggccatgtcctaggcagttctcccacgctttacctccatctatcctcaccacagcctcagggggttgcaggggtatccccagtctacagatagcagcagggcacagctacttacccacagacatcaagcagacaggcggtactggacccagacctgctgactgggagctggcacacttcccctccacctcctgctcaggagggactgggctctcgcctgctctaacccctgggagctctgcgacccctcaggcctcagtgtcccaggttttgccactgcaaatcacgacatgttaacattccttctccacttccccaaagacgcctgaattcttcacctgctcacttcatctcacccagtgctcacaaccatcctgggaacctgtgatcccatcacgcccattttgcagatgaggaaactgaggtactgagagacaacatcactcatcggggtccgaaccttggagacctagctccaagataccccagaataccaaggtgcgtcttccctagggtcctctcctgcacagaatcacctggaagctctgagaatacaccaaggtctgcagcccccacccccaaccccacccccacgattcggaactaactggtctgtagggtggagcccaggccccaggattttgtgactctaaggggcagcccctggtctgcggggctcatttgcttccagaagcctcacacctccttctatgcgcgctggaggaggaagatcccaaggggaactcctgaatttaaatcagaccttcaggaaggcacaggggatgtgcgccttcctccacattgcaatcccacagcccagggccaccagtccccaggaagcggggcaaaggcgatgcaggtgtgaggctgacgcgcgtcctccagagggggccaatggcagtggtgcctcccgcaccctgtgctccggggaagccccaagctgagtcagaacccgaagctcccttgcatggaaggtgactttggaacttcgtgaactcaacatgacagctccagaagctggaggcagcggcggggggcagacagaggcagagggctcagtctccagatttagtaccgtgacaagcctgggccagcagagaccacatgttccaggcagggtccatgcgaggagatacacgtgccatgcactctgccttgccttggggacacaccgcccgcaggagacggctcagcacctgcatcagcgagtagacactgagtgtcacttgagtgccaagggtgggagcgggggtcgcagcctgagcgccctgctgtgtggccctgggccctccagtctacctctctgagctgctatctgcttcccccagtgcaaaaggggagaaaagtgtctgctttgccagggggctgagaggaggcatctgagcccctgccccagtgtgtgggaaatcaagtctccccccaggacttcacagaggagatgggggacaggggcaagggggctccctgggacattggcctgtctccttttccatctgcccatgcctctctgcaccctcttcccacccacccagctggaggggagcccccgtctcttggtccttgctctgcttttcacgtttgctctctctctctggacctcgtgccgaattcgatatcaagcttatcgataccgtcgac

SEQ ID NO: 968 - DNA, 588 bp, Homo sapiens
tgcaggaattcggcacgaggagaaactagaaaaagtcattctatgggcagcaggcatccttataagacagaaattaaaggcagggtgggagatggggacagtggagcaggaaggaaagcaggaacactgaccaagttcactggaccttacagagttaagtgttaccagttaccatgcacccaggtacattctctcccaccatgcaccacagttagataccaccagcaagcaccagaagccatggccagggcattctctgctaaaacataccattaaccaaaagaagaacacaatgcagctacattcatttcatttgtattctttgttattggtttaattaatagttttgtaaggtgggtaaaaagtaaaaaacacaccaaccttctcgcagctctgagggatgtagggggtttgatgcagaacacaatgaaatgaggaaaggagaaaaacaagggaaacacagagagagtaaaaaggccatatcaaggctttcaactgctacttgaacatctttattcgctctagttcatccttcctatctcagctggaaaagttagctattgtttctaataccatgttctcgtgccg

SEQ ID NO: 969 - DNA, 1453 bp, Homo sapiens
gaattcggcacgagctgggctcaagcaatccccctgcctcagcctcctgagtagctgggactgtaagtgggcaccactacactcagctaatttttttaaatttatttttcgtagagggtgtcttgctttgttgtccaggcttgtctcaaactcctggcctcaagtgatcttcctgcctcagtgttccaaagtgctgggatttacaggcatgagccactacaccatgccaaagtcacacctcccctgtcccctgggatatggcccaggaaagcctgtcccctctggggcttctaattcttgtctgtgcagaacctagcgtgtgtgcagagggataagaattgaatgaggtgatgtctgtgaagtgcccagcatagtaactagcatacaacagactgttagtagttggtaccttatttgagcgttccagaatcactacattgttccctgccattatttawaatamaaaattcaccttttaaattgtgggagctctgctttagttacatatgaagctggcttttcagcagttgccattctgtaccgacatttgctttatatatatatattgtttgtttgtttgttttttgagacagagtctctctctgtcgcccaggctggagtgcagtggcgcgatctcagctcactgcaacctccacctccctggttcaagcaattctcttgcctcagcctcccgagtagctgggattacaggtgcgtgccactatgcccagctaatttttgtattttttagtagagatggggttttgccatgttggtcaggctggtcttgaactcctgatctcaggtgatctgcccacctcggcctcctagagccacatttgctttaaagaccccccgctttgcacaactataaatgagtgagtgtcacctctttttggactagtctccccaggaattcccagctgacttttttcatttgttttgtttwgtttagttttgaaacagagtctctgttgcccaggctggagtgcagtggtgcgatcataggtcactgcagcctcgacctcctgggcttaagtgatcctcccaccttggcctcccgattagctgggactacaggtgtgtgccmccacacctggcctttttttttttttaagagatgtagggctgggtgcagtggctcactcctgtaatcctagcactttgggaggctgaggcaggcggatcatgaggtcaggagtttgagactagcatggccaatgtggtgaaatcccatctgtactaaaaatttgaaaattaggcacagtggcttacgcttgtaatcccaacactttgggaggcagaggtgggtggatcatgaggtcaggagtgtgagaccagcctgaccaacatggtgaaaccccgtctctactaaaaatacaaaaattagctgggcgtggtggtgggctcgtgccgaattcgatatcaagcttatcgataccgtcgacctcga

SEQ ID NO: 970 - DNA, 775 bp, Homo sapiens
gttggcttgtatttgggggagaccgattgtgtcagatatgtatgtggaacgtagctgtccttgccgagtctgacctgtatgaaatgcatatccatggctatattattttggatttatggaggaagcagagcatttctgacacttaaggttgtatgcgtgagggagaaggctttcacagcttaacttgtaccagagcagctgcatgggtgctgacagcttaacttgaaatctgtgggaggaaggatcctttttcactcattcaacaaatataaccattcaatgaatggtccatgccttgaggtgaggatcatcaaggtgtctctgtaaatagcctggatgcaatctgaggggagttgttttgacggtggtaggtattaagttgagggaggcagtgtggaattaaaaccagagaactgtttttgggtactggtaattgttaatatatgtgcctgtggatgttggaacttcttggctgggctgaaggaatcctttgaaagactgatttcggcagggcgcggtggctcacacctgtaatcccagcactttgggaggccgaggtgggcggatcacgaggtcaggagatcgaatcacgaggtcaggagatcgagactatcctggctaacaggatgaaaccccgtctctactaaaaatacaaaaaattagccgggcgtggtggcgggcgcctgtagtcccagctactcggggaggctgaggcaggagaatggcgtctcgtgccgaattcgatatcaagcttatcgataccgtcgacctcgag

SEQ ID NO: 971 - DNA, 824 bp, Homo sapiens
ggcacgaggttctatcctctctgcaatcttgtggctctcccaagatgcaggtgaggtggccaccacagcatagaacttcattaggcagcgagacgtccatgtctgtggcagaaacagccctgtgggagctgtatctatgctcccgcccacttctgagcctgcctgagagaacagtgcccaccagagctctcttctccaccagtgtgttgctgacaaaatgggtgaaggcagaattcaaccctggcctcaggcaaggcacttcctctacctctgtttgtaaaatgggagtagacatctgtttctctcagctctgtggcagacactgagctatcgaggctttctgtgtatgttttttttgcaaactctgcaaaggtgtgattatacaattgtttataaacaataaaaccaaagcatagaaatttaaaaatttattaaaaatcatgcatctactcaatgacagggctcccatttatacccaagcagtctaactttttttttccgagacggagtctcatcttgcctcccaggctggagtgcaatggcacaatctcaactctctgcaacctctgcctcctgagttcaagcgattctcctgcctcagcctcccaagtagctaggactacaggcgcacgccaccacgcctggccaattttttacatctttagtaaagacggggtttcaccatgttggtgagtctggtctcgagctcctgacctcgtaatctgcccaccttggcctcccaaagtgggactacaggtgtgagccaccgcacctggcctcgtgccgaattcgatatcaagcttatcgataccgtcgacctcgag

SEQ ID NO: 972 - DNA, 1298 bp, Homo sapiens
  SITE (1265): n equals a,t,g, or c
  SITE (1292): n equals a,t,g, or c
ttttttttttttttttgagcagagaagtgtgaacatgacttgtaagttttaatgtactagacaagcaaggcggtagcactagttctctcttctgatcatgcggtaccttgctctctgcccccatggatcacttactgcattctgtactctagcactgtgtatgcatcactcttccttatgccccgtccaccccaccacctggtctccagactcagcagaacagaggtgactgattccttggaggtagcacagaagggcccaaagtcctagatcctcagggaaagaccaactccaagtccagggaaaagctctatgcaaagggctgcccgtcatctctgccaaacttaagtggcgtggcttttcttctgaccttaaagatgttgttctgggtaggggtgtcaatgcccaaatggagcatggcctctctggtcacctcaaaacaatcctcttctaagctcctctctgggttgggcagccaggagaaggcagctccctcaggaaggtgccactggagcctctcgtcctcactggctcctttgcaaatctgatagaagatgtggaagttcctctcactggaascctggcaggccactcgagttttctctaggaggtaggtctggactgcggctccagtcatttgctgagccctgttcagctggagctggatgaacttcccaaagcgactgctgttgttattcctcagtgtacacgcattcccaaaagcttccatgacagggttggagttcaggatcctctgttctatcctctctgcaatcttgtggctctcccaagatgcaggtgaggtggccaccacagcatagaacttcattaggcagcgagacgtccatgtctgtggcagaaacagccctgtgggagctgtatctatgctcccgcccacttctgagcctgcctgagagaacagtgcccaccagagctctcttctccaccagtgtgttgctgacaaaatgggtgaaggcagaattcaaccctggcctcaggcaaggcacttcctctacctctgtttgtaaaatgggagtagacatctgtttctctcagctctgtggcagacactgagctatcgaggctttctgtgtatgttttttttgcaaactctgcaaaggtgtgattatacaattgtttataaacaataaaaccaaagcatagaaatttaaaaattattaaaaatcatgcatctactcaatgacagggtcccatttataccccagcagtctaacttttttttccgagaggagctcatcttgctnccagctggagtgcatggcacatctcantctctg

SEQ ID NO: 973 - DNA, 1808 bp, Homo sapiens
ggcacgagggcccaactggggtatctgcccagcccttccctccagtgttcctccctagcattcaagtgctacccagcagaaatataatgccagttctgcatctaattttaaatttcctaatagccatgctaaaaaagtaaaaagaaacagttgaaattaattttaataatgtatctcgcccaatatatccaaactgttatttcaacatgcaatttttgaaaaatgtgagatgttttacattctctttttcacacttagtcttcaatatctggtgtgtattttacacttctagcacctctcaattcacaccagccacatttaaaatgctcagtagccgcatgcagcttgtgcagccttacttaggtccagtgtcagcctggggccgtgctggggagctgagctgtgtccatgggggccctggtgagcctccagtgctgtgctgagggtaagggcacccagcgcaagccccagcgcagctgcctgtccagccctgcctcagctccttgcacagaatgagcttgaagtgctcccctctgctcggttctagttctgcctctgacagttttgctctttggttcacaaggcttcctaaactcaggattgctttgtgggtctgttctttgggatgagaggccagggcaggtgcaagctatgccttcactcctttgtccctgccttcctccttcctgtaccccagctacagccccgttgggaagaatgtgtcgttagtcacaaagcattgcagatgtgtctaagaaatgccacgctggggccgggcgtggtgctcacacctgtaatcccagcacttcgagaggctgaggcaggcggattgcctgagctcaggatttcaagaccaccctgggtaacatggtgaaaccctgtctctactaaaaatacaaaaaaattagctgggtgtggtggtacacgcctatagtcccagctacatgggaggctgagcaggagaatcgcttgaaccgggaggtggaggttgcagtaagccgagattgcaccactgcactccagcctgggcgacaagagcgaaactccatctcaaaaaaaaaaaaaaaaacaaaaaaaaactattctgtataggtaatgaacgattttcaaaaatcttagatgaatcaatgagataacagccaaacactcactcaactggcatctactcaaaaagctattggtttctcatgattagctttgccaaaccatctccctagattatttttctttttaaatttcactttgcatttggttaatcattccctgggaaagcacacggggcaggtgggcctccttgtcttcactttgccattccctatctgatgaattctgaacctcagtttttcatccaagaactggagttaaaacacctgcactattatacagggcgtgaggctgttgtcatgataatcaatgagctgatgtgtggttgaagctcttatctgactccatagatagttttaaactacctaagtataaattcagcagctttgcttaagatttaaagcaggtattataaatatgcattcctttgccaatcttttaatagaaggacaggcctattcttttgaagatggatctgctgatgagagctcccctttgtctactttacatcaaccacacccttatttcattgttttgtgattccagtgttggtttctttaaagtaaaggaagaatttagatatttgccgagccattctgaatatagaaacttcctagatcgcatatcccttgatcttttatcgttaattagatgagagtaaatctcgtgccgaattcgatatcaagcttatcgataccgtcgac

SEQ ID NO: 974 - DNA, 1349 bp, Homo sapiens
ggcacgaggttacgatgaggcttgcaaataatatcttataacctgttgttttaaactgatgacaacttaacagtgattgcataaacaaactaacaagtaaagagaaaactgataaaaactctacactttaacatcatgcccctacttttaactttttgttgtttctacttatatcttatttgtactatgtcttgaaaagttgtaattattatttttgatcagttcatcttttagtcttcccactcaagatatgagtagcttacacaccacaattacagtgttttgatattctgtctttttgtgtacttactattactagtgagttttgtgccttcggataatttcttattttttattaaggtgcttttctttcagattaaagaactccctttagctttctcataggataggtctggtgttgatgaaatctctcagcttttgtttgtctgggaaagtcttgaattctccttcatgtttgaataatattttcaccagacatactattctgcaataaaagttctttttcctttggcactttcaatatattatgtcactctttcctggcctgcaaggcttccactgagaagtctgctgctaggcatattgaagctccactatatgttatttgtttcttttctcttcctacttttagaatcctttctttattattgacctttgggagtttgattattgaatgtcttgagttaatgttatttgggtcaaatctgctcagtaaccttcttgcacttgaatattgatatctttctcttggtttgggaagttttctgttattatccctttgaataaactttctaccctcatctctcgattttctcttgaaggcccaaaactcttagatttgcccttttgaagttattttcttgatatcgtaggcatactttcattctcttctattcttcttccttttgtctcctataactgtgtattttcaaatagcctgtcttcaaactcactaattctttcttctgcttgattaattccactattaacagattctgatgtgttcttcagtatttcacttgcagtttttaactccagaatttctactggattcttttaaattatttcaatctctttgttaaatttatctgataggattctgaattcctctctgtgttctcttgaatttctttgagtttcctcaaaacagccattttgaattatctgtctgaaaggtcacacatctgtgtctctctgggattagtcaccggtgacttatttagttcatttggtgaggtcatatttcctgaatggtcttgatgcttgtggatgttcattggagtctggctcgtgccgaattcgatatcaagcttatcgataccgtcgac

SEQ ID NO: 975 - DNA, 1953 bp, Homo sapiens
ggcacgaggcaaatctgagttttaatgaacactgccattgattctgatcatgctgaagtttagaaaccactggtttgatgcttatttgcactattatactgtggtttacatatgggcttgacaggtccatttactttcatttacttgctatttgagattttgtctggccagacaactgagcctcagataaattattttcttactaaattctggtaaataccaataaaaccttgaatacaaccaacataggacagtcagttctgctataatgatttttaaaatgggaatttgtttcaatgcaattaatatattgggaaacaaatttagcatarggcaaatttkgcawttatttgtgcacyacttcatmtgctagaccaactaggtgaatgtaggaaccatacacagctgagctgagtctcataggaacacataaaacacacacacacctctcaaggacaatcagtggcccagacccatgcacatctactattacccttyttgtcmtttcccccttyactgttattaatacaagctgcaagtcttccacaaactaacttcaggtggttttcaagataaagtgccatattgcttgcagtatttatgtattttttaatcatttaatgaatgtaaaactatgctaccatttattagctgcttctttttaaaaatgttccactgacaaatgttttgagtattatgccccgaggcctatgatttttattgtgttcttttgcattgcacagagaattttagcaatccctatgttgcactaaagcagaattgagactaatttgagcaaaacttagcaacttataactgttacaatccttatttcagggcaaacttttcattttataatcataattattttgtttcctcttgagtagcacacacacacacacacacaaatctaaggtgttcactatcacagaataatagcctttaaaatgtttaccagttttcatattgatatattttgtttgactctgtcattccgggctttaagtactaaaatatattagtctttttcagaaaacattccaagaaaaaagttgaattcctacctagtttcctctctctttgataacctattgtcatagtaatatacaaatacctgaaaattgcccagattattcttttcttcttggaacacagatttgttgataagtgccaaaggattttttacaaaaacatgagaagtttgacatcacagtaagatttaaaaggaaaggctgtttattgktattatcatcattgctactactatttccgttagtatatatttctttgtcttatttgtccttttccaaaagatttttgttcttatatttttaattagctctttaaagaaatcaagaactgcttgttgattatagacatccttattgtataaagagggagaagttctttggtaattagctgtgtataggttctgttcaaacaattggctcaagtgaggttgtacagaaagaactcttgtattttcttatttttcagtatattctccactccatcacacctctttttccaaagatgcagtgsaaagaaagtataatctctggagtaattaaagctcagtgaggaaatgatatcacctgatggccctatgaagcattcagcaataaaaggtgagttgcccaaaatgcatttaccctgaacaggaatacaatgaaactaccaagttttatctttataatgattcgtggcttattattttgttgtttgtatatgttctgtttcccacatcagtgttgtcttacattattatctgtcttaacttagactctgttttctaaattgctctgtgcaattaaatgctttgtgatcataataaaaagcatcatgataacttttagactagaggtttccatacaaagctgtatcccatggagagcagctactggctcgtgccgaattcgatatcaagcttatcgataccgtcgacctcgaggg

SEQ ID NO: 976 - DNA, 1632 bp, Homo sapiens
gaatatatgtgatttctcctttgacctgtaggttatttagaagtgcatttttagaaggatgagattttctaaaaatgttatttgggtgcataattttattctgttgtggtcagacaatagtccctgtgaaatttcagccttttgaaattcattaggaatcattttaaggaccagtatatggtctgaattggtgaaaattccatgagaatttgaaaagaaaaaagtgaaatctgcagtttttgagtataatatctataaatgtcaccaaagtcaagttggctgataatttgttctgggtatttctatccttcttggtttttaaaatcagggttgttctagcaattgctgagagagtactattcaattttctagacatgacagaaattttcaatctctcttatttttgtcagtttttgctttctataattttcaactttaattaggcgcataacgtgtcattgtatctttcagatgggctgacctttttatcgtcatgaattttgaatttttttcctaattagcttcgggatgccagggtatatgatgggtcaagaacatgacgtttcaaatttttcagtaatcataactctaaagtaatgtgtaactctaaaataatttattttatttaatcatcttttatcttattaatcaattgatttgttcccacaattacttacgtgtactttagaccattcctggattgacagtaaaagggagcacatgacaaattcttagttttagagcatgggctgcacaatcctgagcccagcctggtggtgatgaaattaagcccagtactaagagcgtaaatgaagaagaaactcagtagtaagagagtgtggaccaactggtcagatgctctaatcagcaactctcattccactgtcaaaaccttggagattttgtatgttttttaaataggtgaagtgaatcaagtggtgcctaccaaatttattttgtcctctgcatcagtgcgtggcatacaacattaacaatgagaagcaactaactcctataagctattttgggggaatagaggatggtacaaatatcacaactttacagcaaatattacaactccttcaaaacacagtttggcagtttttaaaaaaataaaaataaaagagttgatcaagctgggtacagtggcacacacctgtaatctcagcactttgggagactgaggtgggatgatcacttgagcccaggagtttgagactagagtgagctatgattgcgtcactgcactccagcctgggtgatagagtgagacccagtctctaagaagtaaaaatgaaagaaagaaaaaaagttggacaggcacctgccacatctcatttattccactccaggtatttaaccaaaataaataaaaatgtatgtccatagaaagatttacacatgaatgcccacagcaactttattcatagtactccaaactggtgacaacccaaatttccatcaacagatagataaactaatgatggtatatccatataataaatactgtttaataataataaataatgaactattgatgtatacagcatcttggataaatctcaaaataattatgatgactgaactcgtgccgaattcgatatcaagcttatcgataccgtcgacctcgag

SEQ ID NO: 977 - DNA, 1363 bp, Homo sapiens
ggcacgaggtctcgctctgttgccagcctggagtgcagtgatgcgatctcggcttactgcaacctctgcttcctgggttcaagtgattctcctgtttcagcctcccaagtagctgggattacaggcgcctgccaccatgcccggccaattttttttttgtatttttagtagagacggggcttcaccatgttggccaggctggtctcaaactcctgaccttgkgatctgtccmcctcwscctccgawagtgctgggactacaggcatgatccaccgtgtccagcctctataccaacaattctatattctactttgtgatactagagctgggactcgctagacttgtggctctcctgggatccctgagctccttgcaggagatttttaaggtcaaaataattttcataacggtattaagatattatttgcttttcttactcttattctcttttgaatgtacagtgaagttttcaagaggctatatgacatatgatccagtaacagaaacatagcaccagatataatttacccagctgtcttccatgaagccaggcattaaagagatttgcaattatgcaaaacaatgctacccttcttactattttttgtttgtttttgaaaatagttatttttcataataatgggttattttttgttaacaggtagtggtttgattcttgttatttttggaatgtcccatctttaatatggcaaatatcaatagatatcatccacattaacataagttccttcaggtcttcaatttttaagagttcacagagtcctgtgatcaaagagtgagaaacactgctgcagacattcttcattgccagtggattcctgttctatccattagaggccgctagagagagacgagaaggcacaggggttggggcggtggggtggggagtcgcgggagaaggggctggacccacaagagaacctgctgctcctgttgaatctctgcagcgtttcagcccggtggcggtagcatgttgtctctacctgcagactctaaagcagtgtaggctctagtctctagctcatgtccacaccaacaaaagcacaatgagctccctgctaagcaatctgggacaggccacggtgatgcaccctcctcagaggtctgagttcctgggctatagactagtcttgaattccccagttaccagaggcagccaggaagtatcacttccacaaaagtccaagggctaggtttgctaggcaacccctcacctcagaatttcatcctagctccaaggaatcctttcctcagggcttctaggtggtgattactgccatctaagggcagcacatgtttcctcgtgccgaattcgatatcaagcttatcgataccgtcgacc

SEQ ID NO: 978 - DNA, 1302 bp, Homo sapiens
aggattcggcacgagccacaagtggcccctcctcctcccacatggctcctcgtcctcatcttcttacagtcctcttgctcctcccactgggactgaacccaaaggcatctcttcaatggggtggtccctgcctagggaaagccggtgcctccagccctttagtgccccttctgttatggcgtgtctcctgtgaagtctctgtcatccccaaggtcaagtttgctgggctcaatgattctgtgtgccctgcatcactttgctagcaggacagggattggcctccagtcttcagtccctcatccccaaagcccagactagaacttcacagatggacctggggcccctcccggagccgggctttctggagtgttctcatttgctaacatctgcctccctcggcaacctttcctctgtaatggaacaggtccagaagagccatgtgggctgacacagtaaggcctccaggcatctgtgccgtgacgtgagcaaagtgtgagctgcatggtgggatatgccatgccttgcctaggggcccgggcactgccatcacagggaggcttggccaccaaccgacatggctgccccaggtgggaagggtcggatggaggactctgccacccactcttgggaaacacccccaaaatgaacgaaggaatgacctctgtcctgttttagcatcccgggagacacactgtggcctaggatcctgcccggctgcagggctctggatggggcgtgacatcctgcccccgagggtgtggcggggagtcgatgtcacacagctgagccacagggcccagggatgtggtgaaagctttccccaggtcccaagtgcccacagcccctgccccatccaagacccagaaatgcagctcactctaacccttcagtgcgggcccgctctcaagcctgtccgtcacctcccagaactcccacgttcccaaaaccctgtgttcccagtctctttggtctccagaactgtcattaaagaaagaaggggctaggcacagtggctcgtgcctgtcatcccagcactttgggaggccgaggcaggtggatcacctgaggtcagtttgagaccagcctgggcaacatggtgaaaccccatctctactaaaaatacaaaaattagctgggtgtggtggcgggtgcctgtaatcccagctactcaggaggctgaggcaggagaattgcttgaacccgggaggcagaggttgcagtgagccaagatcaagtccattgcactctagtcccggctcgtgccgaattcgatatcaagcttatcgataccgtcgacctcga

SEQ ID NO: 979 - DNA, 1230 bp, Homo sapiens
ggcacgaggtcgattctgagacccgataccctgcgaggggagtgcaggataagcaggagaaattaattagcgctgccttaagcagttttaccgacgcaggcgggactgtggtggagcactggagatgctgcgagccctgagctgccttcacagccttgttgggtgtgctgctggatcacactgcatgagaaatggaagcaacctatctgtaaagagcctgcaaacctcaggacgctctggaagccagtggaataattacagtgggatgaggctgcaagtccccttgcttcctgagctgcattcacggctgtgtgaaggggagaaaggaatacatttgaggtcttttcatggaagacacagatattttaatgttgcgataccatccaacagggtgagctgagagaaccaacactaagagtttcacagatagaacaccactatyccctgtgtaaaacaggaggtaggcaggcgtaggcctcccctggaaaacaatgttttaagagctcataaatacctwgaggtcaaatcatcctcgtttctagtgtttgtatagttatttccaataatatatttagtgggctcacttttttattttgtgcatttatcctggtttattgtttatttttcctgaattattggccaatgaatatttatattagaacagaaaaaaatatattctaaaattaatgtcataaaaataagttacatcagttagatgtcctctgcatgagaaagggataagatggattgctaaatatcccctggggctgagccagcaagactaggactgcacacccctcatcattagcaaggacacaaaatcacggaggagacccagttggccagggcagaccagccaggcagtgctgtgtcaaacgcatgatgaatgtggtggatgcattgagctctcttcccagctgaggagttaaagagaaacatttagtaaaaagggccaggatttagtcacaatgctaccctctcccgatagaataattaagcaatgaacacagctgcacatttctggaatggacactgcgagaaaggtgtagtttttccatgttgtatggcatttgttttcttgcaaacaggcaagcacgggctaggactgtttctacgcctgtctgcactgtgatatgcactgtcttcgctgcagaagagcaccacaatgctgccttcatattccctcgtgccgaattcgatatcaagcttatcgataccgtcgacctcgag

SEQ ID NO: 980 - DNA, 361 bp, Homo sapiens
gggatcgcctagcaacactctagcctgggtaaaagagtgagactctgtctcttaaaataaataaacgcataaaaaataacccttgtcacataaaaatgatcatctcattgtgtcttataatattttatttttagaatcaggcaaagggattctagggatgggcctgaaaggggcagctctgtgcttgtttattacatgggtacactgcatactggtggtgactgggtttccagtgtactcatcacccacacagtgaacatcgtcccagcacgtaatttttcaagccttttgcctctcccacctcctctctcttggagtccctcgtgccgaattcgatatcaagcttatcgataccgtcgac

SEQ ID NO: 981 - DNA, 1603 bp, Homo sapiens
ggcacgagcaccacgcccagctaatttttttgtatttttagtagagatggggtttcactgtgttagccaggatgatctcgatctcctgacctcgtgatccgcctgccttggcctcccaaagtgctgggattacaggcgtgaggctgcaaaactctcttatctcccatttccccagtggcaaaacaggtcaccaggcatagagagatgggaggctgcctgagagagagggaggagagcttatggaaattggctttttcctcctcttcttcctgctcaggtacacagctaatcctgagacaacaacatttttaaattcctcttctctcgctgtgcaaacaattttctgcttccaaatgtaactctggttaaaaactacagacatgcaggtgcaattgtagacaggtttgtggtgaaagtcaagttcatacatatttgcctattaagacaggacccttaaatctccaagctggggggaaaggaagttaagtcttagaatgcacatgtacaaacttccctgtataactgagattttctgtagctctggtttttatttatggatttctgcagttcactttgacggggagggattatttttctctctgccgactccagctgattgattcaatgcgcctgctcactttcagatatggccgcagaagctgcggcataactttgtgtctgtatttaaaattgggaatacaaaatgggtttaaacttgaatatttcatcgagacactacgttttataagtaatttattttggaaatccaggcgtctgcctgggctgtgtagattttgagcgacttgggatgctcagagttacttctgaatattaatatcatttgggccgtacacactctgagatttcatataaccttatcactgctagatacttaaatagccatgaaggggataaagcaaacactttcctcaacatttatatcaggatattggctttccatatgatgactttaactaatataatctcaggcaagacaaacagcaacatttacagtgaaagacaactctgttaatcacaaaagatgttggatgcaagacttaatcatttttaggaccatggaagttatgtgtgcaaagtaaatgtagatttttcttttctcgccagctcacacaataaatatttcctcaatttcttgaagatggaagcttcagaagtctggtttagcaaagacttagccatggccaattccatttctcatgagtacatcctgtttagagggggaagctcatcaagttctgaaaaaaaaaaaagaaaaagggctgggtgctgtggctcatggctgtaatctcagcactttgggaggctgaggcgggtggatcacctgaggttaggagtttgcgaccagcctgaccaacatggtccaccatctctataaagaatacaaaaattagctgggaatgatggcagatgcctataatcccagctacttaggaggctgaagtgggagacttgcttgaacccaggaggcacaggttgcagtgagccgaggtcacaccatcgcactccagcctgggcaacacggtgagactctgtctctcgtgccgaattcgatatcaagcttatcgataccgtcgacctcgag

SEQ ID NO: 982 - DNA, 1647 bp, Homo sapiens
tgttctatgagcctcttgtctgcctcatttttaaagtgtctttatcataaatcgttatttttaacaaatatgtttctgaatcgattgaaactattatatgggttttggcttataattattaatacggtgaattatacaaggcaaccaactaggagttaggatctgcttcacagctgtttacccaggtaaattatctcagggccaagcatagtttggaatcactaggcttaactctccaggtttcccttgtctcccaaagatttctcagcctgcggcaagttttttggatacatctatgatttttaaaaatattgtatcttctttattctcagcagcagggtaggtaggagttacctagtccatgttatcaaatggaactgataacagttccattgataacacaaggcccacaaatcaaaagatataaagagttatatagtgagaagctctttataccttttgatttgtgggccttgtgaatgcctcacttatataaaaataaagataatgtgaaaccatttgaaaactggaatgaaatgaatatattcctagamcaatataaatgataaggattgagtcataaagcaaattaaaaaaaaaaamaacaatgagactgaaagaaggtgaattggtaaccaaaagccttctcccaaaagacaccaggcacagatggttttacacaaaagcttcatttcagagaatagaaaaatatacaaattayytcggagaatataaaaagaaaaaaaatccaatttattttacaaawtgtattagttaggttttgcttcactcatgtcatgtaacaaataatgccaaatctcagtaacttacaacacttctcactccattgtctgtggatctctgtaaccatgtagttatatcaatcaatatagaaaatgtacttaataaaattgaacactcactcatgttaaacaaaacagacctcatatccaactggtactagaaggtaacatgaaaagagacatctttctaaaacctatagcaatcattatagttaatattgaagtatgagagattttccattaaaaccaggatcaaatcaagaatgtccataataatggtttctattcaaactgtcctggttgtgtccttcccagggtaggttgggaggtaggaagatgaagaattctttgatgacattaattttccccattaagcatgaggcaatgttatcagctgaacatgggtgggaagctgtcagaggtttggtaagaagggaaggtattgactaagcatcttgtagagtgggagagcaaacttattcgggaaccatccaaggattgtgagaaaaagttaaatgtccactgtgtttggtgatcatgaatggaagaggaaacctataagagtttatgactttcggctgggcgtggtggctcacgcctgtaatcccaggacttcgggaggccaaggtgagtggatcacgaggcaaggaattcaagataagcctgaccaacaaggtgaaacctgtctgtactaaaaatacaaacattagccgagtatggtggcacgtgcctgtagtcccagctactcgagaggctgaggcagaagaattgcttgaacccaggaggcggaggttgcagctcgtgccgaattcgatatcaagcttatcgataccgtcgacctcga

SEQ ID NO: 983 - DNA, 1497 bp, Homo sapiens
gattcggcacgagcactattagattcatcatgaatgatctaaaggggttaggataggataggactactaagtagtggattcagagaaacaggtttcacttcaacatctgatggacctttctcacagtaagagtcctccaaagaaggggttggctgcccttaagtgttccccatcattggaaaattcaaacatggcttggctagctgcttggtaaggatgttgcagaaggaagtcaggcagcagattttgattgtcttgatgacttttaaggscacttacattagggagtctytattttctacctttttcaggcagaatctcctcttgagtttacacaatatttatcaagtcttctctggaatggaaggagagaagtcaaagttaaccctgttaaacatattctagacaatcattttactttcttggaaggatttttaggacagagagattcttcccatcttgtgcttgttctaactacattaactattagtactgcattgatggctgacttactgggaagactgcttggaaaaatacaagaagccattgtgggaaagtgtattctccaaaagaattccaaatgaatgaagttgtttggattttgtctgagtgcaggtttatacacacatgcatttatgtatttcctgaatctttttgggatataagataagtttttccasagaaagctttgctctgtgcataagcagaagagaagaacatgaggaaagcacaagagtgtagggacaagaamctggccatactcaaaaggaactgaakgaagtccacatgactgggcaggaaatggggctgacactgctgttatttggcgtctttctttcctaattgggcagcatagaagagagagagcagcagtcagactctggggggtggggggggcggtcaacactgacccctctgacatcatctggtgggctgggaataatttctgaaatagtgtaccaaacatgtgcagacaattatgtctgatgacataagcccaccacaaaaactgggcctgaaaatgccacttgaaagartctctcactttgcattaatttttttttccatgaactgtggttattttatttctgggtctttaatatgcagggtaaatgaatcaaaggctgatcgtgatatgttcttttgatatcagttttaaattgtgccacctgcaggaggctaagcttgttatagtgagatgtatttttagatggtggtattcgatgctaagacatgtgtgtatagagcaggacaatractgccagcagraragagagaggaggggagacaagaagagacaaggacaggaatgaaagctttgagccaagaaatgaaaataaacagttcctaaccccaaagctgcagtggaattcccagctgggctctggattgtgtttgattcggtggaggacattttctgggcagcgtttatctgctcccctggctgggctctcgtgccgaattcgatatcaagcttatcgataccgtcgacctcga

SEQ ID NO: 984 - DNA, 1566 bp, Homo sapiens
  SITE (1068): n equals a,t,g, or c
  SITE (1100): n equals a,t,g, or c
gaattcggcacgaggcttttacttctgcacctcctgccatgttttcccttagacttgctatattctctgcttatgaatctcttgccaggtcctctctgagagtggctgcatcctgcacaaacatacctacttctgaatcctatcctaggctgaataccccttccaccctttcacttcatgtcagtatttttctagacttgttgtactctccaacaatccactttgtgccatgtcttccctgaagttggctgcgccctcccataattactcaatcctgtatacccaccacccccaccccaggatgaattctgaggtagaatgtatgccattcacatccgtgcacatcctgccagattttctcctaggatgtctgcacacttcactcacgttccttttactgaatcttcccctatgcatggtactccttccaccattcaaccgcctggatgtcctcacatctgcttactgcatcctgcatccacacacctcctgccaagtcttcccttacactggcagcatcctccactcatgaacttcaggccaggttcttccatatgatggctgcattgtcaacaatgtacctcttctcaagtcctcccttagactagacattaccytttcccttgcactgcatactagtcattctctaggctccctgcaccctccacatatacacattctgctgcagatagcgttatgttgataatctcaccacccacacatgttctgccatgccctcttcactargctaratgctccctcctcccatgcacatcatgctgaattatcaaatttggctccattaccaacccttgaaattaacatttaaccctccaatagtttagatacaaagaatatccttgcattttttgctagaaaccctcctactccagcttcactctctgttgatgcacttcctacaggtttctctgtgaggctagcttcacatttcctcatgcaaatccagcaatgtccaactgacaatgcaattactgctagttagttcccagactggctacaccctccgaaccatgcacttcttggtgcaccaaamttcaggctggcctnactcttaagcttcctgatgggtcctccccgangctggtgcatgctgtagtcataattttcctgactactctccctttgacttgctgaaaatgccacaaatgcacttaggactgagtactcccttagcctggatctccctcactcacagaattcttgccatgtccttgcttaggctttaccctctcctaaaccccctaaacctcctatggggttcccccctaggctgccttttcctacctcagttgcacctcctgagtgccttactatagtgtgtacatatgcacggagtgcacacatacatatagcacctgatgggacctccactagcctggatgttccctctacatgccatatcctcctttatactgcgagtttcctacaccctttcattccagccagaatgtatttattataaactcataaacctactccaatgttattccataagctttctcgtgccgaattcgatatcaagcttatcgataccgtcgacctcga

SEQ ID NO: 985 - DNA, 1782 bp, Homo sapiens
  SITE (1638): n equals a,t,g, or c
ggcacgaggtggtggtgggtgcctgtaatcccagctactcaggaggctgaggcaggagaattgcctgaacccagaaggtagaggttgcagcgagccgagaatgcaccactgcactccagcctgggtgacagagcgagactccatcccaaaaaacaaaaaacaaaaaacaaaaaaaaacccaactttttatgattttagtcttttacaatttattgagacctgtcttttggcctaacatgtggcctactgtggagaatgtttcatgtacacttgagaagaatgtgtatttccactgttgtcaggtggatgcttctgtacgtgtccgtccaaaccccatgtttattaatcttctgtgtagacgtcctgcttactattgaaagtggttcattccagcctccagctatgattagagctaccccttactttctccaattccatcaatggttgcttcacatattttgggactctgtttttgattttggtacatatatatttaaaatcattgtatctccttgttgaattgacccttctgtcaatatataaatagcctctgtccttcattttcttaattattgtcttttttgtggatttttttggagttaactgttttgatttcccttttatttcctgttgcgtatatattttaaaatactttctttgaagataaatttataatattaggattaaacatagaaccctagatttataacagctcccttcctcccttgctgtcgcaggtttcatctttttttttttttttttgagatggagactcgccctgtagcccaggctggtatacagtggttcaaatgattctcctgcctcagcctcccaagtarmwrrgactacaggcaaccaacaccacacccggctaatctttgtgtttttagtaaagatgggttttcaccatgttggctaggctggtcttgaactcctgacctcaagaaatctgcccgccttggcctcccaaagtgctgggattacaggcgtcagccacggcgcccggcctgtcacaggtttcacctttacacattgagtgcacggtaacatagacgtacacttatcttttatgcattcatcttttaatttctgtagcaacaaaggtggagttacaaaccaaatacataatcttgttggttttcctggtcgtccctgtattcaccatcgctgaagacctttcacttcatatagctttgagctaatgccgctgtccttttatgtcaatctgcaaggttccctttcgcattcttgtagagcaagtctcaagttccgtttatctrggaatgtcttacwtcctccttcattgtgaaggatagttttactgactataaacttcttaaaatttttttttctttaggaactttatcatcccattctcttttgtcttccatggtttctagagaaatcaagagataagctttttctggaaaataaataatcatcccttgtgtgtgatgagtcacttctcttctgctgcttttgggattttctctttatccctcactggtttgattataacatgtcttttgcaaatctcttcatgtttatctgacttgaagttcattatgcttcttggatttgtatattcacatctttcctcaaattttggatgtttttggcttttatttctccaaatantctttcttttcatttcgttctcttttcccttttcggagactcttgtaatgtgtaggctgatcagcccgatgatgttccacagaccctcaagtttcggctcgtgccgaattcgatatcaagcttatcgataccgtcgacctcgag

SEQ ID NO: 986 - DNA, 1406 bp, Homo sapiens
ggcacgagcaccactatctgtttcttccctttttccacaattggaactggtcatgcacccacccagtcagggaatacatttctgagcttctatgtcaattatgtgtgaccacaagactaggttttcacttctagagtatgaatggcaatcatgcatggatttcttgggctttctctatgctcttcttcccctctccactacctggaatctatagcaaactgacttacaattcagagaattagaatgtcctagagaaaggaggagcaccaatgagaggaaccttgatcacttaaaacctatgtagagcaaggactttccccaacttaaaacactataatgttgaatcttccttaagccactgaattatcaatggatgtcattttcatagcaggctactcttatcctaactaaagtaatggttttatacaatatactttggcatcagaatgatttagttggtaaaacattggatcttgggtcaaaaactctagggtactttgataaactctgccccaattttctgagttggtcggaggcttgttacttacagtaactgtgattttattttcctagataaaaatatacaactccaggtaggcgaaacaggaatttctaacactgacctttctaattcctaattctcccaagtaagagggctacaataaccggtgattgccctaggcatgtgtcattttagtcccaagaaatgcttgtataccaacatactgccttagggtaatgtaatgggaaaataatcaaggtgagtttttggcatctggacagccacggatagctttcccatgaaagggcaaatatactccattttgagacaattagaacaaaattgggggagacgattttagttacattctgtatatacattcaatgatggcagccagtaagtcctaaacttcagtgtgtatgaagggaacttgttaatcatgcaaatttgaggactctcccacgtgccccagagatcatacttcggtggaactagagttgaccctataatctcaaggttaaatattactttaagtgattcttttttttttttttctttgagaaggagtgtctgtcacccaggctggagtgcagtggcgccatctcagctcactgcaatctctgcctcccgggttcaagtgattctcctgcctcagcctcctgagcagctgggactacaggtgcttgccaccacgccaggctaattttttgtgttttcagtagaggcggggtttcactgtgttagccaggatggtcgtgatctcctgccctcgtgatctgcccgcctcagtctccgaaagtgttgggattacaggcatgagccaccatgcctggcctaagtgattcttagatagtgacctcgtgccgaattcgatatcaagcttatcgataccgtcgacctcgag

SEQ ID NO: 987 - DNA, 1311 bp, Homo sapiens
  SITE (1301): n equals a,t,g, or c
attcgggccgagatcagaggttcaagccatggctggagcagccacccctgaagtagacaccctaatatccttcccactgagttcctagttctacatgctggagtgaggctgtcaactctgaagtgtcagagtgtgtctgaaaatgattgctgtgaaaaataaaatatttcacattgcaggcctcatttttaagttatttttcccagagaacattttcatattttagaacttatggtaatgttaacactttctatttgcataagcacttccctgttgggagatactgcaggtgtaagtttttctgaggagtgtcataccaccatggaactattttccatcgatctggagatagggaacttcttgtatactctgagagagaacttctttgagatgtaaactagactgacctactttagaggctgcctgtatcctaattttctgttttaaaagagtgatggctgaacactgaaaagctcgggacattttagaactgtgctgcccaatatggtggccactagccatatgtggctatttaagtttaaattgaattaaaataaaatgaagtggaaaaaattaagttcatcaattatattagccacatgtaactgatgactagtggctacctaccatatatagaacatttctattattgcacattattctactggacaatgctgttttaggatgtagaagtcctgatggataatatcaaagccaccttaccacagacagagttttacagagctgtgaagtaattcttactgggaacaccagatacttacttaccattttatatagcgtatgtggcattctctcatcttatcattagagcatgcctgtatctttagcgacaatagcattcaaacaccaaatgttatattgtctgtctggaaatgttttcttatacaactcaaaggggaagagaggaatatgtcgtgagtaaatggaattatttttctctgcaccacatcattataaaaactcgaagaggttgggtgcagtgctcacgcccatgatcccagcactttgggaggccaaggcaggtggatcacttgaggtcaggagatcaagaccagcctggccaacatggtgaaatgctgtctctactaaaaatataaaaattagacgggcatggtggtgggcgcctgtaatcccagctactcgggaggctgagccatgagaatcatttgaacatgggaggcggaggttgcagggagccgaagtcgcgccactgcactccagcctgggtgtcagagtgagactccatctcaaaaaaaaaagaaaaaaaaaaaaaaaaaaantcgagggggg

SEQ ID NO: 988 - DNA, 1742 bp, Homo sapiens
ggcacgaggagcccagtagtgacttctgtggtccctgacttgcaccctcaccctattattggagttgtgcttcatttctctgtgtggaaagagtgaagtattgggaaatatgaccctggtcaccaaaccaactcagagacagcaagtgctttggcaaaggaaagggctggcacagagaacagaaacttccaatactatgttgaatggaggtggagaactgggcattcttcacttgttcctgatcattcttgacatttcccttttagaggaaaagctttcagtcaccactgaacataaggtcgatttctcattgtcttcaccaatcttctgaacccgtgaatactttttgcatgatgatttgaagcagccaggaggccaagacagcggccaggagaagcagcaaggaattgagccttgtacatttttctcaaaaaaataaaagatggggaaccaccatgctcgagataagaaattagtctgtgaagagaccttcaagttctgtaaatggtagaaaaaaatttaaatgagacatatctttctcaatttgcatcccaattattttcttaaattgtcattcactgtaacctagggaaaacagaattcagaatcacatggcagtaatgattttcatgtcctttccctaactctaccatgactccgctcccctaacacacctaggtgtctttctttcctttgtggctcatgcaatttcttctgcctgcaattccagtaagaatggagactctgggaatggatttcagaattattcaggaggaataattttcaggatgtgtgagtgatcaaatctaggggccaagcaagtcaaagagtgaaagaagagctcagaagttgaacacatttaagaggaaagatgaaaattttggttcagtggtgtcagtagtcaactagatggaagtgtaagaaggaagatggaaatgggagactacaaaataggaaacagagctacaaagagaaataaagtaatccaaagaaagagcatttattagtggacaccaagagttggacgtagatcctttggaaatgtaatatttcaattgctcacaaattctccaaattgacaatatggcaagtctattcaaagataagtaagtcatggtacacagaccaactctattacaccaaggacacataccaagactaggagaaaagagagactgggaggaataattctgccttcggaccagaggaagagagcaagagttagagacagcttcctggaagaggtggcatttgagctagctctttaagtttcaatgggagaagaaagaaaaggcatctggaaacaaggaagcagcagtagcaaatgaggaagaatcagaagggaagccagagagcaccattatcaccagaggatataccaaatccagtcattcataagctatttattttgtgtgattttaaacaatagctgctatcggctgggcacggtggttcacgcctataatcctggcactttgggaggccgaggtgggaggatcacctgaggtcaggagttcaaggccagcctggccaacatggtgaaaccctgtctctactaaaaatacaaaataaaaattagccaggcgtggtgtcgtgcacctgtaatcccagctatttgggaggctgaggcacaagaatcgcttgaacttggaaggtggaggttgcagtgagccaagattgcaccactgtactccagcttgggcaatagaacaagactctgtctcaaaaaaaaaaaaaaaaaa

SEQ ID NO: 989 - DNA, 1877 bp, Homo sapiens
  SITE (5): n equals a,t,g, or c
gcgtntgcggtgtttatcttccagccaaacgggwaaatagtcaccaggtttggtagccgaggaaatggggacaggcagtttgcaggtccccattttgcagctgtaaatagcaataatgagattattattacagatttccataatcattctgtcaaggtgtttaatcaggaaggagaattcatgttgaagtttggctcaaatggagaaggaaatgggcagtttaatgctccaacaggtgtagcagtggattcaaatggaaacatcattgtggccgactggggaaacagcaggatccaggtttttgatgggagtggatcatttttgtcctacattaacacatctgctgacccactctatggcccccaaggcctggccctaacttcagatggtcatgttgtggttgcagactctggaaatcactgtttcaaagtctatcgatacttacagtaatggtgggcaggtggatacccgcttccatggtcttgcactataaactggaatggatttctcaatgcgggaccagattatgactagagtttttatgccagaaggaatcattggtgaactttccaaggttatttctgaatgtaacaatttccttaaaaatgacttatccaatttctgtatttcacctttagggttaaaaaaaactcttctactgaatctataaaaactgcagttttacatctgtgaactatggcttaagggacaggatttatgtagctaaactaattttgcaaatcaaacagacacttaaaaaactagcatatgtaaaggtattcgttaatcctgtgaatggtagcttttgcacagaacttccaaaagcaaaacaaaaacaaaatctattgtagttatatacttcatttaacctaggtcacaagacccagggaatcttctaacctcacttttacagtaggtattactcttgtgacatttttttggttatcaacaactaaatataaattactttggaaaaagtaaggctgtcttgcaaaatgatcccagctctgattagcagccctctggagttcagaacttaagtatcagtgcaaatttctcaacctttctgggttagacaaagatccttttttgtgtgttcttttcaccacccctttggctcaccttgtatcagcaaacaaagtacttcttcagggaaacctgaaatttctaatgccttgaaaagcatattacaaaagtaatgctaccttttgggaaacaaactgccccgttaactccagatcattgcactggaatgtaatcaagaaagttagtcatgttttatgtaccatgttttcacacgtgtctcttctcttcgacttcctgaaagcgaaagctttacctcctgcaaatgtcagcacatgtagtaggacaccagtatcctaggacagagagccataagtagccctttggaggactgatggtgtcaaccaaaggcatgtgattgattaatgattcccccttagaaagcaagtgttaccaaagttgtgttatcttgaaagcattacaggtaagggcatgttatggttatttatcattgtttaatgaatagtagaggtgtcaagggactatgtatacatgattagggtaagatagaatgtattatatatatatatatatacacacacacatatatatagctgaatctttggtgtattgaaataggcagcactctgaaagacagaagcttcgtccagccactcttcagcacattcctttactaagcagtttaaagccgtcctagtggagcaagccctaaagcagatttaatttttgccattttccaagaatgacggtggtggcttttagtcagaaaatggccttctgtgctttcaaaaaaaaaaaaaaaaaaackcgagggggggcccgggacccaatta

SEQ ID NO: 990 - DNA, 3013 bp, Homo sapiens
ggtgtgtcctgctccccaatgacaggttgctcagagactgctgatttccatccctatataaagagagtccctggcatacagggactgctctgctccaggcatctgccacaatgtgggtgcttacacctgctgcttttgctgggaagctcttgagtgtgttcaggcaacctctgagctctctgtggaggagcctggtcccgctgttctgctggctgagggcaaccttctggctgctagctaccaagaggagaaagcagcagctggtcctgagagggccagatgagaccaaagaggaggaagaggaccctcctctgcccaccaccccaaccagcgtcaactatcacttcactcgccagtgcaactacaaatgcggcttctgtttccacacagccaaaacatcctttgtgctgccccttgaggaagcaaagagaggattgcttttgcttaaggaagctggtatggagaagatcaacttttcaggtggagagccatttcttcaagaccggggagaatacctgggcaagttggtgaggttctgcaaagtagagttgcggctgcccagcgtgagcatcgtgagcaatggaagcctgatccgggagaggtggttccagaattatggtgagtatttggacattctcgctatctcctgtgacagctttgacgaggaagtcaatgtccttattggccgtggccaaggaaagaagaaccatgtggaaaaccttcaaaagctgaggaggtggtgtagggattatagagtcgctttcaagataaattctgtcattaatcgtttcaacgtggaagaggacatgacggaacagatcaaagcactaaaccctgtccgctggaaagtgttccagtgcctcttaattgagggtgagaattgtggagaagatgctctaagagaagcagaaagatttgttattggtgatgaagaatttgaaagattcttggagcgccacaaagaagtgtcctgcttggtgcctgaatctaaccagaagatgaaagactcctaccttwttctggatgaatatatgcgctttctgaactgtagaaagggacggaaggacccttccaagtccatcctggatgttggtgtagaagaagctataaaattcagtggatttgatgaaaagatgtttctgaagcgaggaggaaaatacatatggagtaaggctgatctgaagctggattggtagagcggaaagyggaacgagacttcaacacaccagtgggaaaactcctagagtaactgccattgtctgcaatactatcccgttggtatttcccagtggctgaaaacctgattttctgctgcacgtggcatctgattacctgtggtcactgaacacacgaataacttggatagcaaatcctgagacaatggaaaaccattaactttacttcattggcttataaccttgttgttattgaaacagcacttctgtttttgagtttgttttagctaaaaagaaggaatacacacaggaataatgaccccaaaaatgcttagataaggcccctatacacaggacctgacatttagctcaatgatgcgtttgtaagaaataagctctagtgatatctgtgggggcaaaatttaatttggatttgattttttaaaacaatgtttactgcgatttctatatttccaytttgaaactatttcttgttccaggtttgttcatttgacagagtcagtattttttgccaaatatccagataaccagttttcacatctgagacrttacaaagtatctgcctcaattatttctgctggttataatgcttttttttttttgcctttatgccattgcagtcttgtactttttactgtgatgtacagaaatagtcaacagatgtttccaagaacatatgataygataatcctaccaattttcaagaagtctctagaaagagataacacatggaaagacggtgtggtgcagcccagcccacggtgsctgttccatgaatgctggctacctatgtgtgtggtacctgttgtgtccctttctcttcaaagatcctgagcaaaacaaagatacgctttccatttgatgatggagttgacatggaggcagtgcttgcattgctttgttcgcctatcatctggccacatgaggctgtcaagcaaaagaataggagtgtagttgagtagctggttggccctacatctctgagaagtgacggcacactgggttggcataagatatcctaaaatcacgctggaaccttgggcaaggaagaatgtgagcaagagtagagagagtgcctggatttcatgtcagtgaagccawgtcaccatatcatatttttgaatgaactctgagtcagttgaaatagggtaccatctaggtcagtttaagaagagtcagctcagagaaagcaagcataagggaaaatgtcacgtaaactagatcagggaacaaaatcctctccttgtggaaatatcccatgcagtttgttgatacaacttagtatcttattgcctaaaaaaaaatttcttatcattgtttcaaaaaagcaaaatcatggaaaatttttgttgtccaggcaaataaaaggtcattttaatttagctgcaatttcagtgttcctcactaggtggcatttaaatgtcgcctgatgtcattaagcaccatccaaaaagtctgcttcataatctattttcaagacttggtgattctgaaagttttggtttttgtgactttgtttctcaggaaaaaaaatattcctacttaaattttaagtctataattcaatttaaatatgtgtgtgtctcatccaggataggataggttgtcttctattttccattttacctatttactttttttgtaagaaaagagaaaaatgaattctaaagatgttccccatgggttttgattgtgtctaagctatgatgaccttcatataatcagcataaacataaaacaaattttttacttaaaaaaaaaaaaaaaaaaaaaaaaaaaaaaaaactcgagggggggcccggtacccaagtcgccct

SEQ ID NO: 991 - DNA, 766 bp, Homo sapiens
  SITE (13): n equals a,t,g, or c
  SITE (15): n equals a,t,g, or c
  SITE (37): n equals a,t,g, or c
  SITE (132): n equals a,t,g, or c
  SITE (754): n equals a,t,g, or c
  SITE (755): n equals a,t,g, or c
  SITE (756): n equals a,t,g, or c
  SITE (760): n equals a,t,g, or c
caccccaggcttncnccttttatgcttcccggctcgnatgttgtgtggaattgtgacggatacaatttcacacaggaaaccagctatgaccatgatttccgccaagctcgaaattacccctcactaaagggnacaaaagctggagctccaccgcggtggcggccgctctagaactagtggatcccccgggctgcaggaattcggcacgaggacatccaggaagagaacgaaagttcccctgttggttttcccctatttttaagtgtgagtgtatgaatgtgtgttttgttctcttccttttatattgcctcctggatttgggttgttttcctttatctgtccggactgtaaatgtggatatgaaggttcatagtcctgtagaataacgtcagtgcttgagctagtgtttggtgtgaagtacctatcttttgaagggagagaaaagaattacgactgtggtaagatttaagaggacagaattaagattatgtaagggttgaagaaaggtttgctgggaatgtggtgtgtgttttagcagagaccccaatgacctgccagggcacgtagagagagcaggctacttgagggcagggagtagaccaccgccatttctgtgacctcacatctggcatggccaggcacacagtaggtactcaataattaactccctgctgtttccctaatcatgtagaggaaagcaacaatgttcagtaattaactgtttaaaaaaaaaaaaaaaaaactcgaggggggnnncggnaaacaa

SEQ ID NO: 992 - DNA, 3138 bp, Homo sapiens
  SITE (3106): n equals a,t,g, or c
  SITE (3109): n equals a,t,g, or c
  SITE (3138): n equals a,t,g, or c
cagcagttcagttacttggaacaattaaagattacccttaacagccatgttaatacatctaaatgctaaaatatactacgagtttttcatagtcttgaaagtatacagttaattacttttcaaagttactgtgktctcatgtttactcttcttgtatctgtgatatgcaaaaagatgaagactcttggcctccaggagtttacattctcatggtgctgttggttcaagcagattgctttagtttattaatgaacattgcttggctattaattatatcctatttggaaggatcccttggtgaacagttttaaaaagcagagggctgtgctaaatttcagggtattgatagcttgagtttacattgtattagccctgctcgttatcatttttttccccagggagctatgcaggtaatgctcattagcatgaatcagaaaagaaaccattctgcctaagagcatcttaaccatccccctaaaccacctatgctctcctgttatagttgtcagtaaatcacgaagaaaattaacagctccttaagactctacatccctcaattctctttcttttcccagagtttgtacatcattctctactcagatggaccaggatttgcatataagccttttaaaactgactagtggtcctaattttaacatttttgtgtatgactcctatcccttttctgaagcagcattgtgatagatgtggagcttctacctgcatttctaagcaattattaacccaacttttgagttgaaacttgcatggatccttgttatgtcccgtaattcctctgaatcaaggaatttattttgcatgcttattaaactcaaactgggtctgattgaaagtgcaagcaatagtgacaggaccttaactctggttttagagtacgaacattctaatgcatgactcaaaatgtccagtgttgtggttactagttattttatatatgcatttgttaataatgaagcaatagagactaagaccaatagcttgaatatattcagattattttcatgttttaataaaggatttttcttacttccattgaaaatgggaagtagaagataaacaggggcaaccacaagacattcaaactgtcaggactagggcgtagcagtgcccaccctctaaccacttgcctggttccattagtccccaagcatgtttgaaaacaaaagacacaaactaagcatgctgaataaaactagctgctatggctgtaataatcagaaaggtgcagagtttcagaaagagtaggaaagtagggaatgccagtatggagtatgtaaaataactagatatggatatggggtttgkttatgatatgctttatgtagacaaagtttgaggtcttttaaaactgggatttgagttgaaaagagtcaggatgcacatatttccactatttcaggattttcagatgactaggcacatgttgtggatgatactggtaccaactaccaatgaccaactataaagtacccctgcaataagggagacttcctttttgtagaatagtcctgaaaatactgacagatctgtggttagtttgttattttattgcataaaaaacagtttaaacaaattttatagccaaagttttatccttgatgggtttggccagactgcaatttcttgactaaagcttttaatgccaggttaaacaggagaaactttttccactagaagaaaatccttgctatctattttttccaatagaagaaaatccttgctatttattttatttgatgaataaacaaattkattgcagtagcttaaaaaaaatttttttttaaacagtctcactctgtcgcccaggctggagtgaagcaatgtgatctcagctcactgcaacctccacctcccgagtagctgggattacagacatgcaccaccaccctcagctaatttttgtatttttagtgragacggggtttcgccatgttggccaggctggtctttaactcctggccttacgtggtccgcccccccttggccttccaaagtgctgggattacaggtgtgagccactgcacctggcctgtagtagcttaaaattttccttgagaaaattcctgactttaaaaataacccttatataagtacaagtgattgtgacaaatgacgtaaaaatggcattcatgatgtctgaaacaagcctaaatagaattcaagattagactaaatgattttcacaaagcacattcaaggttttacattctatgattgaaaaaaattttttgaaaactttttatttcattctttcctgtaggattttgctacaaataactttgggaatgaataaagtggaatggtaactttccagtggttcagaattgaattagacttcttgtgactgtgatgtttggtttccattgaaatatatgaagtgagatgtcatatcctgaatatagtttgtcttccccaattacttgatagcatgtctgtcagccagtaaagattaagaacagagtttctctaaattcctccgattattccactaaggcacattaaaatacttaattttgggaaaccagacatcacagatttctccatgaagtcctaaatcttctttaaagtcagaataggtatcttagttactgacagtattcaggtttttttctcccttggtgatatgtcattccatcagtgaaaaaatattttctcccagggataagaaaggtattctggtaatacattatcatcaatccttaaacagtaacagtcttggcacttatcacaaaaccgacccatttcttataaccagaaagattatcttagactgtccttcacattatactttacctactgccttgtaagaataagagttgctcactgtgtttacttgctgtcctccatattctccattgcaccattggtgtataacgttaagagtttcattgaatattattttaagtattacaaaaggcagcttgcttcttaatctatgcatctttggggtttttgaagaaatttaattctttgatgtaaaaaggaactgttaaaaaagttggaagctctgcacctgtgtatatatatattttagcaataaagcagcatgggctgagaatgcactgaaaaaaaaaaaaaaaaaacncgngggggggcccggtacccaattcgccctan

SEQ ID NO: 993 - DNA, 1698 bp, Homo sapiens
  SITE (17): n equals a,t,g, or c
  SITE (22): n equals a,t,g, or c
  SITE (30): n equals a,t,g, or c
  SITE (755): n equals a,t,g, or c
  SITE (770): n equals a,t,g, or c
  SITE (922): n equals a,t,g, or c
  SITE (1689): n equals a,t,g, or c
  SITE (1692): n equals a,t,g, or c
  SITE (1694): n equals a,t,g, or c
tggaaagggggatttcnaaggnaaatctcncttgggattaagaagctggagctccaccgcggtggcggccgctctagaactagtggatcccccgggctgcaggtttcaaatccagcttatcttctgttttgtttccagattaatctttctgcagcacagacccacatatattattcaattgaacaaacactttcaaaggctccaattgtttaccacattaaggaccaccttcttgccttgggattcaaataattctggtacagggatcaggacttcgtcccaacctctcactagtctactgcattatgctcagtccgtggtggggatctgattgtttccttgaacttgctctgttcttttctgcctcagagctgtccttactgcccctggcactttccatcttccccatttacatctgtctcagcagatttaaattctaccttctccaggatgccaatcataatttccccatcaaatgtaatctcttggtctttgcaagccccactgtactttgtcaaaagtgctcaccacgtggtactgagaactatagcttcctgcaatgtggatgtagtcatcctccatttttccttcccttctgcytccagacacctyacaggtaggagttwaggctgatttatccgkgwattccctaaaattccagccacatgcttttcatgcaatggcagtgcaacagatagktatattctgaacggaaccmatacagataaatcccagttaagaactctagcacacanaacaattttcttggntctacttttgctgcatcatacagcagagcttcttaacttgstaaaaacaaaagktttaaatgtttcgacaaaaatattcagatagatatactttcccacaggatgtcagaaaccattgaatgtcamcaaatatagtgggatatttttctacngaaggaggaagttgatactaatcattcagcatawttttaatctctcatataattgatggctgcagawtcttttcctttwtctttttttgrgacaggatctyactctgtcactyaagctgragtaagtggcacaatcttggcctactgcagccttgatctctgggactcaatcgatcctcccacctcagccttctgagtagctggggctacaggcccacgccactatgcctggctaatctcttttgtatttgtagagacgggattttgccatgttgcctaggctggtctccacctcttgggctcaagtgatcctcctgtctcggcctcccaaactgctgggattacaggcaggagctaccgtgcccagctggttgcagatttcataccagcagtcaaattaaagtacataaaaatacaagaagatattgtctattaaaatctacagagaacatgagtatttaagttacaaaatatggggaaaaggttaaatgtcttcacagaataaatcaatcaacaaatatttattataagtcactgagtgatataaaaaaagtaaaataaggcttttataccccaggagataatgcagtgggtaagataggagaggaggctgtttcaccagtccagggctgcagtgattaggattggagaacagctgtggtgaagagttaggtaaaaggaaaggagaagcaaarctgacwtaaagctcgtgccgaattcgatatcaagcttatcgataccgtcgacctcgagggggggaccggaanccngngcgt

SEQ ID NO: 994 - DNA, 1848 bp, Homo sapiens
gcttgggtcttagcatgctgattgactcccagaacaaccagtatattttgaccaagcccagagattcaaccatcccacgtgcagatcaccactttataaaggacattgttaccataggaatgctgtccttgccttgtggctggctatgtacagccataggattgcctacaatgtttggttatattatttgtggtgtacttctgggaccttcaggactaaatagtattaagtctattgtgcaagtggagacattaggagaatttggggtgttttttactctttttcttgttggcttagaattttctccagaaaagctaagaaaggtgtggaagatttccttacaagggccgtgttacatgacactgttaatgattgcatttggcttgctgtgggggcatctcttgcggatcaaacccacgcagagcgtcttcatttccacgtgtctgtccttgtcaagcacacccctcgtgtccaggttcctcatgggcagtgctcggggtgacaaagaaggcgacattgactacagcaccgtgctcctcggcatgctggtgacgcaggacgtgcagctcgggctcttcatggccgtcatgccgactctcatacaggcgggcgccagtgcatcttctagcattgtcgtggaagttctccgaatcctggttttgattggtcagattcttttttcactagcggcggtttttcttttatgtcttgttataaagaagtatctcattggaccctattatcggaagctgcacatggaaagcaaggggaacaaagaaatcctgatcttgggaatatctgcctttatcttcttaatgttaacggtcacggagctgctggacgtctccatggagctgggctgtttcctggctggagcgctcgtctcctctcagggccccgtggtcaccgaggagatcgccacctccatcgaacccatccgcgacttcctggccatcgttttcttcgcctccatagggctccacgtgttccccacgtttgtggcgtacgagctcacggtgctggtgttcctcaccttgtcagtggtggtgatgaagtttctcctggcggcgctggtcctgtctctcattctgccgaggagcagccagtacatcaagtggatcgtctctgcggggcttgcccaggtcagcgagttttcctttgtcctggggagccgggcgcgaagagcgggcgtcatctctcgggaggtgtacctccttatactgagtgtgaccacgctcagcctcttgctcgccccggtgctgtggagagctgcaatcacgaggtgtgtgcccagaccggagagacggtccagcctctgatggctcggagatgatggaccgtgaaggaagcgtctgtggggagtgagcgcttagatggccagcagctgctccttctggaagctcgcaccttggcaacagaacagccctctagcagagcgtcagtgcagtcgtgttatcccggcttttacagaatattcttgtcctattttagaattttccggagtagtttatttgcagtctgttgattatgtgcagtagacccgggacactgcgttttaccgatcaccttgaatgtggtgcctggatgtgcctttttttttttccctgaaattattattaattttctattgtgagttcatcagttcatagtttttttagtaaagaagcaaaattaaaaggcttttaaaaatgtacaacttcagaattataatctgttagtcaaatatttgttattaaacatttctgtaatatgaagttgtaatcctggccgtgagcttggaagcttacttttgattcttaaagcctatgttttctcgtgccgaattcgatatcaagcttatcgataccg

SEQ ID NO: 995 - DNA, 740 bp, Homo sapiens
ggcacgagctcccagctacggccgacatgggtctggctccggtcggtcttccaccagtggccaacatgggtctggcttaggcgagtcttctggctttggtcaccacgagtctagctcagggcagtcctctagttacagtcagcatgggtctggctcaggtcactcctctggctacggacaacacggctctagatcaggacagtcatctaggggtgaacgacacggatctagctcaggttcgtcttcccgctatggtcagcatgggtctggctcccgtcagtcttcgggccacagccgacaagggtctggatctggccagtcccctagccgcggccgacatgggtccggtttggggcactcctccagccacggccaacatgggtctggctcaggtcgttcttccagccgtggcccatatgagtctggctccggtcactcttctggcttaggtcaccgagagtctggctcaggacagtcctctggttacggtcaacatggatctagctcaggtcattcctctacccatgggcaacatggttctacatcaggacagtcatcgagctgtggccaacatggagctagctcaggtcagtcttccagccacggtcagcatggctctggctcaagtcagtcttctggctatggccgacagggctctggatctggccagtctccaggccacggccagcgtgggtctggctcgtgccgaattcgatatcaagcttatcgataccgtcgac

SEQ ID NO: 996 - DNA, 1015 bp, Homo sapiens
  SITE (365): n equals a,t,g, or c
ggcacgatcactccccacagggtgtattgggggctgggggtaagcacgtgtcatggggcaccaacgctggtcccctcaagccaagactccctggtgtggactcagctgtggcgagaggacagtttagcactgggaagttcatgccgcaacatggccttcttctgtagctgtgggtctagggccgtggagacctcttgggtgtttctcctgattctctgccagcctcctggggctgtgtgcacaggcgttggccacttagctcccttctagcctgggccgaggggaaggctcatgtcctgcggggtcccctgactgctgctgatggcactccatgctgagggcggcctgatgggatggtgtgctangacctgggcaacgggacaccagcagctgctggcaggaccttctcacttgtcagtctgctgggttttcttttttttggagatggggtcctgctgtgtcacccaagctggagtgcagtgatgcgatcacagctcactgtagcctcgacctcccgggctccagtgatccccctgcctttggaccctgtcctcagagctcctgggggccgccctgctccatcccagaacttaaccacgctccctggaacactctgaagggcctgtgggcaaaaaacctgctggcctcctgttgcaactcttaatctgaagtcctctgaactctaaatctgaactcactccacctgtaagaaaaacggctccgctgcaaactggctggtgcaatcccaagctcaagctggggagctgctgcgtctgtggtcaggcctcctgctcctgccagggagcacgcgtggtcttcgggttgagctcggccgtgcgtggaggtgcgcatggctgctcatggtcccaacacaggctactgtgagagccagcatccaaccccacgcttgcagtgactcagaatgataattattatgactgtttatcgatgcttcccacagtgtggtaagaagtcttgaataaacacttttgccttcaaaaaaaaaaaaaaaaaa

SEQ ID NO: 997 - DNA, 1906 bp, Homo sapiens
  SITE (9): n equals a,t,g, or c
  SITE (20): n equals a,t,g, or c
  SITE (35): n equals a,t,g, or c
cgggctcgnatgttgtgtgnaattgtgagcgatancattttcacacaggaaccagctatgmccatgattacgccaagctcgaaattaaccctcactaaagggaccaaaagctggagctccaccgcggtgcggccgctctagaactagtggatcccccgggctgcaggaattcggcacgaggtcttaaccatgctgttggatttgcaagtcgaaccagtaaagctttcagcaacaaacagactgtgaaacaatgtggctgttccgaagtttatctggactgtttacagacattcttgccagccctcagttgtcccttacaaaaggatattctcagaagtggagtccgtactttccttcatcgaatgattatttgcctggaggaagaagttcttccgttcattccatctgcttcagaacatatgctcaaagattgtgaagcaaaagatctccaggagttcattcctcttatcaaccagattacggccaaattcaagatacaggtatccccgtttttacaacagatgttcatgcccctgcttcatgcaatttttgaagtgctgctccggccagcagaagaaaatgaccagtctgctgctttagagaagcagatgttgcggaggagttactttgctttcctgcaaacagtcacaggcagtgggatgagcgaagttatagcaaatcaaggtgcagagaatgtagaaagagtgttggttactgttatccaaggagcagttgaatatccagatccaattgcacagaaaacatgttttatcatcctctcaaagttggtagaactctggggaggtaaagatggaccagtgggatttgctgattttgtttataagcacattgtccccgcatgtttcctagcacctttaaaacaaacctttgacctggcagatgcacaaacagtattggctttatctgagtgtgcagtgacactgaaaacaattcatctcaaacggggcccagaatgtgttcagtatcttcaacaagaatacctgccctccttgcaagtagctccagaaataattcaggagttttgtcaagcgcttcagcagcctgatgctaaagtttttaaaaattacttaaaggtgttcttccagagagcaaagccctgaggactggatttccctgtgcctacttcatgatcatgaattccagttaatttataaagaggcgatttttgtgtgccattcacactggtctttttcacattgttttgagcttattgcagtatatgttttgggatttttctgtaaaatgggtgtaattttcctaatacaggtatgtaacaacaaaagaagttgcctgcatgccggtccaaattgttctgtataaagatgctcttaaaagacacaagagttatcctagaaccttaattcttttttatttgaaattttaagtcaagtcctttataaagaccatagcagtggaaaacagtgtactttttaaaaaattgctgaatataaaatctttgaaaattttctttatgtgtgaagacacaaagtatgggggaagacagcaatcaaaactaactttttgtagatagccatttcatttctttaaactgtttcaacgccaatatgtattctacaaaagagaatggttttaggctccagtgttatacttttttttatatatatatataaaaataaactttacgtagtgaaatcttccaagtcttttctggaattattataaatactttagttttattttctcatcttaatctctccataatttcccatttaaaggtttacaaatatgagtgtgtggatgctttaattcatttaacctcactcctcaaaggtaacatgcaacttagttctgttatatgagagtctttttctttaatgtactggaaaaagcctatgtgaatctgttgatagaatttaaaattcca

SEQ ID NO: 998 - DNA, 1216 bp, Homo sapiens
ggcacgagtttttgtttctcttctatgtcaatacttagtgtttctcattttgaggactttttctctctcctgtatctttgttttagtttctttggtttttattttgtagtcctttcagttatttttaatgtgccaaaaatttgtacatgttcaattaaaaatgttgtataatagtgtaatacttttctttgtatgaaaatgtcctcttcttcaaaggtataggctttgtaatgaattagattttctgccaataattgatatacaatttatattctttattgtgcctgtgtgttaccatgctaagaatgtctttgtttaaagggaattaatctttttatgatgtattaatctgtgttttcaattgttttccaagtacagttcaaataacttgcatatttactatacaaaatggttgacaagtgttctttttgcaaagacttgaatacattggcagaggtgctaatcacatcttccctaaggcacctggaagaattatttgaggaaaaaatgagttttcacattgttttataggaaattaaatttgtccaaagatttggagactatttttaaaacataaatacataaaatttcattatttcctgctatcttgtttgctggcagaagtgaatgtttggtgaggttattttgggataaattacaaaagaaaaaaaattagacactgcattaatttcttgttcttttggaatatcttagtaactgaggatcattttctaacaatgtggttgacataccttcagttgctttccacatctaaaagagttatctttcatatatgtacaagttattggtagtcttatttttgggctgtttgttgacttatgccccatttgttttacttgttctttaatataaacccttccattttttaacaattcctaacacttgatatcttaatatcagtcactaacattagtaacttcttgtatgttatattatggcagatctctttacgttttttctcacatctatctgctagtccaggaatttgttactaaatagattttcttggatatttggttgcctcaaagtgcttacatttgttaacagattgtaaaccacatttatttacattgatgaatgggctgttgaataatcattgtaaagcactttgtatatataaggtgctatataagtgtgaaatatcattcatttataaatgaaatgccttctaactttaaaaaaaaaaaaaaaaaaa

SEQ ID NO: 999 - DNA, 1191 bp, Homo sapiens
ggcacgagccggccggacagactgacgtgtgagctgcatcgcgggaggcgcatggcggggatggcgctggcgcgggcctggaagcagatgtcctggttctactaccagtacctgctggtcacggcgctctacatgctggagccctgggagcggacggtgttcaattccatgctggtttccattgtggggatggcactatacacaggatacgtcttcatgccccagcacatcatggcgatattgcactactttgaaatcgtacaatgaccaagatgcgaccaggatcagaggttccttggggaaagacccaccctacgaagttggaatgagaccatcagatgtgataagaaactcttctagatgtcaacataaccaaccttataaagactaaaattcatgagtagaacaggaaaatcatcctgactcatgtgttgtgttctttatttttaattttcaaagaggctcttgtatagcagtttttgtctattttaacattgtagtcatttgtactttgatatcagtattttcttaacctttgtgactgtttcaatattacccccgtgaaagcttttcttaatgtaactttgagtacattttaattgccttctatttttaaaactcaaaatcattagttgggctttactgttcttgctattgtatggcatatacatctgcctggatatatttctactcttgacccaaagttttgtaaagaacaatataagatttcgggtaggggtatggggagggaagatattttattgagaactacttaacaaaagatttatctgtaagcttgaactcaggagtacagttttagctatctagactctaacagcttttgctttaaaattattaaagtgtttcttaatgaaaaagaaaagatcttgctaaagttaaaataaggaacatttcaccttttaaatatttaattcttatgtggacttatttccagaaaactttggtgataattcttgagacaaaggtggttaagtagcattattatgtaatgcttatataccatagagtttttaatagaagagaaatccatttcctccgagggtcactattaacaatgtacttccttaaatttagtttaatgattgtaatgggtgctgcatttgcacattgcattaagttatgatgagacgaattgttgttaaaaaattatagcaaaaaaaaaaaaaaaaa

SEQ ID NO: 1000 - DNA, 1418 bp, Homo sapiens
agtggaaaggtcagcctgggagccttttggaaggctctgaatcgtaggctgaggaattaggttcaactctscctatggccttggcagtggggattattggatgtccctgagtagggaagtaatttcttagagcttagttttgtggagaaacagatgaggtgcagaggagcggccagccaggagctgctgtacttgtttaggtgtgagytagcctcagggtgggttatgtggagctgttcatactgcagatatgacagggggcctagctgcaagagcaggtgggagggcttcattccaggggcctcagtgtggctaactcaggttgagragagaagatcctgratggtagagragsccaggttgaataccatactcaacccttggaaggcagaaagcagcragggaggtgattcactacaatagctggggcagcagattttgcggtgctgagtcccacctttcagcttgatggatgctcacctcttctcagccccagctcgtgccctgtttttctagccatagcccccagattactcacagctcctcatgccatttcctgtccagattgctatgtatgactctgacctctcttgtccagtggtctggtgctcacctcctctcactgctagaatattcaccaagggtttgcatttgggaagtcccttaccagctcctgcttagagctggtagggccatacatgtccacactcccaactggtggctctcccgctgaatggggcctcagcaggtgcccaagctgctacaaccttggccactctgtttctccaccccagcactgggcatggtaattagcctttccccatgttaatttattcagttttttcaagggtcaactgaattccccacttcctgggtaagaagcatgatctccttttaatttcacgtctaagatcctggcagcttcccctagctggttcctctgtagtcctgctgggactgtcagctcatttaaatgtgggtctgcagaaggctttaggtctcccccaacccccttacctttcacagaggaacctttcatcaggataaatgattattgctgccctgtgggtcttgctcaatactgttcatacctggagagagaaggtattgaaacatctcctttatgtgtgactttcccaaatttttaaaaattgtttatggtttaggccccttaaatactgtgtagcaggatgaagtctaccattaccagctgggtcaccttggatgggtctgtcaacatctaagcctcagttccctcacctgtaaaaatgagggtagtccctacctcataagggatattgtgaggatggaaagcgaaagtgtgagaaaatacctcccaagtgcctggtacatagtgggtgctaaataaaccactttttgtctgcaaaaaaaaaaaaaaaaaaaaaaaaaaaaaaaaa

SEQ ID NO: 1001 - DNA, 1854 bp, Homo sapiens
  SITE (1851): n equals a,t,g, or c
  SITE (1852): n equals a,t,g, or c
ggacgcgtggggagagattggagtcctggtctccctaagggaatagccctccacctgtggcccccattgcattcagtttatctgtaaatataatttattgaggcctttgggtggcaccggggccttcattcgattgcatttcccactcccctcttccacaagtgtgattaaaagtgaccagaaacacagaaggtgagatcacagctctgctgkcagagattactagcccttggctctctcgtttggcttgggtattttatattatttctgtcataacttttatctttagaattgttctttctcctgtttgtttgcttgttagtttgtttaaaatggaaaaaggggttctctgtgttctgcccctgtaattctaggtctggaacctttatttgttctarggcagctctgggaacatgcgggattgtggaattgggtcaggaaccctctctggtattctggatgttgtaggttctctagcagtctagaaatggatacagacatttctctgttcttcaagggtgataggaaccattatgttgagcccaaaatggaagtaataataaatgcctcctggaggctgtgggtgtgggggattctgtatctggattccgtatcactccaactggaggctgtgggtgtgggggattctgtatctggattccgtatcactccaagtggaggctggcaggtttttctgcaagatggtccagaatctaaaatgtcccattaatctggtcacttgggtttggctctgctgtatccatctatagtggtagagacccaccagggctcaagtggagtccatcatcctcccacgggggcctgttcttagcactgagttgatcgctccatgggggagagatcagacattccttatcagagatgatgtgaccttttctgactctgcccagtctctatgaatgttatggcctagggaagaatcatgaaactctttagcttgattagatggtaaacagtgttaacccatcctttactacagaggcatctgggtttgaatgttacctggggttctctctattgagttgagccccttcttcctttagtgggttttggacatcttctggcaagtgtccagatgccagaaccttcttttcctctagaagggatggtgcttggtaaccttaccttttaaaagctgggtctgtgacctggtcttcccatccctgcattcctgtctggaaccagtgaatgcattagaaccttccataggaaaagaaaaggggctgagttccattctgggtttgctgtagtttggttgggattattgttggcattacagatgtaaaagattgactagcccataggccaaaggcctgttctagttgaccaagtttcaagtaggattaagaggttggttgaggggtgcagtttctggtgtaggccaggtaggtagaaagtgaggaacagggttgcctcttggctgggtggagtctctgaaatgttagaagaagcgctgaagccttgattgatagttctgccccttgttgccctggggcttatctgattatgggacgagggtagamagtaagaagcacttttgaatttgtggggtagaacttcaacaataagtcagttctaagtgctgtcgcctggggactagtgagaaagctactcttctccctcttccctctttctccccatggccccactgcagaattaaagaaggaagaagggaaggcggaggagtctataagaaggaatcatgatttctatttagcagattggatgggcaggtggagaatgcctgggggtagaaatgttagatcttgcaacatcagatccttggaataaagaagcctctctgtgctgaaaaaaaaaaaaaaaaaaatnnct

SEQ ID NO: 1002 - DNA, 695 bp, Homo sapiens
  SITE (1): n equals a,t,g, or c
  SITE (602): n equals a,t,g, or c
  SITE (677): n equals a,t,g, or c
  SITE (687): n equals a,t,g, or c
ntgtgatccccgggttamsaattctgaacatggcggcggtggtagctgctacggcgctgaagggccggggggcgagaaatgcccgcgtcctccgggggattctcgcaggagccacagctaacaaggcttctcataacaggacccgggccctgcaaagccacagctccccagagggcaaggaggaacctgaacccctatccccggagctggaatacattcccagaaagaggggcaagaaccccatgaaagctgtgggactggcctgggccatcggcttcccttgtggtatcctcctcttcatcctcaccaagcgggaagtggacaaggaccgtgtgaagcagatgaaggctcggcagaacatgcggttgtccaacacgggcgagtatgagagccagaggttcagggcttcctcccagagtgccccgtcccctgatgttgggtctggggtgcagacctgaggagcgctgcgaccctcctaggctattgactgttaagtcctcaggtttggcccagattccagttcgtgcctctgaggtccaccagagggcgcatgaagcccaggctgttgccaaaccctaccctgccccacaccaaggagccanccaaaggcaaataaagttattgagtgtttagtagaaaggaaaaaaaaaaaaaytccaagggggggccccggtaanccaatttggnccctataa

SEQ ID NO: 1003 - DNA, 686 bp, Homo sapiens
ggcacgagtctgcattggaaattggctgaatgacagtatgtgggtcctttgcaatttttctctgtataaagagtgccatagtggctgcatctgagcatgcctgcattcctacagatatctaaagattcctccatgtcaggcagttgtaagggtgattgcttcctctaggaggggacatttcctgttttcttagatctgacaagattcctccctgtccccaactatcaaagtatccgtttccagcaagatgagattcctcttcagttaaacaaaacttgctactttttatattttaaaaatctttatatatatatatatacacacacacacacacacatacatatacgtacacatttgcacacatatatgtatatattttgaaaatttgctggatgtggtgactcatgtctgtaatcctagcactttgggaagctgaggttggtgggtcacctgagctcaggagttcaagacaagcctggccaacatggtgaaacccatctttactaaaaatacaaaagttagccgggcatggtggcaggcaccggtaatcccggctactctgtggctgaggcaggagaaccacttgaacccagaaggcagaggttgcagtgaaccaagattgcattactgcactgcagcctgggcgacagaacgagaccctgtctaaaaaaaaaaaaaaaaaaaaa

SEQ ID NO: 1004 - DNA, 2310 bp, Homo sapiens
ggcacgaggcaggtggggggctcagcctgcacccacttggagcccctgcaagagcgaaccggtcagcaccaagtaacaccacacacacgcagcacccaggatgatggtttcacttcagtcttccccatcccaggttttatgttgctgggcttccggagagccggtccaagcggaggctttcagtgatttaagtacaaacatgcatctcgtgatagtcctgccttgagagcttaggaatcttccggataagtatgaagcaattcgtaggcctgtttcccatctgattccatagggggctgggtgtggccttcgggttgacatgagaaaggtctttagcaatcatttctgcaccggagatgagttttatcctgtgttggggagaggtgctcaccctccaccctgtgtccctgttttggtagcaagagtgaccgatgtcaagaacgagcatcaaagccagaatcctgcttgtttgcttaaaaatgtaattgggggcggcgggggaggagaggggaaagagacattcgcttggtttagtgaaccgaggtgactttgtagctctgtggtcagcctacttgtctgctctgagggagagtgcgtggggagccatgctcaccgtggcaaacacaggaaccccatgactcgcccctcacctggcgtggagctgcctggtttgggctggagcagagctggtttcctggaatgttcctttggcccacatatggttctgtcccggtgagctctgttgtcagaggctcacgggacagaaccacatgctagggtctagggcccctgtctactgatagtcagtttgctgtgtcagaaagcacttctgaaagcagatatgagtcaccagacaggcaggatcttacaaaactcacgggcctctttggtctgcatgatggccccatgcgtttcataggctgtccactgagcgggattgtctgctgagtgggatgagccaactccagtttcttaaggaaaccactggaatctgcagcccccacatgcatctgtctaacgcatgcctcgtgttcgttttgcaaacatgcctgtggtggagggtggtcagttgtagccctgtgcgtctcaaggctgccttgtgaggccattcccagtgcgtgcccttgagctccttaccaccccttttcctgctcggccctttaatccctgacagacctggactgtgtggctgaagggggacctgcagcactgcagaaatgcctctgcgtggtgccatgaaggaaagaaaccttggcctggtctcgagaagcttcccatgcttcaggaagttagtaagggtggggtggcttgcaggattggcctgtttccagggcctcccacactcattggccagattgtgaactttgtcaggcttgtccctccctgataccaagtatgtcgagaaccgatggccccaccctctggctggtgctgggccggaggtggctatggaggattttggcatgcgtggcctgtcgccacctggacagcgtgacctcaggggttgtccactttacctttatggtgaggcctgtcggatggctaagtccttgaaaccctagagctgtgacgtagaatatgtgctgtctgtgagaccgtgttcccaggagcactgactgcagttgagagagacccattttgctctcccttaccgccccccgccccgggtgctttctgcacaaagcctagagcctggcactcaagcccaccggtggcagctcctagtgactggacatgcctggaagacccctcagccttctgtttgcagaacgttcatttcaggagcttctccttcccacagacatcttacacttgctcgacactgccacctgcagaagcctggcgggctctggtcaccatgtgtctatctgaaggttgcactggccagcatgggcctgtcccaagcgagaggggagacacagtggactgaaaggactggttgaaagtggccaatctctatcagcttaatttggcagagaaaatttgtaacaactctgagcacatgctgggtgaagtcacagctcaaggaaagataaagctgggcggaaggaggtgtgcgtggcttctggggtggggacccagaggggaggctctgggacaggggctggggttcagtgccagggccctgaggaagaaatggggactgatctcaaaattccagaattccctgtacatctgttcacgtgcttgtgtccaggtgtgacttgtaaactgtctagtgtttgcattaaataaaatggcaccgagcagaaaaaaaaaaaaaaaaaaaaaaaaaaaaaaaaaaaaaaaaaaaaaaaaaaaaaaaaaaaa

SEQ ID NO: 1005 - DNA, 774 bp, Homo sapiens
tgaaaacaagggccaagtgatgaagactgaagtcaagaatgaccatgttcttttctacttggaaaatagcaaccttgtgttcaacattcagccagccccagccatggtctacgattactatgaaaaagaagaatatgccctagctttttacaacatcgacagtagttcagtttccgagtgagacaaagcaattactagaagaggtaaagaaattttattacgtcataaaccattgaaaacacatctagtaagaaaatgaaaacctgaataagataggacaatagttgaagaaagaaaagtgtctggtacttcattagacttgtgtagctgtgtactgcatgagtaatctgataatcattaagattatattaatttctttaaaaatagctttaaagaattcacagctatatatgtaccttttataaatctctcatttttgttttgtaagttgacaggtcagtaaaaatttaggcatatatatttgtacatatgtgtgtgtatgtacatgtctatgtgcctatatatgcatgtttttatatctaaatatctatttatatatacatacaaacgtgtttattgtttaaatgatgttttaaatcccagttggagaagcatttcttgtaacaaactgattcttctgtatcaaacctggaaaaaaatcatgaaccatctgacatcgtgaacagtctgcagtgggctatggtttcttgtcaagtcttatttccttatcatcccattaaatgttgtcattttgcaaaaaaaaaaaaaaaaaaa

SEQ ID NO: 1006 - DNA, 614 bp, Homo sapiens
cggcacgagcttttgtctgtgttatctgaacactctacttcctttgcagccttagtcacacaactgagtcatctcaagtactctttaaggacacacagcccaggctgttctgagtcagaataggcccctacaggtatattttaaaactcttcgtaattctaatgtgtactgctggtatagctgaactactgacctggatcttagtcctagcctttttgcttttgcaatttcagtatcttcatctctaaactagggaaacactgggattctttcttagctgtgggggaaggtatttggttagatgactttgaatgaatagactgctgtgctgaaagagctttatcacactgtctcaaagtatgtaaagatacataggtggatgctcttactgcagcagtcatgaatacatttttagccatttacctaaggaaaaaggcagtttttctaggtaccatgaaggaagattgaccctgttggtatgcctgtgggggtgggatgtgagtgggactgataaactgatacttttggttcgtatgtacatactggaagaatcttcataataaatgagactacacaacaataaaaaaaaaaaaaaaaaactcgagggggggccc

SEQ ID NO: 1007 - DNA, 849 bp, Homo sapiens
ggcacgaggtccatggcaacctctttcctgaagttagggtgtatgccatccaggcctgattgtccaaaacacgtatctgctttctccatgccattgaacatccttccatggcctccattttatatggctagaggatgtttccttgcatagatgtattaaaatgtatttagttatcttctcttgctgccctttaggtgtattcccttttttctctcatgtgaacatttttcacagatatccttgtagcttacttaaccttcaggcacataccatgttgcatagatcataatttcctaataattagtgttattccttggtcagatggcatgcaaaattataagactttaaatgagtcttatataccactacttacagtcacttatgatattataatcacttatgataccaccagtgatttttatttaattatctgcttgttagtacaagcttgttatgtaacatatttgcttgaagttattttacttctaatatatgctttggttgttaagtaaaggagtttcttgaaatgcaaaaatttcactatttatacttaaatgaggaaacagccatttaaaactagagtgctgatggatggtagttttttaagttggagaaaacaaatctgcatttagtgatccagtgaaacaagacagttcatggggatcaatactcagctgagaccgggtgcggtggcgtatgcctgtagtcccagcaatctgagaggccaaggcaggaggattgcttttgcctgggatatcgaggctgcagtgagctgtgatagcgccactgcactccagcctgggtgacagagtgagagcctgtctccaaaaaaaaaaaaaaaaaaaaaaa

SEQ ID NO: 1008 - DNA, 762 bp, Homo sapiens
ggcacgaggattcctgttggctctaaccctcaattacctaatcttatgctttaacacataactgcattggatgtgagagtaacgtaccgtatggtcattgttctatatattaacattgaacactgctgcgattgctcaaggacattttatgttacggctttaaagcaaaggcatgattattagaaactatttaagcttttttctttgaaaaacaagctccttttacagaatataaacaacagtagtgcctgtggtttagcccaccaatcttgatgactaaaagtagctgatgcattgtgcatatgatgcttgagatggtttttgcaaaagcagaaatcgctgcaaggtaatcacaatagataaaagtggtattttaaacctttgaaataaatggatgtaactgtaccttggtacagcttttcacttgtttagtttttaaacgttagtataatctgaataaataaaatgttgccaaattcaatgtagaaagaatgtgacaacacaccttgggtagttctgcttgtgtttttgcatattgtaaaagcagtgtcacagctaaaaagaaagaaatcgtttctaacagtaaattattgtgctttagttgctagtttgtactgagagttgacctctccctgtgcagttttttgttctaaacttgtataaataacaattgtgtaatgtgtctccctcctacattgtaacaattgcttcagcctacgttataaataaagaaccactagattaaaaaaaaaaaaaaaaaaa

SEQ ID NO: 1009 - DNA, 778 bp, Homo sapiens
ggcacgagatttcttgaatgaatttcacatttgtaactatgattttggcagaatagaagattggctcatcagtgaagcgcagtatcttagctctagattctattttcatgcatcacagaagtgctatacggttaggtctgtttgtgcctcagtcaagaactaagaaatagtatgaattgtaagtcaagatgggcaactcagatggagcagcttagtctcacagtttgcttgtctatttattttatttagtgccaaatgtattccattttaaaagtaagccagagtgagtcaaggcatatacacactttctcacaaaacttcctaaacagatttgggggtttaatatgtccaactcctcatgaaatatattcaatccacttaaatatattccatctttttaacataaaatgtaaagcttagcacccatcattaatttatgtctctgttttatccagtggttaaaaaaggattctgcctctttagtcctcactgttaaataaaacccaatcatagtaagtgattaactagcaaaaagtaaagctatttatagcaaatttctagatcattagaaaagcactggtagttgtacaatatcagtgttgactttgaacttctttaacgagatcatgaattcttttcccttagccaaaacatgaaatatttaacctagttgtctctaaaagttttgtaatcatgagttagatatatgtcatctcctattcattgcttttatgtgatcaataaatcttttacaaacccaaaaaaaaaaaaaaaaaaa

SEQ ID NO: 1010 - DNA, 1621 bp, Homo sapiens
aaaaagaccctggcattttttcacatacttgaatccctaaatgcacctgtctttcactttttgagacagactgaatatatctaaaatttccagcaataaaaaaaaaagcatttaacttgcaccaagcaagaaaatataaatacagttaactgcattaagataatcacgttaaaattgttactatgcagcacagaacttcattcttatagtattcttgggttcaacctttgaatcaattttaccactgattaaataaatgactcaaagacatctgtaagtcatgctgctgtgttttgaaagtctttaactaaattaagattgcagaatgatagtgattattcaattagattttaagtaaggattgtgatattagaggctggaaatccttattttttaaaaaatcagataggcataaatagttaaatcactttcattctccccaaacctgtagttacagaaaaagttttatgctagaggtgggatgccaagttttcactatccatgaagcagcgctgcatgtcactaggtaacacagatccatccagatggtgtttacatttgatttatttgggatcttattgacatcaggtatacttggaagacatttcttttattcttcagcgtatgaatttaaagctattttttgtaaatatttctaatcagcgataatttctacctatgttctcaaccaacttagccagtttgtttttcagagcctgtagtcttattggaaatctattttatcagtgtgctttattgagtgtggattttgcatacgttcaaaacattaaccacaaaatacagcaagtgcacctatattcaccattaacttatatcccaagtccattttttcctgtacactacaaacaaaagatatattagagacttttgaaaaatgctgaaatactttgcttcagaattggaatgtttatattatgtagaaatcttcaaaggtagcattattaaatagcaaagaataattagaacccacatatctttttttgtgtggatggggaaaatgttttaaaatccagttatttaatatgagtttgagagagaaaattgttttttaaaaatatatgtgcattgaaatgatggcaatgcttatagtatgatcaagtatgaaaggaactttaaattcttatatttacttttctctcagtaaattgttaaattttcactcagcaaaagattggcatttgttaagtgttctatatttagtactaaaatcacagtcatgaaatcatagtcataaaatggtcttcacacagcagtcatccgtgtcatttatcattttgtaatattaaattatggcaattttatttcaaactaaagtttgaacaccggaaagtcattactcagtgatttgtaatttgggacttggattatttatctagagatgtttgtatattttgtcagtaactaatactgcgctgccatcatggtgactgtcatggttctacagaaatgccctccatgtgtccctctaatgttgcatgtttcagtgggttggaagttttgtatatttattgtattaacacagagtgtcataaaataaaatgctgtttactggaaaaaaaaaaaaaaaaaaaaaaaaaaaaaaaaaaaaaaaaaaaaaaaa

SEQ ID NO: 1011 - DNA, 962 bp, Homo sapiens
ggcacgagtgaccacccagccctccggctgctgatgtcatgagtaacaccactgtgcccaatgccccccaggccaacagcgactccatggtgggctatgtgttggggcccttcttcctcatcaccctggtcggggtggtggtggctgtggtaaggagccctcatatacacacagacacccacagctttgctaaggcaggggctgggtgggcctggtccagtctgcacagagtccccactgtcctgttaagggagtgaagggtgtggaggtgggcctctctctgcctgtgggccttcctgggctcagcagcccccacagtgctgtgtctctgttgcaggtaatgtatgtacagaagaaaaagcgggtggaccggctgcgccatcacctgctccccatgtacagctatgacccagctgaggaactgcatgaggctgagcaggagctgctctctgacatgggagaccccaaggtggtacatggctggcagagtggctaccagcacaagcggatgccactgctggatgtcaagacgtgacctgacccccttgccccacccttcagagcctggggtcctggactgcctggggccctgccatctgcttcccctgctgtcacctggctccccctgctgggtgctgggtctccatttctccctccacccaccctcagcagcatctgcttcccatgccctcaccatcacctcactgcccccaggccttctgccctttgtgggtgttgagctcaccgcccacccacaggcactcatgggaagaggctttccttctgggatggcggcggctggtagacacctttgctttctctagccctcctgggctgggcttgggcacaaatccccaggcaggctttggagttgtttccatggtgatggggccagatgtatagtattcagtatatattttgtaaataaaatgttttgtggcaaaaaaaaaaaaaaaaaaaaa

SEQ ID NO: 1012 - DNA, 841 bp, Homo sapiens
ggcacgagctcgtgccgaattatataggagccctgcagtcctaaccacaggagtggggccagggactttttgtgcttggttaatttggggggtcatggaggtcagaggtgagatgcagcctgtccccagagagccccatcctccctctgctcccgggcatgggcacacaggacaagtgtgagtgtgttgctaggcagctggacatgacatggctgctctggcagcttgtgccacctcgtcaggcaccgtatgtgttcctgcctgcctggggagtccaagagaggaagggggcaagggagccctggagaatgtgcatcttcccctttccttagccttggcccacctcgccacacgatctcagtcaagggcctctcctcaccccatgggcttctatctcagccttttccactttggcaaccctgggggtgagagtgaaggcctcaagatgcctgtcctgtaggtatctctggtgagcaaggccggggacatgttacgggacaagctacaggctgatttgtctcttcatagtgtagattgcagagtgggacaaatgttgggctcctcttcctcccttatggaggtagaatttgtgtgtgtcaatgcctgcacctgagtgttcatcctgatgggcttttacatgtgtgtatacccatgtaactactgctctgatcatgttatagaataagggtatccaatctttttgcttccctgggccacattggaagaagaattttcttgggccacacctaaaatacgctaacactaatgataactggtgagctaaataaaacaagcaaaaataaaaataaaaaataaagtcacaaaaaaaaaaaaaaaaaaa

SEQ ID NO: 1013 - DNA, 458 bp, Homo sapiens
ggcacgagtatttttgtaactttaaggtctaaatgactaaacttcaaagtaagattttgtcagaataaattgagaccattaatctaatataatacttgttcatgagcactgaaatcctgaagaggagagatttggttataaattaaaaaggttgggtgatcttaagtgcctcagttaatgcacgtacagtattcatttggttggttgtactacctctcagaagtaaaatttgtcaccttatggaatgagagtttttgggtttgggggttgtttttttgttgttgcttggtttggtatttttggttttgtgtgtatttgtataaattttctgtataattagcccaggctgatgtaactataaaaattagttgaaaaaaaaaatattgtttccttaatggaattctcacttcatttgaatataagattttggatgaaaaaaaaaaaaaaaaaaaaaaaaa

SEQ ID NO: 1014 - DNA, 1537 bp, Homo sapiens
  SITE (1424): n equals a,t,g, or c
  SITE (1426): n equals a,t,g, or c
  SITE (1433): n equals a,t,g, or c
  SITE (1440): n equals a,t,g, or c
  SITE (1476): n equals a,t,g, or c
gcgtccgagacaccacccaaagagagcatttgctgctgcttcccagaactgtccaacaataccttagcaacaccaagagttgggccctagatgggcccagcacattcacaggtcacacccacttccctgcaaaacccaccccctcccagcctcctcctgactctaagccctcctcttcctctacctctccagtgtatgtctgtcaccccccatttcaccagagcgtccttaggggctgggggtgggtttgttaatggggtggaggcaatgatgggttggaggatcttggctataggggctgtgctgactgcagcaggtaggttgggtttccctcttccttccctaatcttggttctctaccctcctttccactcctcacctgattctctctcttcctcctccttatatctgtgaggcagaaggcatctgaagctcatattagcccccattgggtgggaattaggagtgggtagttaactcagggagacttgagataccctggaaaaaatgctattgagatgtcctgacattaggcagggtggatggaacaagaaggagcaagaaaggaacctcaggcagatgttaggacatggacttgatcatgtggcctgggagtttagaaatggggagagacatcctcctagatcagatcgtgggctcagtaggcatgttgattcccagggagaggtgccaggaacagcatggtaaagaatgtactcttcacagctcacatccccaggttgctgatgccactcactccccctctcctgccatcgagtggccttgccggacacatcaccctacctaaaaagccagtaaatgagaacctgtcagctatagccatcatttctgagatgcgattttctttgggattgagctgcagtgggcagtggctccttacactgtaattttaattctctgcctgcccagcctctctgtcaaagtagctggtgatctataaagatgctaaaaggcaccaggggactttgccatttaaaggactcctgcagtgaattcttttgtaaaatgaatatggcaccctaatttatccactttctaaatttgggtccatgggggtgtccagggcatgcttatgtgctgtcaccagcagacaaacagagggaatggaatctgggggttccttccctgctctcccgccatactcaggataccctaccataagtgatttcctctcactgacttgcagaaaatgtgtgagatacccagcaagctaagaaggcagttttgctgggtatctcatacccaaggctggggtttgggtgatctgagaggttagctccttgatcctaggatggaagggagagcttatatagaagcttttacttggaaggttttgtatcctaaggtcagacatagctatattaccaagcctaaatgccatgtggcccaggaaataatttggncntttgttntaaaccncttgtggtaggtattggtctctctgcaactcagccnttaattagaaattagactgagccgaataaaaaaaaaaaaaaaaaaaaaaaaaaaaaaaaaa

SEQ ID NO: 1015 - DNA, 519 bp, Homo sapiens
ccacgcgtccgcacgtggttagtggcatctatattggacagggcagatctagagagaatcctgtatctaacaattttaatttttttccctttatgctgttattccttacctagagaaacaatttccctccaaagttcctttgaggggtctgtttaggccaggccaacacaagtgacctatgtggattttagcatcctttttttgaaatttgaggttttatgaagcttgagtttttctggatatttttagtaatttgctggtgtgtacttagctcagatacttgattgcaactgtgttgggtcaactatttctaatgggacttttccatttgcatgtacagtcactggaaactgctgggcagagaaactctaaaaggtagttggggcacactttttccacctgtcagattggtgaagaattggtgaggctgtggggaaaatggcattctcccacttttgatggatatgtatccaaataaaagtcattcccatgctttctttcaaaaaaaaaaaaaaaagg

SEQ ID NO: 1016 - DNA, 1734 bp, Homo sapiens
  SITE (191): n equals a,t,g, or c
gctgtgttgttgagtgcagagtctagggccargtggaatgtgtcatcttgtgargaaatgtgtttgtgttgttttttacttaaaaattgtcagcgtagtggagaggggaatgacagaagtaggaaggcaccccaccattgtgtagtgaggcagtatacagagaggtaaggcagccggggcagatggctgcngccctgcacggggcttttttctggatctggttgcacgtgctgtgttctgagaggcgaggttagagcccagatcatctctattcatgtgacacagccattcccaaaaggacttagagcagagggaacttgacccccatcttaactgtctcttttgaggatgagcagagttctcaggtgtgcccccagcctggtttatataaatgtagctttaatctaggtgtgagcagatgtctgttggggatctctggacaccaggcctactctggagtcagagaggggacccgccatttggctctctggtacatgtggacagtgtctgctcctctacttgtcatggctgaaagtactgcagctgtcatgacattctctggtgtagaagaaagaacttcccagagggtttcctggcactgcggaaagacccagaatgagggargccctkggacccacagaggcccctgcaggcatttcagcacgcctccctccgctctcacttgttcctcagttctctcagaaatggagagaaatgacggtccttattccttctttttttacaggtgggcagatggaagagggtcgatgttttgctcaggatcacaaacagaggtcctgaggctccctctcctcactaggatccaccctsccccaaagcaaattttccttttgcctgttcactctgtgaagagggctccttgccaagtcacccagcatcccctcccctcctcctcctctccttccagcccaccctcatctcaggcaatcacatatacaggtaacaggtgttctcagcctcatgaaaaacccatgctagctgtgacattgaattgctgggctggcagacatctgcggaggagcaaaaggcatatttgctwcttmctgcctctgcgcggtgccagaragctaaagtcatggtctaacagggggagcatgctgtctgagagaatgktctgctagctttyagatgcacaggkttataaaaataccaccctgscatttaaaacatgtttaaaatgttgatagaaaacaatgaatcgtatccttagaaagacagaccctagtgaaagaaacactaactcacacaggtagggtctagcttccataacatttaagtttattctatggaattgttcattggtgctcctgttttagttacttctccatagacttgtttttcccttgactaatcaatgccatctggtgccaggtggtatcctgggtgtagcacagtgacagggtggagactgccctggccgtggcatgtgcagggggcgttcttgagcctgtcttctgggagccctttcttttcctttttccctcctttaggttgaagacttcatcattccctgcgggcagtttctctgtttttcctattttcttttcctcaagaaaaatgtaatttttaagtaacagaattgktttctgtgttrcagcatttaagttgctgagttgagaaatcatggctgagtttgccaagtaaagtttttaaagcaaaaaaaaaaaaaaaaaaaaaaaaaaaaaaaaaaaaaaaaaaaaaaagggcggccgc

SEQ ID NO: 1017 - DNA, 1908 bp, Homo sapiens
  SITE (1868): n equals a,t,g, or c
  SITE (1887): n equals a,t,g, or c
  SITE (1904): n equals a,t,g, or c
cttttcttgttcctttcgtagcctgcattttccagtgttatttgtacctgttctacagtccagccaggactatgaaggtggtgcttatgctgctctttatttgcctgggcaacatgtacctgcacgggctgaggaacctctggcaaatccttttccacataggagtggcttttctgtcttcatatcagatactaacaaggcagcttcaggagaagcagtctgactgtggagtatgaggatgacactgtgatgaatggattctttgattttcttttgaggatcaatctatgtttctctttctgcttctctactttacactccagtttccatccttttcagccaactggactgaaaaaccaggaattggggatgttaaacagttgcagtggaagtcatgaggttgcttgatacccagccttggttctgtgccaagcattactgcaggatctccagccagttcagcacgtttacctaggacagctggatctgggggctcatccasaaagagctttattggaagagagaaaggaaatattttggtcttttaagttgaatgatacagtaaaccacttgattcaataacactggttttagtcattgagagttgtctccaaggaaccactttaaaatccaaatcagctttcagtctaaacataacttgattagttttttttttcagagggtcagtacaggatgaattaaaaacctaaaaatatggttcataaatgtaagctagataaattttgtttacattttttcaatatcttaggttcgatatacctttggaatatttaattatattttggatataaattggacttcatttagggtgagggcaaacttaagctgagaaaatggttaagaaatctgagtttatttaatttatatgtaaccttttatagtggtgggactgtttgggtacagagatgttttatatttatttgcagggtatatccgaatattttaaaaattaattgaataaccagtacttctagatgataagtttgtcagcatgagcagaaatgagaatttcaggattacttacaattgaccacaacctggagtaggtgaatgaacatggattcagtggcactttacagatccgcttgggaggggctgctgtcatcagccttttcagtagagctgagtgcctgttgttttaatgatgatgactactgtaccctgtgtacctgttcccagagcgcctccaaaattaattactcctctgcacctttcccagtcatcttaattagcttgagggcctcattttttatgaacaagagttaagtatctgttaactttttaaagcttgatagagatataattaacacatactctggaaagttactctctttcactgtcaaaaaattgattgatcacagttttccaaaatatggttctggataagatcccttaggtttcccgaaatttcagcctggcttgttttgtaccacgcaggaggtcattttgggagtttgctctttggattgttcttggtagaagtctggaatctgaatagttcaaccacagttgcatggaacactttgagtgttcaactgcattatgtggtcttgataaatttttaaaaatcctattttgatagtttttaaaagtggaaaaccattacaagagttgagtggatagggaatgtaagaatgtagttttagaaaaattcaattatatttggttatcactggtattgtattgttattgagctaccttgttatcattttaagaaaaataagtttatatactgggaactatgttgggaaaatgttgccatagtaactttattttttataatagaattttctatttttgaccaaacattaaaatatttgggatatgggccaggcmtgrtggcctcngcccgtatttcccagcacnttgggaagggccaagcnggtt

SEQ ID NO: 1018 - DNA, 513 bp, Homo sapiens
ccacgcgtccgcccccctgtcttcccccacatctttgccagaggtgtgacatggtcagggggcccatctgctactctttcccaccagctcccctgttccagttctggttgctgttagtttccctgaggtatttgcaaccaccatggctgggtaaccaccgatcagcacagctgtccccttggtctcctgtatcccagtcactagtcctccctggtccaccccaccctcatcctcaggagccacagccatttcttagagggtttcaaaaggacagcctttggcgccttttccttctaacctttgagtccagccctttccagttttcattcactcgaagtaactgcactcaagctgtgctcaaaatcggcaacgcatttatttacaccaagcccttcccataaaacacaactgctgaagaaaatagcagacgtttcccctctctctaactctgggtatcccacagatgcaaaagggagaataaacctgaatattattaccaaaaaaaaaaaaaaa

SEQ ID NO: 1019 - DNA, 1030 bp, Homo sapiens
ggataaaattcacacataagaaaaaatgcatagatctgaaatgtgtcactagagagtttctggcaaatgtgaatacctttgtccccagcacctaaggtagcctgaagagcaagtctctccccaaaacatgcgtctttttctatgcctgtggtcaaatcctgcatggggaaaggtttcgatttctgacactatagatgtattttattctgctttgaactttatataaatggaatcaaacattatagactttttttggtaaggggctacttttctatttttgaggttaattcatgctagctaatgtataaaattagatcaacatattgtcgtttattcaattcatagacagactgtgatatgaaccaccaaaattttcatgtacatggaaagagagagagagaaagagaggaagcagagatattttatatctgagtcagtccattaagtaaataaatgacaatattttcatttatttttatgtcagtggactttaaatttgtgtccagtttatgaatattatatgcagagctgttacaaatatcttagtgtaagttttctgatgttctawttttattgagaaaatatgaagtatgtatttctttattctaagagtaagtttaatttttttcagtggtattgaggcataattgraatatttttataatatatatgtttaaggtgcaccaattgatgttttgatattgtattagtccattctaacactgctataaagaaatgcctgaggctgaggtgggcggatcacgaggtcaggagatcgagaccatcctggctaacacggtgaaaccccgtctctactaaaaatacaaaaagttagctgggcgtggtggcaggtgcctgtagtcccagtactccggaggctgaggcaggagaatggcgtgaacctgggaggtggagcttgcagtgagctgagattgcaccactgcactccactccagcctgggcgacagagcgaaactctgtcaaaaaaaaaaaaaaaaaaaaaaaaaaaaaaaaaaaaaagggcggccgc

SEQ ID NO: 1020 - DNA, 1063 bp, Homo sapiens
ccacgcgtccgaagaaagtaactataaccggttctgaactattaggtgaagagatgcataatcttatgctaatactcataagtttgttcatccttcagattagcaaagataagggaattttttgttttgttttaatcttggcaagactgcgaggaactaggcattcttatacattgcttggtatgaatagataattgaaaatctctggaggtacgtttgactattctaggaatttcttaaggctgtcttcacatgtatgcagaatgacatgtaggagaaatttttggctgggtgtgcttgctcacgcctgtctcaaaataaaaataagccgggcatggtgacatgtgcctcaaaaaaacaaaaacaaaaaaggtcggggggtcaggcacggtggctcatgccttgtaatcccaacaactttgggaggccgaggcaggtggatcacctgaggtcaggagtttgaaaccagcctggccaacgtggagaaatcccatctctattaaaaatacaaaaattaggcgggtgcctgtagtcccagctactcgggaggctgaggcacaaaaatcacttgaacccaggaggtggaggttgcagtgagccgagagatcacgccattgcaccccagactggacaacagagcaagactccatctcaaaaaaaaggtctttataggaagtctgtgatgttgtttttcataactccaacccgcccccaaaatcagggtgaatacccagaaaacaccttgagaagggagtatgtggctggactcagtggctcacacctgtaatcctaacactgcactgcgaggctggaggtgggcagatcacttgaggtgaggaatttgagaccagcctggccaacgtggtgaaaccccgtctctactaaaaatacaaaaaaaaaatcagccaagcgtggtgccaggcctgtagtcccagctgctggggaggctcaggccggagaatcgcttgaacccaggaggcggaggttgcagtgagccgagatcgctccactgcactccagcctgggcgacagggcaagactgcgtctcaaaaaaaaaaaaaaa

SEQ ID NO: 1021 - DNA, 1749 bp, Homo sapiens
ccacgcgtccgctttgtttctggatgttttcagaggatcagagctctgcacaggatctttatgcttgggtgaattcttgtgtttggtttcacagatgcatatattagtaggataatttttggtgttgcagcttaggctgtgatccagtagatggtgtggaagagtgatggccaatagctaggctgatagccagtcacactactcttttgtatctcctcatgttggcaggtgtgctctgcagtcgggggtggagacaaatggccccttcaccaggtctgctcatgagccttggggagacccttttgatcaccacttatgtgcccgtgtttcttttgttaggtgttccaggatgcaggccccctctgggaaaggctgtaacaggaagatgttcttcaacctttctggattgaccctgtggagggaggcatagcttgttcccaccctggcccgggaacccatttgtctcaccccttgccacactctgagggtgggggatcctccctcactcaagtgccaaccacagatcctggctttgtattcctgagctgctgtactgtggccctggggcaccagaacatcccatggctctgtctgaatccatggttggattctggctgcactggggattctatgtgctccagatcaccagaaagtactcaggtggagcaatgcgctcaggctgggccaaggagctgtgctgtgcacctgctcctgcaggtggctaggcatgggccctgggaaaggctacatgtatgaagcttgcagaacagatgtgcatcattcccagggaagccagccctgctctctcctggctggaaggtcagctggggccagcgcctcccagaagggaatagaatcctgggggatgaccatctgtggctgctctctgctggactgtcctgtgcacacaaactcctcagctccatgctgtctgaaggcctgtctttgcctgttccctggggagatccccctccagctcccacgtccttgtgtgatgcagggtcccctgtagctagaatcccagagctggtggcaagagtgaggcatccttcagttccctcactcactgctttcccaggagctgtttgggccaggaactagcctaatagcgtttgggtaccctgtcagggttcccagcttttccctttcagcctcagcttcagcatcacttctacccacccctggctttttctttttgaagagctacccaaattatggtggcttacttgatagtttggtctctctcagtgggagcaacacatcctggctgcatgtagtcggccatcttgtttccgcctcctgctgtctttgaggaatgctcagccaccatccagctgggccacatctgtctgtcttagcagcagcagcagcagcagcagcagcagcaggaggaggaagacagcaatgatgaggctgcctaccgagcattcatgaggacctcctatgagaagaacccaaagctgttagcatccctggctgctgaataggtctactgtgcctggcaccccaagcagccctccttacagccttgcagccaagcctcttccagcctccctcctctccactgcatactaagtagatttcttcaaggtcaggcatagtaaattgttggagtgggattgacacctaggtctacttaggctgtaaagctacagcatgtaaccacgacatgatatgctatcatttctaaaatagaataaatttaaggaaactaaatattcaattcttgaagatagaaaaaaaaaaaaa

SEQ ID NO: 1022 - DNA, 138 bp, Homo sapiens
cccacgcgtccggggagatgaagggctgggatggaaagagctttattctcagtgcctcatcttttggttgttttggattttacaacatgtgcatgcattgcctacacaaacaaagacactaatttgaaaaaaaaaaaa

SEQ ID NO: 1023 - DNA, 1985 bp, Homo sapiens
  SITE (310): n equals a,t,g, or c
tacttactttgcaaagctcttttacataccttgtgttatttgattccaacaactcagagcggtccagtaggatggataatgttcttattttacagatgaggaaactgagatacaggaaggtgagttacagaactctggctactgttctgctcatctcccagccccgtgaattttcatctctctcttcccccagtttatttatggagattcttagttcctgttcagattgtgatgagatccaattcatggaagatggatcctggtgcccaatgaaacccaagaaggaggcatctgaggtttgccccccgcnagtactgggctggatggcctccagtacagcccagtccaggggggagatccatcagagaataagaagaaggtcgaagttattgacttgacaatagaaagctcatcagatgaggaggatctgccccctaccaagaagcactgttctgtcacctcagctgccatcccggccctacctggaagcaaaggagtcctgacatctggccaccagccatcctcggtgctaaggagccctgctatgggcacgttgggtggggatttcctgtccagtctcccactacatgagtacccacctgccttcccactgggagccgacatccaaggtttagatttattttcatttcttcagacagagagtcagcactatgggccctctgtcatcacctcactagatgaacaggatgcccttggccacttcttccagtaccgagggaccccttctcactttctgggcccactggcccccacgctggggagctcccactgcagcgccactccggcgccccctcctggccgtgtcagcagcattgtggcccctgggggggccttgagggaggggcatggaggacccctgccctcaggtccctctttgactggctgtcggtcagacatcatttccctggactgagttccctggattatggaaacttcgctgtcccccaacactgagcaagtatgctgtggagtcccaaccccagctactctgatccctctgggggctctggccaagggccagacagaccttcacagatgcctacttttggcctcatctctgcctgacaaggcagcacccaaagggttaatatttaacctctttttaaggacactggggtctgtttctgggaaatgttctttagatggtggcacattcctttgggtatgttaacctaggcagtgggaggcaaatgggatggtatgtgagctaggagaagggctgaaccctcagccttgactatgtctagagcctcttggggaaggggcacctctcttgaaccccaaatgctctctcttcttattacccaaacccatggctctatttcttcttcacatccattgtctcttcatgtctattccattcccttcggccaaacagacaggtggaaaaactgagacaggcagtttcagagatggacagagaactttattttggattgtggatgtggacttttttgtacataaataagaaaaaccaaaatactccaaagatgacttcccctgcctcctactccagtatgacagaggaggatgtaaggccttagccatgatctgcaggggtctgggagtcaggcccggcctattgcttgggtctctctctatttatatatctaagttcacagtgtttcttattcccccctaagcttctagaggctcatggccctgtagttaggcctggctcattctgcacctttccagggaggtggaaggaccctgtgccctccttcccaatcttctttttcaggctcgccaaggcctaggacctatgttgtaattttactttttatttctaaagttgtagtgaagctctcacccataataaaggttgtgaatgttcaaaaaaaaaaaaaaaaaaaaaaaaaaaaaaaaaaaaaaaaaaaaaaaaaaaaaaaaaaaaaaaaaaaaaaaaaaaaaaaaaaaaaaaaaaaaaaaaaaaaaaaaaaaaaaaaaaaaaaaaaaaaaaa

SEQ ID NO: 1024 - DNA, 1576 bp, Homo sapiens
gtcgacccacgcgtccgcgacctatcacagacaatggaattcgtcagtggtggtaagactgaaatcctgatgcttttcacacttcttgtctcttgctatgtatttctgcctctagccttgccatgttttgccttttttttttctttttggccaattcctttttatatgtgcccacaacagaggtggggagacacggagcaccctgggtccttcccagcgctgctgggcaggccccgtctccaggccccagctgttgaaactttgaagggcaacaaacaaccatccacactgccggaccctaggctgttcagggaggcagctcatttccaccccggccccaggacacccagcctgtgccccacaaggatctctctaaatgggagggattgaggctacttttctgccaagccctattaagtagtaatgtggggaaacccactgtgtcagtgcaggaagccctagacaaatgttttcaaataaatttcactgcccagcctgcacagatttccatttgaagtacttcccatccaccctgacacccaaaggggtttttttgttttgttttgtttttgagacagggtcttgctttgttgcccaggctggagtgcagtgacgtggtcatagctcactgcagcctcaacctcctgggctcaagtgaccctcctgcctcagcctcccaaagttctgagatgataggcatgagccattgtgcctagcctattttgatttttttcttagagtcaaggtcttgctctgttgcccaggctgatcttggacttgcgagccaccatgcctggctgggttttttaaaaatagaatctcactgatagcctgcaagaaacagatgcagtgcctgcttccgtatcagtccaaggagccctcgtgtttgccacctttacctttgaacctccccctgcctccctgcctgtgtccgcttttgcagctcaatgcagccatgacaaggaaagaaaagacaaaggaaggccagagagccgcgcagttctctgcaggtgcagatgcaggcagtggaggtggcctgagcaggcagaaggacaccaagcgccctatgttgcttgtcattcatgacgtggtcttggagcttctgactagttcagactgccacgccaaccccagaaaataccccacatgccagaaaagtgaagtcctaggtgtttccatctatgtttcaatctgtccatctaccaggcctcgcgataaaaacaaaacaaaaaaacgctgccaggttttagaagcagttctggtctcaaaaccatcaggatcctgccaccagggttcttttgaaatagtaccacatgtaaaagggaatttggctttcacttcatctaatcactgaattgtcaggctttgattgataattgtagaaataagtagccttctgttgtgggaataagttataatcagtattcatctctttgttttttgtcactcttttctctctaattgtgtcatttgtactgtttgaaaaatatttcttctataaaattaaactaacctgccttaagaaaaaaaaaaaaaaaaaaaaaaaaaaaaaaaaaaaaaaaaaaaaaaaaagggc

SEQ ID NO: 1025 - DNA, 2238 bp, Homo sapiens
  SITE (393): n equals a,t,g, or c
tttttcaaaagcagagcgtagaattaattgtagcagctgccccccccacccaccacgagcagcgcccccccaacactattttaataaaccattaaaaaaaacacattttcctgctggctggccacattgagagtgctttgtgaaaagaaaaaacaaagacattcacaaatcagataaaactggagaatgacatttgtctgtaaatggcttcttggtctggaaatggcgtggtttcttttttttttttttttttttttgtcctcctcaaggtgggaggggggattgagagtgctctaaggagacttttcctccaggtgggaagagataaaaagacattaattagttgtttatcaagtgacatttagttgtttggttttgggttttctttttttnattgcgatttttcctctgattaaaaaaataataataaaataaaaaaaggttaactataaggagatggcctttcctccttttttttcttaaggtgctgttttgggggaaaaaaatgtaatgaaatgaccaaaagaattacacagcattaattaaaaatggaagttttccacttccttgataatttggctatctgaataaatttgtgaatttgctaggttaagacctagttcgtggtcacatttcaacaaaacagcttgagtataaagaaaataataaaaggctgttcttatttattttcctttggtggcttttggtttgctctttttgcataagtcatgactttgttctcctgggtccagatttataaaagcagaaaattactaattaagtcaaaataagtgtctttggtgtttatgcatttgcaatttcagtaattaaatggtacatgtgttgctgtcttgcctaaaacttttaaaggcagaattatgctgttgggatattagtatgcgtataacttgatttcaaagtataaatctggaaaagtctagaatcttttctgtgaatgctatctcagtactactttaagtcaagtgtgatgctaatgatatcttaaaatttccaacaccttttgtgcagtgatcacaaagtctccacttaatttgagactgttactcagaacacgccttgcgtcacgggggctaatctaagtgtcctagtctatatgactacattacatcatgatgtattgattgcctctggcctaggaatctgcagcttaagccagtgacacaayattttgcatttttaaatggtgattctcaccaaataatgcctccccacaaaagaggaaacctaataatgccccaaatcctctttttactccatcttaatgacataaaaattaagtgaattagagaactacaatgatcttaaaataatttttcagscacatttcataaatgtggaaactgaggcacggatctgtttttgcctatgaaagataggtcctgtaactgttacacagtttaacacttctgaaattagaatattagagatcctgctaaatattacgtattgtttccttggcctctcttaatagtgccatttatatttttaatttaccagagttaggctcattaagatagtgtttgctttgaaatcaatgtttctgtggaaactaattttaacttttacagatattgattacgggcttgtgaaaaggcaagtaaaggaggaatgctgtgctatctgggcattaaaacaaaacaatacaattaaaagttaaaaaraaaraaaaaggtaataacagatttgtgtggaaggarggcaaaaaaacttcmcacgtggattatctgttggagaatgtgcattgcaaaargatgcaaatagcaatccgccctctagctttgatggaaaggtgtttttcccatgaaccgtaggggatttttaccaagtgaacgtggtttgaaatggagggcatgttgttcaaccctgtggtttgggaagggctgggacttttcaagttaggtcttcccaggaggagttccttttgagaaagttggtccaaggcactttacggtgtttgccggttcccaagcgatgggccaggactgttggcttaaaggtgtttccaagtgcgattttgggccccttcccgcaattgtcccggggtttctttagagatgttggaagggtggtttggaaaaccctgggggttttccggggccccctaacctttatggggaccccccgtggaccgtggtgcggttcccgcaatgttttgtggggtcttgttccgagtccccccttaaaaaaaactttgtcgcgcacccggaagggtacggg

SEQ ID NO: 1026 - DNA, 1126 bp, Homo sapiens
acgcgtccgcggacgctggtgttgcatgtactcaatacatttactccaagattcttctgacaagggacacttttagccaattccccaatagctctcatcattataggattaaaaaactaggcctcctgtgaatttaaaaatagattaaaatactccctggtactcagatgtgttcccactagctaattccagcattggtcaacatggatcttgtttgaagctaacccagtttaaatattccttttgcaaaacagatttttagagctatgccttgctaaagattcttccaaatagtaatctctcctggcacaggagctaaccactgcccaggtctctaggctcatctcctgctgtacactccacattcactcttccttccattagcactacttgcagttccccaaacatggcatgcctctatttttgcctgcatacttcctgtgaatgctatttctttatctagaagattctctccccacccccacctgccttatctggcatcttcagagattcctgtgtctctttgagatccaatttaattgatagttcctttaggaatcattcctatacttcccaaactaagataaatgccccttcttatgcccatatccatctgggattttgccttccttcatactttatatccaatacaccaaaatctcttgtggctctaccttcaaaatagatccagaatctgatgacttatcatcttctcaactgctaccaccctggtccataccaccatctctagcctacatttctgtgatagcctcctagttgatttattcttacctacttcaacctagcctccacaatctattctctacatgatagccaggatgcccttttaaaatctaagtcaaagtccttcctctactcagaaccacttgagttcccttgtttcactcatagtgaaagtcaacagccttccaatgtgctgcccccctcttaatactcaccaataaattctacttcctgtccaaaaaaaaaaaaaaaaaaaaaaaaaaaaaaaaaaaaaaaaaaaaaaaaaaaaaaaaaaaaaaaaaaaaaaaaaaaaaaaaaaaaaaaaaaaaaaaaaaaaaaaaaaaaaaagggcggccgctctagaggatccctcgaggggccc

SEQ ID NO: 1027 - DNA, 1141 bp, Homo sapiens
  SITE (1125): n equals a,t,g, or c
ggctatgggcttttctttattttttctttttttcttacctccttttgcagttttcccagatctgcaccttctgaagagcaaatgcaccttcctgggtttgtccaaatgcagatcatttatgctctcttatcacacacccacagaatgccgctctcataccgcaaaagcactggcttgccacattgtcatgtagtctcccagagacctgtctatttctagttgtgttttgtgaggcaggcaggagagtctcctgtgattacttcctctgatccttaaataaatctttctggttgtttttttctggggcgcttttctccgattctcagagggagcacagaccccaagaaaggataagaacttctggtctctcccagcttgtgctcctcagagctcatggtttcctkgcwaccaacaccaaggaaatatcaaaaggatatttaaagaatcataggtgcaaactgattagaagtttggcaaaaagagaggtacctgaagggccaaaaatctgccactttgaaaaccaacacacagggcacttggataggtttctctctgttgccagagtgccaaagaagatttttcagctaaaagaatagccgggctctgatcaagaggacagaataataaaaagggtttgattagaggcaggatataggargaaaaccccaktgtgggtgggtatctagtaaatgaaaggccaggaaggcgatgggsgcctgactttccatctcagctgagcctagggcaaggaagagacttagggacttcctttttttttttttgagacaragtctcgcaccgtcgtacggactggartgcaatggcacaatctcggctcactgcaacctccgcytcccaggttcaagcgattctccttgcctcagcctcccgggtagctgggattacgggctcccaccaccacgccctgctaattttttttgtctttttagtagagatggggttttactatgctggccaggttggtctcaaactcctgacctcgtgatccgcccacctcagcctcccaaagtgctgggattacaggcatgagccactgcgcccggccttagggacttctaataaaagacttagggacttctaataaaaattgaaagaaaaaaaaanaaaaaagggcggccgc

SEQ ID NO: 1028 - DNA, 1580 bp, Homo sapiens
ccgggtcgacccacgcgtccggtagaattattgtataaattatagaaacatatatatagttaaattcaagtctgaatctgacctttatgactataaattgatacgctcaaaatttcaaaattatacttctttgacccacacaatggtagtagcttatgggagagtgtttatgttgtatttaagcttgcttttcaatttttaccaaattaagggaagcaaaaatattaatttataactctaaattattaattctgagtgataaaaaagattgttttgaaatccacaaaatttaatttgttcaacattatggccgctttaaaacatacagtagagttgaagttattttacagtaaacagttatatacccatcaccttgattttactactaacattttaccatacttgttggttaatacctatccttcattaatctttccaaccacccatcaatgcatcttatatctgatgcattttaacataagttaacaatattgaatagccaaaatgccaaatttaaaatatttagaaaaacataggtctattttaaataccctgcaataatggccaaaagtcacatgaattcggtacaagttctagccacatacatatgtatccagaaaacaaaagcaaatcctacatattttatatttcagtcgaatgtatcagccagggtctgatcagaaaaacagaaactactgtgagtggttccaaaagaccaaaatattaccgtaagatttttattgattattttatcttggctgactgtagagtctctcatttttctgttcatttttattaatagaactgaaatattagggggctctaatatttgaaaggaaaataattagagtgctgagttctctgtctttttggccttgaatcctttcctatctccttcctgctttactctgtagagcagcgaaactgatccctgtaggctgtctcactgacacttaagtcaataagaagtctaaaaataatttgatatattgaattaatgcagtcaaagactatatttccaatttaattttgcagactcataagcaatttatcaatcctgctgatacggtttggatctgtgtccccaccaaatctcactttgaaatatattccccaatgttggaagtgggtactggtgggagataattggatcatggggacagatttctcatgaatggtttagtaccatccccttggtgctakttttgcaaaagtgagtgacttatggagatctagtcatttaaaaaagtgtagtacttccctccctctcctctctctctctctctctctctttctcgctcctgttcttgccatgtgacatgcctgctccctctttgtcttccaccatgattggaaacttcctgaagtctccccagaagcagatgttgctatacttcctgtagggcttgcagatccaagagtcacttactcctctttttcttatggattacctcatctccagtatttctttatagcagagcaagaacagcctaatacacctgccaaaccagaataaactgtgcttgtccaataactcctgtatcccgtagcttgaaataaatcaccaaaaaaaaaaaaaa

SEQ ID NO: 1029 - DNA, 2138 bp, Homo sapiens
cccacgcgtccgtacaaaagttatgaatagtgctgtgatgaggaaaactgccagttcttgcccagctagcctgacctgtgactgctatgcaacagataaagtttgtagtatttgcctttcaaggcgtcacaggttgcccctagggcaggtacaccaggattcagagcaccagaggtcttgacaaagtgccccaatcaaactacagcaattgacatgtggtctgcaggtgtcatatttctttctttgcttagtggacgatatccattttataaagcaagtgatgatttaactgctttggcccaaattatgacaattaggggatccagagaaactatccaagctgctaaaacttttgggaaatcaatattatgtagcaaagaagttccagcacaagacttgagaaaactctgtgagagactcaggggtatggattctagcactcccaagttaacaagtgatatacaagggcatgcttctcatcaaccagctatttcagagaagactgaccataaagcttcttgcctcgttcaaacacctccaggacaatactcagggaattcatttaaaaagggggatagtaatagctgtgagcattgttttgatgagtataataccaatttagaaggctggaatgaggtacctgatgaagcttatgacctgcttgataaacttctagatctaaatccagcttcaagaataacagcagaagaagctttgttgcatccattttttaaagatatgagcttgtgataatggatcttcatttaatgtttactgttatgaggtagaataaaaaagaatactttgtaatagccacaagttcttgtttagagaccagagcaggattaataatttattttaacattttagtgtttggtggcacattctaaaatatagattaagaatacttaaaatgcctgggatagttcttgggactaacaacatgatcttctttgagttaaacctacctaagtagattttaggtgggttcctattaggtcagatttttagcttccctaattacctttcactgacatatacagaaaaaggagcagttttagttttaattaattaaaattaacagatgtgatgaggatttaatgaatcaaaagacttaatttgtaattctttaaaattatgagctagtatatttgggggaaactcaacctggtgctggtgctcttaacaattttgtaaataaagaaaataatttccttttctagaggtacatattaggccttttatgaacactaaaacaatgaggaaatgttggtcatggggcaaagtatcacttaaaattgaattcatccatttttaaaaaacacttcatgaaagcattctggtgtgaattgccatttttttcttactggcttctcaattttcttccttctctgcccctacctaaaacattctcctcggaaattacatggtgctgaccacaaattttctggatgttttattaaatattgtacgtgtttacagttgggaatttaaaataatacatacactggttgataaagggaagctgcaggaccaaggtgaagattgatagtccaaatgcttttcttttttgagttgtatattttttcacaccatcttagatataattaggtagctgctgaaaggaaaagtgaatacagaattgacggtattattggagatttttcctctgcgtagagccatccagatctctgtatcctgttttgactaagtcttaggtgggttgggaagacagataatgaagtaggcaaagagaaaaggacccaagatagaggtttatattcagaaatggtatatatcaatgacagcatatcaaacttcctatgggaaaaagtctggtgggtggtcagctgacagatttcccatttagtagtcatagaatacagaaatagtttagggacatgtattcattttgttattttgagcattgataggtcagtatatctacctaatctgtttggtaagtataggatatataaaccattaccattgatctgtcttatgccataatcttaaaaaaaaattgaatgctcttgaatttgtatattcaataaagttatccttttataaaaaaaaaaaaaaaaaaaaaaaaaaaaaaaaaaaaaaaaaaaaaaaaaaaaaaaaaaaaaaaaaaaaaa

SEQ ID NO: 1030 - DNA, 2489 bp, Homo sapiens
  SITE (143): n equals a,t,g, or c
  SITE (177): n equals a,t,g, or c
  SITE (179): n equals a,t,g, or c
  SITE (193): n equals a,t,g, or c
  SITE (2378): n equals a,t,g, or c
  SITE (2486): n equals a,t,g, or c
ctcgacctgggggctgcagccgaaacggtaccccggactgggtgatcctggtgggcactggcgcgctcgggctgctgctgctgtttctgctgggaaagggcccccgacgacctggccttgctgaagaatctccggagcgaggnaacagaagaagaagaaccggaaagaaactgtcgngngaagcccaaaccgnatgggcggactgttgaagtggctgagggtgaagctgttcgaacacctcaaagtgtaacagcaaagcagccaccagagattgacaagaaaaatgaaaagtcaaagaaaaataagaagaaatcaaatcagatgctaaagcagtgcaaaacagttcacgccatgatggaaaggaagttgatgaaggagcctgggaaactaaaattagtcacagagagaaacgacagcagcgtaaacgtgataaggtgctgactgattctggttcattggattcaactatccctgggatagaaaataccatcacagttaccaccgagcaacttacaaccgcatcatttcctgttggttccaagaagaataaaggtgattctcatctaaatgttcaagttagcaactttaaatctggaaaaggagattctacacttcaggtttcttcaggattgaatgaaaacctcactgtcaatggaggaggctggaatgaaaagtctgtaaaactctcctcacagatcagtgcaggtgaggagaagtggaactccgtttcacctgcttctgcaggaaagaggaaaactgagccatctgcctggagtcaagacactggagatgctaatacaaatggaaaagactggggaaggagttggagtgaccgttcaatattttctggcattgggtctactgctgagccagtttctcagtctaccacttctgattatcagtgggatgttagccgtaatcaaccctatatcgatgatgaatggtctgggttaaatggtctgtcttctgctgatcccaactctgattggaatgcaccagcagaagagtggggcaattgggtagacgaagaaagagcttcacttctaaagtcccaggaaccaattcctgatgatcaaaaggtctcagatgatgataaagaaaagggagagggagctcttccaactgggaaatccaaaaagaaaaaaaagaaaaagaagaagcaaggtgaagataactctactgcacaggacacagaagaattagaaaaagagattagagaagaccttccagtgaatacctctaaaacccgtccaaaacaggaaaaagctttttccttgaagaccataagcactagtgatccagccgaagtactcgtcaaaaatagccagcctatcaagactcttccacctgctacttctaccgagccatctgtaatcttatcaaaaagtgattctgacaagagctcttcccaagtgccgccaatactacaagagacagataaatccaagtcaaataccaagcaaaatagtgtgcctccttcacagaccaagtctgaaactagctgggaatctcccaaacaaataaaaaagaagaaaaaagccagacgagaaacgtgaaattttttttcctgaattggacatgtgtttgcaaacacttgtcttgaagattatgctgtttatgcaataatttgtgaacatgtacagagttttatataaatttaaaccaatttttaaaacaaaactgcggacaccaccataaaaatggaatcaaaagaaagttaatttatgaaattaagaggtcagcagaatatactcagtgatggaagacacttgggaaagtctttttaatagaacaagaacgatcttaatttaagaatattatcctggtttaacaacagtgccctgtttacaacagattgtgccctatctcatctgcagccgaggaataaaggattctgattagaaagagggttgcctacagattagtaagcaattccttggatcttatgcacagaacttgtaccatttgaatctgttttatgcttaaatcaaagtgctttgatcaaatgcataacctgccatatctttacatatttgttggtagcaatttgtattaaagaaatcacaagtgcaaataaaaagtcatttatcatttgtttaactaaactgtcatggtttagtttacaatttttaaaaagttcttaaaatactgaaaatgcagttgacacttgtgtatggcttatgaagttatttttgatagtcttacattacttgaattgttcaaagtacagtatattttaaattaagaaaagtgaactatatgtatttgttttatacatttaaggcttagactcataaataatgctattgtttatgatttgaaaactttcaggcaaaatccaatttacatttttcccttccctagcaattacttttttnccagctycaactcttcttagttactaatactttgttgactttaaaaatggaatycattcacaaacttttggggaaaaaggatgggggggaagggaaaaacccctaggnggt

SEQ ID NO: 1031 - DNA, 1060 bp, Homo sapiens
gcctgaccttgtgatccaccggccttggcctgccaaagtgctgggattacaggcgtgagcactgcgcccagccaaaagtgttaatcactgagatgtctactgagaactccagattcataaccactctcagaagcattaatcaaaccagaggaacttagaaccttatcagtgtaatcttgatattttgcatctctaccctgtggacaagtattttatttttytccctttgagtatataatgcattaatatttcaaaggactttgcaattaaacacagaagaagccatctttagactcaaccctaatactactttcagtagtgcagactaccttccatttggcatatgtttgtatactgtatacattttcatagttgaaatcatttatattctgattctttgcaccagacaaatactttctacaaattatcttcatatcattttagtaatttgacatttcgttgtgttactcatcttattccactcttgttggacaagtggactgttacagtgatgatagctttatggagtatttgcttttattgaattatatcaccaagataaatatccagaagtggaaatacttcgacagagagtatgaaatggctcttactacatattactgtattgtttttctgaagggctatatcattttaggattgagcaagttttaaaccaaattttatgtaataagtgtatcatagaattatatagatggaaaggatttctctggtgraccyccctgtttacaaatgaggraactggccaggcatggtccctctcacctgtaatcccagcactttgggaggctgaagcaggcagatgccctgagcccgggagttcaagaccaggctggacaacatggtgaaaccccatctaccaaatatgcaaaaattagctgggcatggcggcgctacctgggaggctgggaggaatgtttgagcccgggaggcggaggttgcagtgagcagtgatcataccattgcactccagcctgggtatcagagtgagaccctggttcaagaaaacaaaaaacaaaaaaaaaaaaaaaagggcggccgc

SEQ ID NO: 1032 - DNA, 3333 bp, Homo sapiens
atgaagatgggcaagaatatttggagattctggctaagcaggctggtgaagatggagatgatgaagattgggaagaagatgatgctgaagagactgctctggaaggctattccacaatcattgatgatgaagataaccctgttgatgagtatcagatattkaaagctatctttcaaactattcaaaatcgtaatcctgtgtggtatcaggcactgactcacggtcttaatgaagaacaaagaaaacagttacaggacatagcaactctggctgatcaaagaagagcagcccatgaatccaaaatgattgagaagcatggaggatacaaattcagtgctccagttgtgccaagttctttcaattttggaggcccagcaccagggatgaattgagttatctctttctttcctgctgtgtgcttgtagtgaagagcttgtgttcctcctagtagtggttccagaactggttcatgttatctattctaaactaataatcaatagatggacaaaagaaacaacaaccccaggagatgggacctgatcatgcaacctggcactggaaaagaaatcagcgggattttgggggtggggggggatgggaggtaccttagagggagtattttctttattttttgaagaaagtaagatcctgactctgaagcttcaaagtgacactgtggaaatctgaaacgaggggatgtcatgaaggcagcttttctttttctgaggaaaaaataggcatgggctacaggactatttaaaatgtctcatttacagtataaaactcaaaggtagatgtaatttttacacctatgagtatttgtccaatttctgtctcttcctcaccattgggtatctattctttatatgtaaataagataaggtcatctgatagccttattcagtcttcatcattttcatcattgttcctatgtagattattggacatttattgtagcactacataactgattataaaaatctgtaaatgaattagcactttcatattgaaacaagcctgctagcctatgtataaaatagcaaaatgtttgctgtttataaaaagatgtaatggggtggggggcaggggtaatttcaagttattaatttaaaaatgaactagcaattttgtacctggtgactttgtggtgcactcacctctgatagtgacttgaattcggtatgtaaaaaggggttagtggtatttcattgctgctaaaaatgacaactccctctgtgtcctgtttttcttaaagctgtcagtgtacaagtgggtatttgaataccagaccttactgtaaaaaataaaaaaggtggtatctagagcatgtaaattggatataaagttctgctcttaaagagttgatctaagagtatggctaaacatctatatatgcaatctattaaaagaacttaattcggctattatgtcttgatttgattgcagttttttcctaattataacaaatttttcctcattggcctgtttttaatcctgtgcctagaaggagtacaaaatgcacactttacaaaattgatatttaacacttacccactcccctttccccatctcttctaccgctcttgttgatcgtggtatctgatcttgactagataggctgaaggcacatggttccctccaaaaaccactattgataccactacaaaaacaagccagcaaaaagatactgtagagaggttggcttgcttccctctcttcctaactgcatgttgaaaaataagccgttattgatcttaaacatcggtcagatgagtcatacattgggttattttttatatacatgtatacacaaaatatttcaaattgaaagcaacatcttaatggattcaaaactattacaagctgttgtctaaaacaggtgagaaaaaaatttataactgtaaaaacaaatgcacatattgatatttaaaatgcgtaattaagaaaacccattgttgttgtgtttttcttgtataccaataattaagccactactgttggcactgtttggttttctrttttaacactgaaggagtgaaagtatttcctatatttatgaatttactactaaaatcttggcaaaaaaagaaaaaaattgtctaacgtgtgtgggtgaaaactgttaatcaagtgtttctactcccccccgaaaatcccctgaaagttggacaccaactgtataccctaggttgcttaaagggatttcactattatataaagtcaataaaaatgaagtagttgtatatatgcaacattgtgtacagaggggaaataatgaatagtattaaagaaacattctcgtcttcctttacctttaatcccctaatacctagtctactttttaaattttcagacttcactgctttttgaattcataattctaattttcacattattgttaatggaaaatcatatctaataaaggttttagttattcccatgcacagtatgaaaattctcatttgctgaggttttgtttcaagaaaatgtattggcatgtctttgagaacatgttttattgtctcctgtgtcatataatccaaactaatctccgtttacagactttaacttgaaattagaccttataattaaactatttaaatagtgktcaaatgatagtttctaatgcatcaaatatatacctcagttttcatgatttcctttaacattataatttggtatagatcaagaatcttaacatgtatcagtttctagatgaggctgcaggatttttggaaaactttttgaatgtatttacaatattctctgtaattagctacatagggacttgkctttttttctttttacatacagcttttcctacagttttattaccctgtaatttttttttagttgtagaagttaattctgattttgtgtggatttcagtatttgtctttgttaatggcacatattagcataaatcacttttgtaaatgtaagctttctttttttttcttgaaaaagcctttctatttatcagtattaaataaaggaagttaatctgtttctctgcaggtaataaaatagtgacacactgtattaagatagtgactgctatactcaactctggaagagactagagtatagagcatgagtggcaaaaccacagcccttgggccatatgctgctattcagtcccagatgtagcccctgaagcaagcataaagaaaaatgaattaaaaattaaattaatatggaaagttaaaaaatggattacattagtatgactaaaccatgtctttggcaaagatctaacacaatgtcttaagtataataggtagtctctgtttgtaaaataaatgacttaaatttaaaacatcaaaaaaaaaa

SEQ ID NO: 1033 - DNA, 2020 bp, Homo sapiens
gcggacgcgtgggttggagaagaacagtacttcacttaaagagaaagagcacaataaagaaccagattcaagtgtgagcaaagaagtagatgacaaggatgcaccaaggactgaggaaaacaaaatacagcacaatgggaattgtcagctgaatgaagaaaacctctctaccaaaacagaagcagtataggaccgacaagtgtacctctgcactcaatgctggaatcaaatccaaagcttttaattctctcaacaagatgtaaacaggaaagaaatctagttgagcatgaagataggatctaacagcttttccagttgttagatgactttgtggccatcttgttattgagtaagaaaataaagcatggacatcatgaaaataacagatgttacccaaactcatcttctaaaatctgtgcatttccatggtggctgacacacttgtcatgtggtctgttagtgtttgccaagaaccattgcaaataaattgaacatcaaagatccaagtttgtactatccctaaagactggagataagcattggaggctcttttaaaaaatgctagttactgaattttgtattgttttacttttttttttatttcaatatatacagtttgatgatgtgcttgaaattggtgcaaatatatacacacccttgtaagtgcaaagtatgtaagaagttttaacatttacttcacaggacttgtgattgtgttaaattctcactattgtgttttcttttgctcactgtttaggacaatttttctttaaaatagttttgcagattaaaattgcttaaataagtggattaaaaaactgacaatgcatgctactgttctctttcaaaaggaagagcaaccgtgttgaatactaataatgatgaattagtattcagtgtttagaatcattgggactacccacaaagtgagcatttctttttaaattttcttgacatttccaagcttattatgaataatattgcagtgtgtcttgtcagctgtaggtggcaaaggtgcccttataaaaaaggaaactggcttttcaaaatgggctatgggagcacaagctgaagctttagtgccttctacaatgtggtatactgttttctagaattttatatgtgctagtcattctcaattcatatggaatctagatggatatttcatgcatacccatagagaagtgtgtaagtgatatgtcagaagagcttcttactgatttcacctaaaatgagaaggaagtcctgttttcaagaatgacattagagtcatgcagctttgggaccatcagttttatactgtgataattgaaaatgaaacatgttcttattttccttaaattgaagaaaaccctttagttgtctacattggatggccttattacctctcaatcatcttttcataaatgatgtgcagaaattgtacttaaggacttaggagtatatgggaggttattggttttatgtttaaggatacgtttacttgagtttaagatacaggtcatccatcattcttaggctcactttttacagaaagtatgcaaatagtaaagtgacagcactgctaatgtttttccccagtactataacttgtggtttctgaactcattattgttgtatttccaaaaaagtaataccttttaattagtgtattaaaagttaagtataattattttaatgcaatctaatacaatcagattactcagttgccttacctcatgggaagagttacttttttagatctaaaaagctgaatagcatgttagttacttggtttcaacttgagttttcttttaatgttaataagattgaaactttagtatttagtggggaatggaaagagttgcccttgttgcaagtaatgaagcctgatttgattatgaagctgcttaatcactcttcatgtgttcagaattactgttttttttgtttgtttttcctttttgtcactgtgtacattaaaattttggaagatgctttactatgtaaaaaaaaaaaaaaaaaaaaaaaaagggcggcc

SEQ ID NO: 1034 - DNA, 747 bp, Homo sapiens
  SITE (9): n equals a,t,g, or c
  SITE (15): n equals a,t,g, or c
  SITE (20): n equals a,t,g, or c
  SITE (63): n equals a,t,g, or c
  SITE (87): n equals a,t,g, or c
  SITE (105): n equals a,t,g, or c
aaaatggtnggtaancaaanttccggcccccattgaccgcaaattgggccggtaaggcgtgtncggtggaaggtcctatataagcanaagctcgtttagtgaacngtcagttcgcctgaagacgccatccacgctgttttgacctccatagaagccccgggaccgatccagcctccggactctagctaggccgcgggacggatacaatttcacacaggaaacagctatgaccactaggcttttgcaaaaagctatttaggtgacactatagaaggtacgcctgcaggtaccggtccggaattcccgggtcgacccacgcgtccggactagttctagatcgcgagcggccgccctttttgaatgctttctaatggttttcctccttaagtgtcaagttaacaattttaaccctatccagcaatactcccttttccctctgaaatccagtggcacatgttctatttctctcttttgtatgcgtggtttatatttttgtcttggtgtggttatttgcacacatgccatacttctaaaacccagctgtttggtgcttttcttagagtccttctttttccctgtgctgatgtatgcaggattcgggaactcttcatgaatagcacacactttggtgagaaatttagacttacctgaagattctgtggaacaggtggagaggattttcttttctttttttcacttttaataactttcactttaggatgattttaaaagtgaaaaaaaaaaaaa

SEQ ID NO: 1035 - DNA, 735 bp, Homo sapiens
ccacgcgtccgctcacggcttcaatgatgcatttctcgaaggtcttggccacactgtcctctaagcctttggtgtcccagcaactattgcagtaggcagtgatctgggagaggggttcctcctgcaaaaatcaaaggggggtggtttcagagctttcggatgcagcgctccagtgctctatgggatgaaaattctttcatcatttttactttcctgctgttttactgtttcccccaattttaagcttctcctggcccacgcaaagcatgtcctccctgccccccaccagtagaccaaaggctaaaatttaaaagagtctcttttcccactctgcagaaaaagcacctggcttgcaaaaacaggtaagttatgagacataggtcatttttccttgtttctgacttttccctttaaagatccatttaacagttacatataggccgggcgcggtggctcacgcctgtaatcccagcactttgggaggccgaggcgggtggatcacgaggtcaggagatcgagaccatcctggctaacacggtgaaaccccgtctctacaaaaaatacaaaaatatagctgggcgcggtggcgggcgcctgtagtcccagctactcgggaggctgaggcaggagaatggcgtgaacccgggaggcggagtttgcagtgagccgagatcccgccactgcactccagcctgggcgatagagcgagaccccgtctcaaaaaaaaaaaaaaaa

SEQ ID NO: 1036 - DNA, 1723 bp, Homo sapiens
  SITE (1675): n equals a,t,g, or c
  SITE (1680): n equals a,t,g, or c
  SITE (1682): n equals a,t,g, or c
  SITE (1684): n equals a,t,g, or c
  SITE (1694): n equals a,t,g, or c
  SITE (1696): n equals a,t,g, or c
  SITE (1709): n equals a,t,g, or c
  SITE (1716): n equals a,t,g, or c
ggcacagctgagaaggagatggtaagttcaagaagactgattgcacctgggacccaggccctttctttgggatccagtcccagccttcatccatgtgattaagatccaggccgctgaagttccccaggaaatgatcttccacttgagcaaccttttacttgatacgatttgcacctttctgttttcctgcagtcagggtggtggcctgcagggacctgagctttgctacccaaccagattcctcatagagattcctaatcactagtttcttgtattcataaactcagagatacagagggcttggtttgaagttggggtgagatgaaacctttgctctgagccaaagctctggggccttgcattccctgcattgggttgatgactgtcagcatcactgccgcaggccatgcttgactaaggtacctggttttagccacagccacctccttgtatgttacctttcagctctggccaagagtgggacagggttttaaccacaaataggagcagcatgcaattcctagtgacttgctgcacagtattgtatcataattacaggaagtttttatttttaaaactggatctggggtatattcatttgccccatcacctctgtctaaaggcccaagtcctagggctgccatggtcacaagcacactgatgctccttaagattgtttatctggagcccacatagtgtggaacaaaaagtcacctagaaagcatccttggtcatcattgtctccttcccacctggcccagagatgcttaaatccaagttgtttctccagctgtcacctcccccaggagatcaggattccactgacgtcctgggcagccagtgaatttaattttccatgagaaacaacagagttaacctgtggcattaggagacctacttcatgtggaccctttttttccttcagtttaacttttctggagcagtgtgctgcgtagttcggcctgagtttgtgcagcttgttaagacaactcttgtgtacgctatgttgaagctcaacaaaaaagtcatgggaccacttctagaaatctttcagctgtcaggcctgtcagtctcatgacagtttgttggttgtgccaaacactttatttgggaaaggaaagcccagatttgaatgggtcttttcccctggccttatcctatagaggcatttgtaatatggagaaaataatttttcatttttgctcatttaattctataaattctctttataaatgaattttgtgttctttagttctccttaaaagaacttttgaattataaaaataaaatctttacctgtcgaattgttgctgcagatgattgttgtggaaaatctggatcattgacctctgtgctttcattcctagagatgttttatagttacatgagcaaaagctgttgccccaaagtgatggccctggaggcggggctgaggaacagggaaatgccgctgtgaagtcttaaagcacttctgcttaaactccatgtgtgaggagtgtgcctccctgtgccctctcagctctgaggctggccgtctttcggggtgttccttttggcaaatatacactgtaatcttgagtctaaatttatatgttgaaatgctaccttttttaaaataagaaactaaataaaattattttactatcaaaaaaaaaaaaaaaaaacccgacggggngaccncntncccaacacgncnaaaacgtacgccnacacagngggaacc

SEQ ID NO: 1037 - DNA, 1054 bp, Homo sapiens
ggaggaattcaactgtacttcactgaagggctgtcagctggcttattaggataaattctgggattttatgctgggcatagtgatttcgtgcttattttactgctggaccaaatgggaagcaaaggaagtgtgtcaaagaaggtggagggttagaaggtaccatctgagtaaaattagctgaatttccctgacttccatattcttccattatttctcttatcccctgccagtcactttagcctgaattagctgtgaggcaaactattttgctatttctatgtgtggatcttccagtgtgactttatgcagtcattgaaattgtcttaagcacaaatgaaacctcatggaaatgttaattactgctcctacaattaaccttcctcatatattcaacaagcaaggaattattgagaactaatacctctgagacactactccttagtaggttccaaccaggaaggaggcaagttgaatagagtctaagttttataatccagatcaacacagagaagggtactgctctggtattgagggtgggagtggtcagagaaggcctcctggaaaggttaggcctgctgaatcttcaagaacaagcagcagcccaagaggggaggtgagtgagatgagccaccttcctataggtctctcctccttccatgcccccactccccacccaaacttttcacactggggagaagtttctgacatgaacatctaacttgttttctctcttctgtgtttcagggaacagcggatgaaagagcacccctcattcgaacctaaacattgcctttgcttggtgaagaaactgtgtgagctgtcctgacctggacgatgacgtggggaaaccctccacctccttgcaggcttgttgcctgttgaaagaaggaaaaagacacggcgctggcaagtgataggaacattctggccagaggttaaagagcaggctgacatggctggccattaagctttataaaatcatgtgggctctgaaattgttcttttatgtgtctagcaagtatttaataaacccttgtatagtaaaaaaaaaaaa

SEQ ID NO: 1038 - DNA, 1401 bp, Homo sapiens
ggcacgagggctactatgctgtcttgtcatgcccccaccctttctctagcactttcttacattcttacaccaaaagacattacagcctcatcttgtattttccctgcttctgtccagaattagccattattccaaagatcccgagttcctttattggagaatgatattagacacaaagatgtgggtactaagtatactcgttgctgttggggtgttaattgcttctagggcttcccaagacagagctaggaaatgaaagcatacataataacccatgcatacacacagatcaatatctatgcctgtatctatctgtatacatactcatgtgtcctttctaatccacaccacggtattcatcctaaccttccctttttatttttaacttttttcctctgatagtgagaaaataggctctcattatctactctatatacatttatttgttcaacctcagtatctacatacttacatatgcctgtgaggaacagatttactaactagaatcctgtatttgtgtgcaatcctttttatctttattataaatatagcacctccaggctcctttttattagtgtcagcatgacatagcttttcccatctttttactgttaatattttaaactcaaaaaaagcaaggaggaaaacagtatgctactatctgtgtgaaaatggaaaataagtatggatatatttgctcatatgtatatatataatatctatgggagagggaaaaccaaaatatcagtttggaggtcaactgattaactggggaaaagagatgaggggaaaacttcgctgcatactctactatcgttgaaatttcttaaactttttcattgagtataattcacaaatcataaaactcacccttttaaagtctacacatcagtagtttttaacacatttatatacaaagttgtgtaactatcatcactaattccaggacattttcatcacccttaaaaaaaaagccatgtacccattagtagttaattcccatacccctcacccctcactcacccatctactgcccttcacaagaccctggcaaccactaatctgctttctgtctctatggatttgccaactcttgatgtttcatataaatggaatcacacaatatgtgaccttttatgtctggcttctttcacttaacatcatgtttttaaggttcatccatgttgtaccatggatcagtactttgttcctttttgtagctgagtaatattacattgtatgtatataccatattttgttgatgtactcattagttgactgtttttctaaatttttgaattatgaaaatatccattcaaaaattaaactttaaaaaatagaaacaaaatgaaaaagcccttctcataaaaaacagaaaaatgtaaaaaaaaaaaaaaaaaa

SEQ ID NO: 1039 - DNA, 1447 bp, Homo sapiens
tttttttttttttttttttaaaaatggtattcatttttatttcaacatgtcaactgtgcatttccaaaacagcaggcttttcaaaggaataaatcagaactgtaaacacaagatacagtacaagtttttgacttcctacagtcagtttcacaaatccacatactgtacattcataggtgaggttaagcctgtcacccatttctttatttctataattacacaagcataataaatacatctgattttaaaggtcacttaaaatgagtcataatttacagtacagtacgtttcagttcaagtgcaaaaaataactatttgctgaattctatttctttcagttattttatttttaagctgtgttttattgtgaagcgagacatccaagtgtagaatttcttatcccaaatgcagtattgggcagaactatggtgtcatggagaagccctcactttacaattgatcctgtctaatcagggtcagagggtaaggtgagttgctcatttcgactgttcttttctttcctctctctcctgtgctcatccacagctattataaattatataattcacctttattcagctaaaacagttttcccttttccacactccccccaggtttcctgttaacctctgctttgatttttagtggcaagctttacgtgcgatccacccagccattgttctggctgcagttgtaacgtttgcagttgcatacattacattgtccagtgtctgactgtgtcttcatgagaacgaatatactgagattttctttctttagtcattggaaagtatagttgctacttattgccatccttcccattcatggtttcctatttaccaccttttcctcaccaaaaacaaaacaaaactgacccaatatgtaatttctaaaaattgtatccttcccccaggcacttaaatcttatactgtgatttgtaactagtactgcttatttaaggaactcttaggaattcagtgatttttgtgtgtttcattccctcagctaattagagcctgaattactataagatagtaaatagcgagagaggctatttacagtatcaatatatttagtaaactcttgtctatcaaaacacaggatactgagttggttggttgatttgaaataatcgcttgtttctgttttttttctcaaagcccatttaaaacaaaaggcatttttaagctcggcttagcttgcagtagttaataatagcttctgttgctcaaagaattatttccattatatgccatacacatataaaaatatatttgctaaagatatgtaaagtttctgatgaaacttttaacttcattttttaactttaacttttaactttatttttaacaaaagcacatgtgctacttttatctggttactttttaaatatatcttgtaattttttaaacggttctctccaagaaaaaagaaagtatagatgaa

SEQ ID NO: 1040 - DNA, 1821 bp, Homo sapiens
ggcacgagtgaaaaagcaaaattgaatattttgtcacaatttcctgttttgtcatactgaggaacaaaaattcctctttatgtatagaaatacactaaagtgttagcttcttttagcagtgaagttcttgccagcttcccaacctgcattaggtttcatgtttcactctaaaataaaagaatatgttagaaatgcttttgagacttcttcgtgctatctgggcaaatgtgtttctttggcatttttattttactaactctatttcctctatatgatgctaatttagatagagtgacactgctagagtaagggtattatactcatgttgagctctggttatacaaataatagagctgatgtactcattcagcataattgtgtccggactatgtctccagcacagcctttcttatatctttaatgttctgtgcagtatagacgtactaatcagaggtgattgtctcaatcattactgctgggcctttatgcatcctgtatttttctttcagtgcctagatattgcattagtctctcaagcacatcacaaaactggtttaaatttcatttgtctcagtgttttcttggtctggagcctttgtagttcctatattcacatgatttatactgcacacctggggagctcttaagggtcttattagaatttgtggattttatttttgtaaaaaaaggaaaggattgtcttttgagtttgctttctcctgtgtagaattccattatgactaggggacttctgaatcttatgtacatatggtaattatatatcaatgtatgccagtctaggcagagctatcaaaatatcccctttgatactaggagaatcatataccaccttgcgaataaacatgagtmggtttcaactcatctctttgctttatcgctctttagaaaggatccttcttaactggcttttattatatttttctatataagagaaaacagtttaaagtaaaaagactatgacaactagaatggaattttttcatgtttctgggagagcaagaccttgcctaccattctgagataattttgtttaattcaatgccttatggttcagattatagtgaagtttgacttgagtgttggttttagcccagtactttaagaaagagaatatcccaacttttctgctaccattactaacctaagtaaaacaattgccttttaaagttactcctaagaatgttgtgccaaaactttgaggtttcttgtcaattatttggctggcatttattcttccctcctgaaaccgtgaagaatggcttcagcttgtatctagtctgttttaccagcttacaggagagtgccttctggcacaaatagtttctgcctcagtgcctccctactcctaaccaggtcatgacctgacccagaaggacccataggatatctagtgcatgaacttcctgaggaaatcaagttggcacaccaggatgcacaaatctgaactgaggcatcatgccttgggctcacaagtgaactgcatgggtcagaggctttgggactaaattatctcattacatgtactggggccttactaagttacagagtcagcaaaccacttttcaatcaccagcactattttatttggcctgaagttgtcttctgcccttttgttttctaaatcaggggttggcaaactttttttttttaacagtccagataggaaagattttaggactgcaggtcatatggtttccctactcaactctcattgtaggcagtcatgggcaaaactagacaaatgagtatggctgtattccaaaaaaaccgtatttacaaaaaaaaaaaaaaaaaaaaaaa

SEQ ID NO: 1041 - DNA, 3168 bp, Homo sapiens
ggcacgagtttgtatttatattgaatgcatcccttccttaccatatgttagcaacctgtgcagaagccctacccagacctaactgggaactggctctgtatatcatcatctcaggaataatgagtgcactgtttcttttggtcattggaacagcctatttggaagctcaaggaatatgggagccatttcgaaggcggctatcctttgaggcctcgaacccgcccttcgatgtgggaaggccatttgatctcaggagaatcgttggtatttcatctgaaggaaacttgaacacactcagctgtgaccccggtcacagtagggggttctgtggagcaggcggttcatcatcccgacccagtgccgggagtcataagcagtgtggcccatcggtccacccacacagcagtcacagcaatagaaactcagctgacgtggaaaacgtcagagccaaaaacagttcaagtacctctagtaggacttctgctcaagcagcttcttcacagtctgctaacaaaacaagcccccttgtcttagattcgaacacagtgactcaaggtcatacagcgggcagaaagtccaaaggggcaaagcagagccagcacggcagccagcaccatgcccacagcccgctggagcagcaccctcagcctcctctgccaccgccagtgcctcagccccaggagccgcagcctgaaaggctgtctcccgcccccctcgcacacccttcccacccagaacgtgccagcagcgcgaggcacagttccgaggactcggacatcaccagtctcatagaagccatggacaaagacttcgaccaccatgactccccagccctagaagtgtttacagagcagcctccatcgccattgccaaaaagcaaagggaaaggaaaacctcttcagcgcaaggtgaaaccacctaagaagcaagaggaaaaggagaagaagggaaagggaaagccacaggaagatgagctgaaggactctttggctgatgatgatagctcctccaccaccacagagacctccaaccctgacacagaaccgctcctcaaggaggatacagaaaagcaaaagggaaaacaagccatgcctgaaaaacatgaaagtgaaatgtctcaagtgaagcaaaaaagcaaaaaactcttaaatattaagaaagaaatcccaacagatgtgaaacccagttcattagaactaccatatactccccctttggaaagtaagcaacgtagaaatctcccaagcaagattcctcttccaactgcaatgacaagtggatccaaatcacgaaatgcccagaaaacaaaaggtacaagtaagttagtggataacagaccacctgccctagcaaaattcctcccgaatagtcaagaattaggcaacaccagtagctcagagggtgaaaaagactctcctccaccggagtgggattccgttccagttcacaaacctggcagctctactgatagtctttataaactttctctgcaaaccctcaacgcagacattttcttaaaacaacgccagacctcaccgacacctgcttccccgtctcccccagctgccccctgcccctttgtggcccggggcagctacagcagcatcgtcaacagcagctccagcagtgaccctaaaataaaacagccaaatggaagcaaacacaagttgacaaaggcagcctcgctcccgggcaagaacggcaaccccacttttgctgcagtcacggctggctacgacaagagcccaggtgggaatggctttgctaaagtttcttcaaacaaaacaggtttctccagcagccttggcatttcacacgctcctgttgacagcgatggctcagacagctcgggtttgtggagtcccgtcagcaacccaagcagccctgacttcactcccctcaattcgttctccgcctttggaaactcttttaatctaactggtgaagttttcagcaaactcggattatctcgatcgtgcaatcaggcctcacagaggagctggaacgagtttaatagtggcccttcatacctttgggagtcgccagcgacagatcccagtccttcctggccagccagttccggctccccgacccacacagccacatcggtcctcggtaacaccagcggcctgtggtccaccactccattcagcagctccatttggtccagcaaccttagcagcgcccttcccttcaccactccagcaaacacgctggcaagcatcggcctcatgggcacagaaaactcccctgctcctcacgctccctccacctccagtccagctgacgacttgggacagacctacaacccgtggcggatatggagccccacgattggaagaagaagctcggacccttggtctaattcgcactttcctcacgagaattaaattaagcaaaaaacaaacaaacatagtgggccctcgtctagatcatgatgtgccagtttctgagacatctttttaaggctcttactgcagctcccctccccaccctcctcttctttgcaaaacagacccaagcagggcaggctcagaccactcgcttctttcagatctttcttgcaattatgataacatgagatttgctgttgtgcttttagagaaaagtctggactcagccacaaactctaataagacctgtacatctgagaacctttcccgttactgcgttttcaccacctgtcttccccatgctttatttatctgtatgaacacagatttgacattacagctaaggaaataatttgagttgattcagaaatcctggcatgtgacaattttgttaaattaccaagtttggtttttaataatttctcaatattatgcgccaagatctaattttaaaactgtatgaggactttgtgctgaaaatagagtatttttttaaagtaaggctgtcttggtttaaaagcagattacagaaatgtaagtcaacttaagaacagtgaatgaatgtaaaaacattcagtcgagaccatatgcattttctgtgctgtttgtacttgaggtatgtaacatttgtatacctgaacttattttaaagatgaactgaaatgcacatagccaagtcttgagatacaagattgaatgtgtatttcttaaaaatacaactttgtgttgtactttgaaataaatgatgcttttttcaaaaaaaaaaaaaaaaaaa

SEQ ID NO: 1042 - DNA, 1302 bp, Homo sapiens
ggcacgaggtctgtttgatttttaaaaggaaaggatttgtttcagattatacaagaataaaagtattatagacccaagggacttcttatgaggtcaaattcagatatttatatgaatatgaaataccatggtccctagtagtcagttgaagtggcaatgtctaaacagaaatgaacaaaactaatgctagcaggttaaaatcaatcaaaatgtttaaaaattgattctgtcctcagcatgttacttcctcagctctgataatttactggtcttgagtattttgagaatttgatgttgaacgttataaagtcaaagaactgcttgtttagatgaggtttatttttatttttgatattattcattcttgtcacacatcaagaagaaaacactagagtgctgctggaattccaaatctgaagaattctaacgactgcattctttgttattaaaaagggcacaatccttcctttttatttggcagtttaatttcagtaggaagcatgtcacatgtgcactgttggttagaattatgcatctgtcatgcctgactgctgaaccctacctaagccttttggcgcagtttaaaacttatactggtggactgtgaacctcaaaacaaatgggtatttttgggttttgaggatagatgttactccttaaagtttgtatttggggcatgaaaaactactgaaagaagaaaagtgctacagatactacatttcaaagagttggcattttccctttggccactcaagcagcatttgatgtatctaaagaaacaaagtcattgtttattttaaaaaattatatgcagttgtacaagatactacattccattgaaatgttggctatgtcctaaccaggcaaccagataacaaaaacattttgagtcttttatctaggtagttctaattattcagctacttagtttaacaaaggaaaatatcctgacttctctcatttcatttgtagacttttcattgtataggcacaaccaaagagtcagactggtttaaaactccagaaggaaaaaaagtatcccacacagtggatgttgtttctaagaatgctacaaaatcctgacatctcagacatctcaatgttaaaggaagaaaaaaaataccttttcatttcaaagaactaatatactttgatattgtgtaaaccttactcaagtttattgtcaagctttaactgcctttttagaactttttaaaatttcgagcccacaaatctattgtattagttgccttctataacaataaatcttcactgagcaaaaaaaaaaaaaaaaaaaaaaaa

SEQ ID NO: 1043 - DNA, 1158 bp, Homo sapiens
ggcagagatgggtcagatacatgcagctgtttctgttatatataactctggagccgagaaaaattagttgatttacatggagatcaaatccctgtccttggactcagtaatatgttatggttaagttaacaacttggcaaagaacttctttctttgtctcatagttacagtacctctgtaagaagagctctgctggtcgaaacaaaaataatttccattgagaaaatttaagcataaaagctatgaatcaccgttaatgatatcagaataaaatactggattttcacagttaatttgcttgttttgttttatcagtatgatcgccctggagcatcccctaagaggaatcatgatggagaatgcacagctgcccccagtgagtcaggagtctcacactggttctttgctagacagtagtaatattgttattgttagttgtattatgatagaaatatgtagttaaataagctacatataatagtaatatataaatgttatagtagtaacagttgcccttgtaaaacacaagttttaactgcaggcacctattatacacagatttttgttttcaataagtatattggattctttttctggagattgtcacaatttgaaaaaactcccagttgaaccacatagcctagaaatattgaaaaagttaaggaagccgggtgtggtggctcacacctgtaatcccagcaccttgggagccgaggcaggtggatcacctgaggtcaggtgttcaagaccagcctggtcagtgtggcgaaaccccatctctactaaaaatacaaaaattagctgggcagtagtggccctcacctgtaatcccagctactcaggaggctgaggcaggagaattgcttgaatccaggaagcagaggttgccgtgagcacacatcgtgccactgcactccagcctgggcaacagagtaagactccgcctcaaaaaaaataatgtttagtgggacccatacgaagtgtcactagtgacgctggaagtgctcccaaagagcagaaaaaagtcataacatgacaagaaagagttgaactgcttgatgtctactgtagattgaggccggcagctgaggttgcctgccatttcaagaaaaatgaatccagtgtaaggaacattgtaaaaaaaaaaaaaaaaaaaaa

SEQ ID NO: 1044 - DNA, 2046 bp, Homo sapiens
tgatttggaaaccagaggaaaggcgctgttttcaccgaattagaatcgcgggaaaatagagaagagtttgtttgaaggtctcgcgagatcgagtgagtacggctcgccaagttggagcgctctcggattagacacagcaactattcagctgcgaggggacgggagaggtggtgagcactctcgcgagatttgaaggagcggcggaggccagagggaggagaggtttgtaaactaggaggctccgggtttccgggcacttttattaggtcgtcttctgggccaccagtgccccttccatctccacaggcagtccctccatcgctaacctttttttaaccggccttttaggaccggaagtccttcatctcaagcatccaatgctgaaagcggcctgattttctctaccggaagcccttttccagaggctgggaacacggcccacctagcaggaagtcccacctccttgagctccgccacccttcccgaagtttttctgtcacctgtgttaggctccgtcccctttccgcgttttatccccgtaccagaaaaggatacatttagtgcctcccacccagctccactaaacgggttggatatctcattctttgagttggtgttccttccccggcgcccccatgtagctgggaagtgggacctgggggtggttggacccctgggatcctaaaggaggggcagggagggcgcagaactccgcttctgctccttgctaccaggacgcgcggcctcctcagcctctttcctcccgctgccatgcaccctgcagccttcccgcttcctgtggttgtggccgctgtgctgtggggagcggccccgacccgggggctcattcgagcgacctcggaccacaatgccagcatggactttgcagaccttccagctctgtttggggctaccttgagccaggagggcctccaggggttccttgtggaggctcacccagacaatgcctgcagccccattgccccaccacccccagccccggtcaatgggtcagtctttattgcgctgcttcgaagattcgactgcaactttgacctcaaagtcctaaatgcccagaagctggatatggtgccgctgtagtacacaatgtgaattccaatgaacttctgaacatggtgtggaatagtgaggaaatccagcagcagatctggatcccgtctgtatttattggggagagaagctccgagtacctgcgtgccctctttgtctacgagaagggggctcgggtgcttctggttccagacaataccttccccttgggctattacctcatccctttcacagggattgtgggactgctggttttggccatgggagcagtaatgatagctcgttgtatccagcaccggaaacggctccagcggaatcgacttaccaaagagcaactgaaacagattcctacacatgactatcagaagggagaccagtatgatgtctgtgccatttgcctggatgaatatgaggatggggacaagctgcgggtactcccctgtgctcatgcctaccacagccgctgcgtggacccctggctcactcagacccggaagacctgccccatttgcaagcagcctgttcatcggggtcctggggacgaagaccaagaggaagaaactcaagggcaagaggagggtgatgaaggggagccaagggaccaccctgcctcagaaaggaccccacttttgggttctagccccactcttcccacctcctttggttccttagccccagctccccttgtttttcctgggccttcaacagatcccccactgtcccctccctcttcccctgttatcctggtctaataaccccccacacatacacctctggtgacctatttgcacagaccgtcgtcttccctccagtcttctgagggataggggacattccatcccaagcttctcccttacccacacctatccttttgaggggctttggggtggagctggggcaagcagagggactgggtcttcacttcttgggctaataaaattgtttctttgtggactaaaaaaaaaaaaaaaaaaa

SEQ ID NO: 1045 - DNA, 1590 bp, Homo sapiens
  SITE (1): n equals a,t,g, or c
  SITE (981): n equals a,t,g, or c
  SITE (1083): n equals a,t,g, or c
  SITE (1124): n equals a,t,g, or c
natttcctctcctctccagctccgacattgtgctgtaaacacaggcctctgccttgaacacatgtttgccagatgctccctcttactcatttcttttctcttgtttactgccaggttttctcaagtgcgtggtcaccagccatggcctccatttccttagtctctaccctgtatcctctgcccgctgggtcctactgctcaacctctccctggctgctaaatccaatagtcttttctctgtccttacctgcagggcctcatgggactatttggcaatactgaccacaggattgtctcataactcgtttttgctttggcttccatgacactctggcaagcttagttcttcctccttttctggcttccataccagctgttaaatgtgagtgttttggtacttggccttctcttctctctgtatgttcccctgggctctgctataaacttcagtgcatctggttctcagttttttatacttgttatttgtcttttgacgaaaagcagatctttggagtttgactcaagcctgctaggtccacctgagcagcagaacagctctggctgggtaacccttgaattttcatgtgtttcttgatgtgtttcaaagaagagctgggatgttgatccttcttatcgctgcacccatttatctcagggcatgttgagtgactcagctctcttgcagtgtaaacccaagaggagctcatgggtcattcctgggattcagctgcttctacagtccgtgtcactcattagaggcaagctatgttttgcctagacttttgcttgtactttggcttgggaaaccctctgtggcatcctgtgggggtaggtctaatcttttcgactgtgtggaaggtcaattcaaaagtgagacgtaacttcttagatcacgtaccatattttcctcttgtgtgtacagctgctctggggctcagctacagttacctcatgttgaattgcctgcttttgagttgctgnattctggtgtaggtgtaatctggttatttgaactttactgatattacsaagagctttggggatttttttttaaagaattgagatgggttattctgaaccatncatatttaatscccgattcttgktagaattattaacagtanttcttggaagagagttttctttggaggataaarctttttttttttttttgaggcagagtcttgctctgttgcccaggctggagtgcaatggcgtgatcttggctcactgcaacctccatgtcccgggatcaggcgattcttgtgcctgtagtcccagctactcgggaggctgaggcaggagaatagcatgaacccgggaggtggagcttgcattgagccgagatcatgccactgcactccagcctgggtgacggagcaagactccgtccccaaaaagaaaaaaaaaaaagctatgtaaaacaatgacagccacgacgacagcagcaccagcagcattcagtcgattgtgtatttcatttgggcaattcaattggcaggtgtagttttgcgttttgtagtctctgttttctgacttaaaactttgtttaagtgaaacccagacaaaaaaaaaaaaaaaaaactcgag

SEQ ID NO: 1046 - DNA, 1711 bp, Homo sapiens
ggcacgagccaagatgttcctcttgtcaacttggccaaccttttgattcattacggccttcatcttgatgccactaagctgctacttcaagctttggccatcaatagctctgagcctctgacctttttgagcctgggaaatgcttaccttgctctgaagaatatcagtggggcacttgaggcctttagacaggccttgaaattaaccaccaaatgtccagagtgtgaaaacagcctgaagttgatccgctgtatgcagttttatccttttctgtacaacatcacttcttctgtttgcagtggtaattgtcatgagaaaaccctgggacaacagccatgacaaacagaaatattttggacaactcacagtcactggatgctgctgaagaagagccctctgagagaggaacagaggaggaccctgtattctctgttgagaattcagggagggactcagatgcccttagacttgaaagtacggtggttgaggagagcaatggttctgatgagatggagaattcagatgaaaccaaaatgtcagaagaaatactggctttggtggatgaatttcaacaggcatggcctttggaaggctttgggggtgcactagagatgaaagggcggcgtctagacttacaaggaatacgggtgctgaagaaaggtccccaggatggagtggccagaagctcttgctatggagactgcagaagtgaagatgatgaagcaacagaatggattacattccaggtcaaacgtgtaaagaaacccaaaggagatcataagaaaactcctgggaaaaaagtagaaacaggtcagatagaaaatggacatcgttaccaagcaaacctagagatcactggccccaaggtggcatctcctgggccacaaggaaaaaaacgtgactaccagcgtctgggatgccccagcccggacgaatgcctcaaactccgctgggtagagctgactgccatcgtgagtacctggcttgcagtttcttcaaaaaacattgacatcacagaacacatagattttgccacccctatacagcagccagcaatggagcctctttgcaatggcaatctccccacgagtatgcataccctggaccacttgcatggggtttccaaccgagccagcctgctctacacaggggagagtcagttaacagaggtattacaaaatctcggcaaagaccaatatccacaacagtcgcttgaacagattggcacccgattgccaaagttttggaaaagaaccagacgtcctgggtcctctccagcatggcagccctctactggagggtgaaaggccaaggaaagaaggcaatcgactgcctccgccaggctctgcactatgcgccacaccagatgaaggatgtgcccctgattagcctggccaacatcttgcacaatgccaagctctggaatgacgccgtcatagtagccaccatggcagtagagatcgcaccacactttgctgtgaaccacttcactctgggcaatgtctacgtggcaatggaagaatttgaaaaagcactggtgtggtatgaatccacattgaagcttcagcccgagtttgtcccagccaagaaccgaatccagaccatccagtgtcacttaatgctgaagaagggacggcgctctccttagtgcacttcttccttctctctttctcttgactcatgctctaaaaaaaaaaaaaaaaaaaaaaaa

SEQ ID NO: 1047 - DNA, 2764 bp, Homo sapiens
ggcacaggacaaacagatatgaggaagtattgtcttggattttgctattcagtatttatccttggtcgtgttttgaattttatgcatcttcaccttcttgcatgtggctgtgctaagtgttgatcttaaagaggatagattttcagcaggattgctaactggtcctggctatgcctgttgcgtgctggccctggcacatcagttaatttccttgaagctgtcttccaccacctaggaaggggcaatggagatgggcctgtcttaattaccttgaagttggaatgggaggctcagacaatggattttgtaaacaacagtgttgtgcagttgttatatctgaagatggtcatgaattctgctgacagaaatgagactttacccagaagcaacgtgtgaaggcatgggaaggtggtggcccatgtaaactgtacattgcttgttttttggtgcaagcctcctctgcctttatcttacttccttttattgtttccaaatgtgtccccttttttggagaaattaggtcatattgaaagacagcttgaagcactattgtgttgcaatctctcagcctgacaacagaccttaattctcattttcaaaataactatccaagttttcagctagcagatcccctcccccacccttctcatcccatttccccttgcacttttgtttccccaagtgacaggggctgggcttgctgatgggggtgtctgagtcagaaccagctcaaaagagggggccactcccagggagggagtccaggaatagggtggggcagtgaacactcaccccaggcacataatttaagacagcaccaaaagctcagcagtgggataaattatattttaacataacacttaaaatatcaaaattatcagcaccacaggaaaggtaacaaatacaatatcggaatgaatacaggcagtccctggtgaagaaaataacacgaccataaaggaagacaggcttgggccgactgattttccctgttgccctgggccctgatacatacggcttgtcaccacacagctactcatcctgccattagttaaaagtttcatattttggtcatcatagattttgtgccttgatttggacttttaaaaatattgcattcgaatattatttcccctggtttctgaattttgggggcaccccattaaattttgcacccagaggaagttcctcattctcttctgccactgggtggcccttggctgaacattggagtccttgtgctcagtgacaggcagggtagagacgcggtggaggggaagaacactggacccaaagtcaggatcacggagcctgatcctgtgtctggggaaccctgggggagctgcttttttgtcatatttttgttttatttgtttgtttgagatggggtctcgctgtgtctcccaggctggagtgcaggggcctgatcacagttcactgaagactcaacctcccagctcaagtgatcctcccacctcagcctcccaagtagctgggactacaggcatgtgccaccatgcccactggcttttttactttttttgtagagatggggtcccactgtgatgtccaggctgtgcttttctgctcatctgtccagtgaagggctggccatgtcctgagtccacgttgatgcagcacccgtcctctgagagcactggagcctgccatggccagctctctcttgggtcctcagagggacatgctcccaaccccatctttcttttctcttgccgtctgatctgagctcctctccccaaaatcatgaaagggagacaccggagtctcaaagtggccgatccagttgagttttgacatgtgtgcattgccaattcaaagtgcaggcaaacttggtggggatgaaaaggatttgatattggggtcagtacagtgaatgctggagtcggcctgagtgtttgtcccggctcagagagcttgggcaattaacctctgcctgtttcctcatctatgaaatgaggatactccctgccccccataggattgtgataacatggacatgaggttggataacctggacatgcaactgaatccttacgagaccgcactctgcaatctccaccctgcactggtagaacaccatcctaggaaagtctgcttccaggccccagagtaagtcctggaaagtgagcaccactgggccaaggaaaatcccccgcttcagacaggctcgtccctacctccatcctagcaagttatgtcaagccaagtgcctaggactaacacactgatacgtgctgtaaaagtgcagagggaggtgtcaaccgcaaagcttccagcacaacaaacaaaccagaaccattccctggagctccatagagcagctggggcctcttgcagaactgcccacacctagcttcttgtacactctcctgctgcctgcccgacactaccgagcggagagagaaaggaacgtggctcatgagttcattgaaatgaaatctctaggccgggtgtggtggctcatgcctgtactctcagcactttgagaggccaaggtgggcagatcatttgagcccagtagttccagaccagcctgtccaacatggtgaaaccccatctctaccaaaaaactacaaaaattagctgggcgtggtggtgtgcacctgtaatcccagttcaggaggtgaggtgggagaatcgcttgacccgggaggcggaggttgcagtgagtcgaatcgcgccactgcccccagcctaggtaacaggtgagaccctgtctcaaaaataaaaatgttaaaaaaaa

SEQ ID NO: 1048 - DNA, 1019 bp, Homo sapiens
  SITE (833): n equals a,t,g, or c
gtagaaataaatgaccacccccctggtaaattacaggcatgagccaccatgcccggcccaaagatgattttttaaatgctcaacaggacaaagcctaatggtagtcttttgttaaaaacaaaatttaatatcaatccattgacaggactctttgtgtactgagctatatagtaatttcaccttaatagaagttcttcataaccaccccatataaaaccatccattcttatctcttttttttttctccatactgcttatcacagctgacactttatactgactttgtttccccctctataccctttactccagattataaattctgaggacagggtctttctttcactgctttatattcccactgcctagaatagtgcctaacatatattaggtactcattatatatttattgatgtcaaatattgattgctgtattatagtagtgttaatggaaggtgtcatttcttagattttcttttctgaccagcacagttcttgggttgatggagtatgtcctcaataaatctcagcatcaaataaacaagaattttctttttaatacataaatttgtcattttgttacgctttttagtttcctcagtgattttttagaataattcttgttcatgaatttgggatcagtgaatatctacagttggaatcttaggaaggaatgttaatgggcaatccagaatgttggataattaaatcagttatttgccatttgatgtgtaatatagtggaccacatttagacaaaaaacaagctaccccataagaccagtttttattttctttgattcatgtcttcaggattttctgttaactcagaantattatagcattcattattgttttgtgaaaatactagttaataatctccggttaatgaaataattatcttagataaatttactgaacttaatgtagaatatgttttttgtttcgttttgtttttgagcctgggcgacaagagtaaaactccatctcaaaaaaaaaaaaaaaaaaaaaaaaaaaaaa

SEQ ID NO: 1049 - DNA, 1279 bp, Homo sapiens
  SITE (1188): n equals a,t,g, or c
  SITE (1224): n equals a,t,g, or c
  SITE (1278): n equals a,t,g, or c
gaattcggcacgagtcatgaagggcttcttcctcattgtcttcatgttgagtagggctgaggaggaggaagatgaggggttagtcttgctgtcttgcgggtgacagatgtggaagtaaatcctcatgtaggtgggaatgagcagttcaaacctatgttgttcaagggccaactatagttgattaactcatatctctacagttaattttcaaacagatgtgatagctgaatgagaacttttaagatagtactggacagtaaccttattggaactggaatggcctttagactttttgtgtccagtttcttctcacctcctctttctcttcaaatgtgcaactgaaactgagagacctcagtcccatgtccaaggtcaggcagatacttagcggcagagtgaggactccagcccatttctgcagctctgctgtgcagtggaagatttgggacaagtacattatttaaaaatgcccacccactaaatattacattcctaacttttcccaatacacaaatatgcttgaacttttaaaagcttgtttttggtcgtgcttggtttggaatgtgaatgactaaaactacctttagcaatttcccaaagtgtaagttcaaatgtacagagaatttttttcctgaatgcccaacacaatatgcagttttacaacacataccagattcttagattcatttggtgaaggaagcctctgaattaaaacttttaaatatttctgatttgcaaccagacgaaaaagaagaaaattgacaacttttttgatgcaactttgtgaaatcatggtgttcctggtttttctggtctggtttttgttgttgttttgttttgttttgccacagtttagttcctcacctgatctttccttgtatccacttcagartctctgaaatgttatctgtttgttggttcctgggaaattgagagcctttycaaagactccatctagaagcatatttaaaagtgtgaaagaagacatttatgcgaccaacaaacatatgaaaaaaagcttatcatcatgggtcattagagaaatgcacagcagaaccacaatkagataccatctcatrccagttagaatggtgatcactaaaaagtcaggaaaggccaggggcggtgactcatgcctgtaatcccagcactttgggaggctgaggcgggtgggatcacctggaggtncaggagtacaagaccagcctggccaacatagtgaancccatctctacttaaaaatacaaaaattagctgggtgtggtggcgggcactgtna

SEQ ID NO: 1050 - DNA, 724 bp, Homo sapiens
aaaacacagaactcggatgaaacgtcacacggtctgggctaaagatcttgctctttaatttcccagcaggtaaccttgtggcagtcactaaccctctctacacctcaatgttctcatctgtaaaatggaaatgatgacccctgggtctcccaggaccgtgaggggtcctgaaagggcaggtgtgcgcggtgctttgtagatgataaggcatctcagaaacaccggggctttactgttattttctctccagcttgtttgggcagacaaaagagaaatcgagcccagtcattcttagcacagccaagaagggcagatttcaaaaggagccttgcttcaaactgaggaaaaccaaaaaggaaaaaacaacaaacacagctgcccctaccctccagtccacaaaacagtctgtgtctgacaagctgggctctgccagcggctcacccccagactcctgcaccagctggccttcctgacctgtgtgccctgggagccaggccgactcttcacacttccagtcaccgacacagtgcaatgcaacccattcttgctcaaggcctccttagaaattattcctcccattgctcgaacctgggagttggagattgcagtgagccacgatggtgccactccactctagcctgggtgacacagtgagaccctgcctcaaaaaaaagaaaagaaaagggaggggagggaagggaaaattaaaaaaaaaaaaaaaaaa

SEQ ID NO: 1051 - DNA, 859 bp, Homo sapiens
ctgggaggcggacgttgcagtcagctgaggtggaatgactgcactctagcctgggcgacagagtgagactctgtctcaaaaaacaaaaacaaaaacaaaatttaaaaataaattgaagtagggtacaggattttaaagtcccattatcaacacattcaactcagaatagttaatgtaacctgaatttaattacctttgattttaatttaggaatgaattttttaaaatgcatataaccagctcagggtctgtgcttcatcatctccctggctttttttttgtgctaatttttcctcttactacttttatgagtaccagaaaattatccaaagctaagagaagaaataaaacactgtttttgctccttattaataatttgcttctaagtttttgttagagagtaggtaaaaacgtttggcaaagtagattgctcatagagtttagctatccatgctttgtttttacctttagtttagttttatggcaggggaataggacttgttgaagggagtgggaaagaagggatgcaggtcttcataataaggaatgtcggccaggcgcagtatctcacacctgtaatcccagcactttgggaggccaaggcaggcagatcactaggtcaggagttcgagaccagcctggccagcatggtgaaactccatctctactaaaaatacaaaaaattagctgggcatggtggtgcgcacctgtaatcccagccacttaggaggctgaggcgggagaattgcttgaacccaggaggcagaggttgcagcgcgctgagattgtggcactgcactccatccagcctgggtgacagagcgagactctgtctcaaaagaaaaaaaaaaaaaaaaaa

SEQ ID NO: 1052 - DNA, 1932 bp, Homo sapiens
gttattttgttaatagtttcttttgctatgcagaagctcttaataagtttaatgagatcctgatatgtttaggctttgtatccccacccaaatctcatcttgaattataatctccataatcaccacatggagagaccaggtggaggtaattgaatctgggggtggtttcacccatgctgttcttgtgatagtgaatgagttctcacgagatctaatggttttatgaggggctcttcccagctttgcctggtacttctccttcctgccgccttgtgaaaaaggtgcattgcatccctttcaccttctcctataattgtaagtttcctgaggccttcccagccatgctgaacttcaagtcaattaaacctttttctttataaattactcagtctctggtggttctttatagcagtgtgaaaatggactaatgaagttcccatttatgaatttttgcttttgttgcaattgcttttgacatcttagtcatgaaatcctkgcckgttctaagtccaggatggtawtgccwaggttgtcttccagggtttttctaattttgtgttttgcatttaagtgtttaatccatcttgagttgatttttgtatattgtgtatggaaggggtccagtttcaatcttttgcatatggctagttagttatcccagtaccatttattgaaaagacagtcttttccccattgctcgtttttgtcagttttattgatgatcagataatcatagctgtgtggctttatttctgggttctctattctgttctattggtttatgtccctgtttttgtgccagcaccatgctgttttggttaacatagccctgtagtatagtttgaggtcagatagcctgatgcttccagctttgttctttttcttaagattgccttggctatttggcctcttttttggttccacatgaactttaaaacagttgtttctagttttgtgaagaatgtcattggtagtttgatagaaatagcatttaatctgtaaattgctttgtgcagtatggccttttaatgatattgcttcttcctatccatgagcatgatatgttttccattttgtttgtatcctctctgatttctttgtgcagtgttttgtaattctcattgtagagatttttcacctccctggttagttgtattttaccctagatattttattctttttgtgaaaattgtgaatgggattgccttcctgatttgactgccagcttggttactgttggtttatagaaatgctagtgatttttgtacattgattttctttctaaaactttgctgaagttttttttattagcagaaggagctttgcggctgagactatggggttttctagatatagaatcatgtcagcttcaaatagggataattttacttcctctcttcctatttggatgccctttatttctttctcttgcctgattactctggctgggatttcctatgttgaataggagtcatgagggagggcatcaaatctacacatatcaaatactaaccttgaatgtaagtgggctaaatgccccacttaaaaggtaaaggggggcaagctgaataaaaaagcaagactcaatggtatgctgtctttgagacctatctcacatgtgatgacacccatcggctcaaaataaaggaatggaggaaaatctaccaagcatgtagaaaacagaaaaaagcaggggttgcatcctaatttcagaccaaacagacgtcaaacaaacaaagttcaaaaaagacaaagaaggggccgggagtggtggctcacacctgtaatcccagcactttgggaggccaaggtgggcggattacaaggtcaggagatcgagaccatcctggccaacattgtgaaaccccatctctactaaaatccaaaaaaaaaaaaaaaaaactcgagggggggcccgtacccaatcgtcct

SEQ ID NO: 1053 - DNA, 1302 bp, Homo sapiens
  SITE (158): n equals a,t,g, or c
  SITE (749): n equals a,t,g, or c
agctggcatcaggggccggcctggaggtcagcgtgcagggcccgttcctgagtgtgtccgtcctgctgcctgagaagttcctcacccacacccacggcctcctcgggacactcaacaacgaccccaccgacgacttcaccctgcacagcgggcgcgtncctgcccccaggcaccagtccccaggagctgttcctgtttggggccaactggaccgtgcacaatgcgtcctccctgctcacctacgattcctggttcctggtccacaacttcctgtaccaacccaagcacgaccccaccttcgagcccctcttccccagtgagaccaccctcaaccccagcctggcacaagaggcagccaaactatgtggggacgatcatttctgcaactttgatgtggcagccactgggagcctgagcacgggcactgccactcgggtggcccaccagctgcaccagcgtcgcatgcagagcctgcagccagtggtgtcctgtggctggctggccccacctcccaacggacaaaaggagggcaacaggtacctggcgggttccaccatctacttccactgtgacaacggctacagcctggccggggcagagaccagcacctgccaggctgacggcacctggtcctcacccaccccgaagtgccagccaggacgcagctacgcggtgctgttgggcatcatctttgggggcctcgcggtggtggcggcggttgcgctcgtctatgtgctgctgcgccgcangaagggcaacacgcacgtytggggtgcacagccctgatgggagcagcttggctgtgagcaccaggccaagactcctgagaacaggcagcccagtcctgcgactyccgcatccccaggaccagacacctgggacctggatacttgatacctgggcatttaaccccctactctgtcatctcagaccccaggcaggaggcccagtgttccaacacccaagccccgtgctagcagcgctccgtgctcttccccaaatactcacggctctaattccccaaacctgaaacttcataccctgggattctaatacctatgtcctgagccctgacactcccacacctgagcctcagattccaatarctcaytccctararcctgackccggggcccctgacccctgarcctyarawtccaatacctyactycccagagcctgatgccggggcccctgacccctgatctacggaggcctgctcccggaccgtgcgggcaccagtgcagagctgccttggttcctggacccctgggcccatcctgggaccccagatggggtaag

SEQ ID NO: 1054 - DNA, 545 bp, Homo sapiens
ggtgaaatagtaccttgagtttaaatagaatgcatttaggcattgtagagatctgaaatagttttcttccactacattgttgaaatcaatgaagcaattagtttctcattcagaaatgtgcacactaatatttagttttgctttctcgtggataatattaagcacttactctgcagtttcctggaagttgtgtcaactgcagtgatactattcaggatggtgggaaatccccaaaaatatgtatgtgtgggcttgcttagattactatatttcatagttaatcttttgtctcttgcggtgctcatgatgtgtggggcacacggaaggcattgctgtagtcagtcattttggttttcttctatagccattttattattttagtgtattagttatgaagataatattatctatttgtaaattgctactttgtattttatgcatgctctgtaatttgatttttttttagttattgatttggattatattcacattctaataaacagttatagggggaaaaaaaaaaaaaaaaaaaaaaaaaaaaaaaa

SEQ ID NO: 1055 - DNA, 1141 bp, Homo sapiens
ggcacgagtctgcatcttgatgatcggtggtaggatacacagtttataaacgaacctgaggctaacaaatactgtcacttttcttaagtttacacagcctattggtggcagatctgggatatggatctgttcggtttcagagccctgctttcctttcactggaatgtgctcttcgctttagcccttttttttttttttttttggtttctgctagcctttatttgagaaaatttacacaaaaatccccaatgcaacatttacaagtgaatctgtataaatcccatatgcctgtttcccaaactgaaaaatggctttatgacaggggtccatgacaatggtataaaaatacttacttaaactgcatcattctcatttatattatacagaccattttggataatatgctcaaaagtggaggaaagcacataacacccctgttttttaagattatttgctcttgtatcagtcttttgtcaaaggcaaatacttttacttcttggataaaaccaaggtataatatcaattaacttttaaaccaaaagcacaaaatgtcctagttgatagttttggcatgagtaaagggaagggacatgagagaacatcagctcctacaaagcttaagtttagggtcacacttgggaacaaaagcatcaacaaaacaaaatattctcttctcctatcttcttgacattttgtcacatcagaagaacataactaacagagtagctttcattgctcctgaaaaggggaaaggcaccagtcagaaataggaaagaaaatcttgttaggttaatggtacatgatagaatttcacattaaaaagtttaatgatggaggatgggcgtagtggcttacactgtaatcccagcactttgggaggctgaggtcagtggatcacttgaggtcaggagttcaagaccatcccggccaacacggtgaaactccatctctaccaaaaatacaaaaaccagccaggtgtggtggcatgcacctgcactcccagccactctggaggccgaggcggaagaactacccgaacccaggaggtgaaggttgcagcaagctgagatagcaccattgcacttcagcctgggcatcgcagcaagactctgtcccaaaaaaaaaaaaaaaaaaaaaaaaa

SEQ ID NO: 1056 - DNA, 656 bp, Homo sapiens
gagccagcgtttaacgttcaaaaggcaaataactgatgaccaggcggcacattgttctgctccgtgagttctggcactgggaaaggtgtagattgtctagaatgacagcaattccgacgccccagtcagtcctgcgtgattgtggcgagggcgcgtctggcaccgggaaggtgtagatcatctagaatgacggcgattccgacgccccggtcagtcctgcgtgattggcgagggtgcatctgtcgtgagaattcccagttctgaagagagcaaggagacagattcccgcgtagtccaaggcattggctcccctgttgctcttccttgtggagctccccctgccccactccctcctgcctgcatcttcagagctgcctctgaagctcgcttggtccctagctcacactttccctgcggctgggaaggtaattgaatactcgagtttaaaaggaaagcacatccttttaaaccaaaacacacctggctgggctgtaaacagcttttagtgacattaccatctactctgaaaatctaacaaaggagtgatttgtgcagttgaaagtaggatttgcttcataaaagtcacaatttgaattcatttttgcttttaaatccagccaaccgtttctgtcttaaaaaaaaaaaaaaaaaaaaaa

SEQ ID NO: 1057 - DNA, 798 bp, Homo sapiens
tgagcgcgtggtgctgataccgccatggtcgcgggcttgatccccgcaccggccctagtcccagttttttgttggtttgtttctttgttttctccccatgaactgtttctgcaactctttttcaaaatgcgcctttcaggttctgtaagccccatgcgggcaggagcgacttgcgggatctcttggactcggcccagaggttgtcgaggacagcctggcagggaggagcgggagaaacccggccagcgctggggcggtggctcctccccggagtccccgcggctggggcaaagcggaaggcagccagaggcgcgcgggcttggcgaggaatcgctcgtggacgggcgcgaacgtggagcccttttatacgctccaggggcactgtgccgtcgggcggccggttagctcagttggtaagagcgtggtgctgataacaccaaggtcgcgggctcgactcccgcaccggccacggcgttagctttttttttttttttttccccgccgccaccccgccatgaactctttctacaacagtttgtgaaaaatgcgcctttcgggtactgtgagcggcgtgcgggtaggagcgaactgcaggatctcttggtctccccgcccagaggttgtcgagggcagcctgctggggagagcgggaggtaccaggcatgcgctggggcggtggctccgcacccgagtccctgcaccctccgccacctgcaggccactcaggatatccaaagcgatccacatctccagcctgggcaacagagtgagaccgtctccaaaaaaaaaaaaaaaaaa

SEQ ID NO: 1058 - DNA, 1221 bp, Homo sapiens
gcacgaggtggattccagagaagaaagtagatgggagcaagtgtccaatacagcaacagctggaaagaaaaataaagaattttgttctttacctaaaacacttcagttaactaagtgtgagtttaaaaactaaagacttgagaactttatcagagttaataagaacgagaaatatgtatgtacatttacaatacaaaattactatttaataatttacacatggcattaattctaattgtgtttaaatatcagagctttttcaggcttcattcatgtaatcaacagccacatgctaaggtactcgaaccagcagtggaattacaagatgaagatggcatggtccacctctcaacagtcataagctataatctaaaaaacagacaggcaggcaatgtctatatagagtcatatataccatgacagatatagagcagggcactactggaacacagagaagggacatctacccacttttatgtcatatcatgggctttctggtggaggagatacataggttgatacctgaaggacaaggaaaagcttcccagatagaggaaagaggcaaggcaaagagcctgaggtaaggaagagccctgcagagttccactccatccagtttggtgctagagcaaagggcagagtgcagtaagcggtgagaaacaagactgagtaacttgacaagaatcacattgacatgggtgtttttatttcatggtgaaaaatttggaacttttcctgagaacaagtgtaagccaatgacacagttaattagaggagatttaaaatgtcacctgtcaagtgactgcttatgaagggttattgctcagctaagtatttctgaatgagtcttaggtctgttggccttcaatctctaccaaaaccctgagaacttgatgatgcttttgttttctgagaatcgtttcagtgtgctggctgacagttccatgaggatggcaaaacttaagaaagtgtagagccaatgaaaaagagatgcacagacatcttgggaactgtttaagctttggaacatgatgaatttatggtgcataagtacagtcttctctgtgaaagtttttgttttcacatctttcattagatgtgtgtaagaaaaaaaatattgatgtagtatctactaacccaagaatgaaaaggaatgccatttgctatttacactttatttctaaaataaacctaaatttaattaaaaaaaaaaaaaaaaaa

SEQ ID NO: 1059 - DNA, 438 bp, Homo sapiens
cggcacgagccgacatctactgcgagaactgcaagaccacgctcgggtggaaatacgagcatgcctttgagagcagtcagaaatataaggaaggaaaattcatcattgagcttgctcatatgatcaaagacaatggctgggagtaatgtgcgaactttcccttctccttcgaatgctgttttgtgaaagaaactgtgaatgtaatggaaacgtaggagcatctggtgacagcctttcttgccctctgacctcaaaggctagctgcgcatagctcttgacactcccggccatctctgtgggtaaggtgtccctcggatctgtcctcttcgtgtacacagttgtttctgaaaattttcaatgagctttttctaacttctcaagttctagagaaagaattaaccaactgatgacttaaaaaaaaaaaaaaaaaaaaaaaaa

SEQ ID NO: 1060 - DNA, 442 bp, Homo sapiens
agccttcctcagcgtgcctcactgccactcccagagccagggagccccataaaacccacatcatgtcttaagagtatatctggctccttgaccagcaatcggccctgggagccaccaggtgggaaaagcgcctctgccagagtccaggccttgggatgacagacagcttgcccgcacactcgggccccactcaaggatgtagggccttttctggcccctgacccctccctggcatgggagcgtggggacggggctggccttgggaggagcggcaggggcatcacctccttctgctgcttctccctgctcctaccctcaagggcctgggggctgcccagctgcctctatgcccttctgggggtctcagcccactgctgacacttctgcaatccagagaaacactaaataaagcaatacgtgtttgccaaaaaaaaaaaaaaaa

SEQ ID NO: 1061 - DNA, 542 bp, Homo sapiens
ggcacgagcccaagttgattttttttagttttgaaaatcaaacaaagttcaaaaagtaaacatcacaggttgacatcccagcccaaagctgaggaaaaatgtctcttgttacattttttggcacataatagaatttatgagcattttcagtgttttgatttttttccccagtcactgttattccttaccctccagagttaggtgtggagagattatgttggcctgtttccatggtgacactgaagaaaagtaattttttaaaggaggtttctactgtgttatttcacatgcatgaaacatcaacatctatgctgtgtggctattacccctaaacataaagacacagaaatggttggagtattttatataaatagacaagtagggtgatattttccttggtctcgtgccgaccctagtaacaaaagtctctcagttacccagggcacctgggagagagtgagggaacagttctgttcagtgttaagcaagctcctctcctgtgaataaccttttctttaaaaaaaaaaaaaaaaaaaaaaaaa

SEQ ID NO: 1062 - DNA, 1060 bp, Homo sapiens
  SITE (1060): n equals a,t,g, or c
gcccacgcgtccgcctcactgaagccaaaagaggggagactggagtgaaagtgagggcaaaagaggggagactggagtgaaagtgaactctgcttttgccctcactgaagccaaaccacagaagactttgaggaatgagagacaaatgaggtagagctcacctgtgctcaccagctccgtcaggtggtcagccgacccctttccctgggaaccccacttctctctgtggctggcttggttgtcgggggtgagatgccatattgattacagggcagcaaagaaccagtaccaggaatttacttgaccattccccttatttttcatctagaggaatctcggattcagccctttcattgctaagacaccttttcactgaggttcttaccagctcagccaaatctccactctgctatagcagaagcaataatgtttgctttaaaaagatttcttgacctatgccttttcttagaaagtttgatagattagttagaacttcagatcatcagatcagtctcaaatgggtttcttggaattttatatttgacaatatttatactataccaaactcatttgcagttcttaggtttgttggttaaaacatttttttaaagcagtaagtttatagaaaatgttttcatttaatggaaggctggggaatgtccagcatcaacccctatggcatgcattcccagtggccttctcatctgggcctggaacctttggttcagggcttaggggagaacaggccacatggcaacagccacacagtcattgccttcaacacagagccacgtgtccccaaacagcaatagtcatgcccttgtccaggctgggatctaattgatacaataggtcgttgactccctcctagtagagctatctaggtttgtctggaaagtttccgaccctggcttataggcaccacacctcatgtactcctcatggcttggatctctgtattcagcctttgttcagtccaataaactttgagtagatgatctcaaaaaaaaaaaaaaaaaaaaaaaaaaaaaaaaaaaaaaaaaaaaaaaaaaaaaaaacn

SEQ ID NO: 1063 - DNA, 1240 bp, Homo sapiens
  SITE (1039): n equals a,t,g, or c
  SITE (1052): n equals a,t,g, or c
  SITE (1063): n equals a,t,g, or c
  SITE (1076): n equals a,t,g, or c
  SITE (1175): n equals a,t,g, or c
ggcacgagctcagcaggttaatgagagtcgctgtggggcaggcattgcaaataatggtgattgcatggtgcaccggcctttctttagtagcagaagcccttctgtgtaagggcaagagcagggccactgtgacaggggaggcccagaggcctcagccccacactgggctcctctgcaggttgcccctggacctaagagtgctacacctctggaaaacagtgtggagagcagtgctgtggcctggagggaggaggacgcagctagcaggcagttagtcggttccctgggcatttcctttgcctccataggcctccttgcctccagtgatctgttagcaggtgttgggtgatggtgccccctagtggacagtttgcacaagggcacccacactacctcagggcttttggttcctgcagtggcgggctcccccattgtcggctctgaggtacttctgagaagcctcgggaccagcccaaagctataaacgtagagctsgtgggctttgaagtactcactccccattgagggattattttcttctcctcagggtactcctaggaggccttgaattcttcggggcctctttagagtggggctggcctccctgggctccggtgccagccgggtgtagctactgggtgcacccaagattgtgaggaggggaggaggcgtgttgtgcacacgtgtatggggtgagaggcattataggtgtggcctggggatgccggcctccctctctccgtcaggaaagccagcattgttgccgcacctaggaggcagcaaggcgcggtgacaggaatgtgtcaggacacaaactcaggcttcactgccagctctgccatatgctcatggttacctgaagtgtatacaccaccgtgtgtttgttggctggggctgccataacaaaataccacagacgaggtggcttcaactacagaaacgttcttttctcacagttatggaggctgggagcccaargtcactgtgaaagcaggtttggcttcccctggggccgctctcccgggtttgtgctggccgnctttttggtctgnccttacatggnctattctctgtgngggcgccttcctgctgctcttcctcctcttataaggaataccacacacacacacagacacatacacacacacatatgccacacacacaccacacacacnacaccatacacatatgccacacacacacaccaacataccacatacacacatacacacacacacac

SEQ ID NO: 1064 - DNA, 826 bp, Homo sapiens
ggcacgagcagaggttaaactgagaggctcgtaattccctgggtcttatcttttactttaaaatgaaatggcatgtgctattttctagtcattagcatcattctctgtattttcagactatttaatagtcaaatgtatatgattctcccatgttttttaaaaaaaaatcttagtattatgtgaaatacaaaactagcatctcctttagttacagtattttttacttagtctaaaattattgtgattgtagtcattaattaatgtcctttgctattatgaaaatgaagctgtttgctttagtacttttacccatagaggaaatattttgtcatttataaagccgtattgctactacatatatctaaatgactttttattttttaattgttcttcattaattttagtgaatcttagtatgtgaatgtattactggaatatgaagcttaaaatggtttgttctatctcaggaatattgtaaaaaacatagttttcatactacctatgtatttctgtgatgtgtcttgtaaagtatagtcaaataaattattaataagattcatcattttagttatttctttttctcatactctacactattgacatctattttctcccataccgtcacaatttcacctttagctagttcaccaaagagcccaatattatattttcatttgactttaagaaataaaaagaggtcgggcatggtggctcacagctctaatgccagcactttgagaggccaaggcaggagggttgtttgaggccaggagttcaagactagcctggtcaatgtagtgagacctcgtctctaccaaaaaaaaaa

SEQ ID NO: 1065 - DNA, 1174 bp, Homo sapiens
ggcacgagcacatgtcaaggtgatgacgcacttccaaatgggttagacgttacctttgaagtaactgaattgaggagattaacgggcagttataacaccatggttggaaacaatgaaggcagtatggtacttggcctcaagcttcctaatcttcttggtcgtgcagaaaaggtgacctttcagttttcctatggaacaaaagaaacttcgtatggcctgtccttcttcaaaccacggcccggaaacttcgaaagaaatttctctgtaaacttatataaagttactggacagttcccttggagctcactgcgggagacggacagaggaatgtcagctgagtacagttttcccatatggaagaccagccacactgtcaagtgggaaggcgtatggcgagaactgggctgcctctcaaggacggcgtcatttgctgttcgaaaagaaagcggacattcactgaaatcatctctttcgcacgccatggtcatcgattctcggaattcttccatcttaccaaggagaggtgctttgctgaaagttaaccaggaactggcaggctacactggcggggatgtgagcttcatcaaagaagattttgaacttcagttgaacaagcaactcatatttgattcagttttttcagcgtctttctggggcggaatgttggtacccattggtgataagccgtcaagcattgctgataggttttacctcgggggacccacaagcgtccgcggattcagcatgcacagcatcgggccacagagcgaaggagactacctaggtggagaagcgtactgggccggcggcctgcacctctacaccccattacctttccggccaggccagggtggctttggagaacttttccgaacacacttctttctcaacgcaggaaacctctgcaacctcaactatggggagggccccaaagctcatattcgtaagctggctgagtgcatccgctggtcgtacggggccgggattgtcctcaggcttggcaacatcgctcggttggaacttaattactgcgtccccatgggagtacagacaggcgacaggatatgtgatggcgtccagtttggagctgggataaggttcctgtagccgacacccctacaggagaagctctgggactggggcagcagcaaggcgcccatgccacacaccgtct

SEQ ID NO: 1066 - DNA, 1502 bp, Homo sapiens
  SITE (477): n equals a,t,g, or c
  SITE (496): n equals a,t,g, or c
  SITE (513): n equals a,t,g, or c
  SITE (1279): n equals a,t,g, or c
ggcacaggtcatctctggcaggaagattggagaaacggactcatgccatggactgtgatttagaatggaggacctcatttcagcttccttgcgctgaagtggagggccggttttcacatccagacttagtatgccacacacagacacacacacaccggaaacaaagttttatgtaaaaatatttttgcttactgcttactttaaaaagcagtttccttacgatatgatacgcactgtgatattttccactctattcctttattcagtgccaggcatgacctactccatagatttcatgacccactaatgggctgcagtgtgaggtttgaaacctckgcccagaggcagattctgcatgcttatttagaggaatgtctgtctagacgagagagattcatagaaaggagatcatttatggraaaatmcagatattcatggactttatcaccaggattctactttgtttctcctcctgcnttcattacccaggcagranctgtatcttcaaatgcntcgtgggtctgcgtacaagccctacaggtgccccaaagccatgtgcagagytaagcaccccatttttctcataacttgacccctctgcctgragctctactcccgctcctctggccctcctctgtgctgccctcccaaatcgccccagctaaaaatgttggcagtcccttccatacctgtctttcttattctgcacatccgctcatctcaagggactattgattctgcctctaaaattgctgccagctctgtgtcatcttttccattaatatagctattgccttcatcatctctaacctggagaacaggaagagaattcctcatactctccctggtctagaaggtgacagaggggctgtttttgtggggtgttccgatccaacctgatcatgtcctttccccctccccaagccctcagcatggcccctgcagtctcctcctcagcacctctccagctatggttcttctctccttgcacagtgcagccatttattaaccatgtcgtctactgaattcaaccaaacagagctgtatattttctctgtatcaggaaaatgaaaamgcctccaccatagaatcttaaaatgtgtttctttaggatcatcttagccactggttctcaaccatcattacacattagaaccacctggggagccttaaaaatacccaaccccggccgggcgcggtggctcacgcctgtaatcccagcactttgggaggccgaggcgggtggatcatgaggtcaggagatcgagaccatcctggntaacaaggtgaaacccgtctctactaaaaatacaaaaaattagccgggcgcggtggcgggcgcctgtagtcccagctactcgggaggctgaggcaggagactggcgtgaacccgggaagcggagcttgcagtgagccgagattgcgccactgcagtccgcagtccggcctgggcgacagagcgagactccgtctcagaaaaaaaaaaaaaaaaaaaactcgag

SEQ ID NO: 1067 - DNA, 814 bp, Homo sapiens
  SITE (480): n equals a,t,g, or c
  SITE (504): n equals a,t,g, or c
ggcacagcggcacgagtttgttcattctttcatgcattcacctcttattcagctaagacttcagctgctgttatgtaccaaagggtataggaacccttcccagtcttcctgagctgctcctagtccttatttagttcgttttttataccaatatagctcttcttcctccttgtcctcttcgtccatcaccacttcgtgtttttaggcttactgcaaatcccaactttcttgttcttgttttggtattgcaagcttgccggctggctccattggctcactcattatcctctccatcacattcttttcttcacttactactgagtgatgcatatgtctgtgtttgtctgtctctcctaatttagatttgattaacctgtatccccagtgccctggcatatagtatttgttaagtaaattaatggataaattcagaattgatcccttttttgccttctgtgctttattctccattatgttatncccaccttgtgctattgaaaaaanggaacttcaggtcaggtgcagtaactcatgcctgtaatcccagcactttgggaggctgaggtgactggatcccttgagcccaggagtttgagatcagcctgggcaacatggcgaaaccccatctctacaaaaaatacaaggattagctgggcatggtggcatgtgtctgcggtctcagctgaggcaggaggatttctccagcccaggaggtcaaggctgcaataagctatggttgcgccactgccctccagcctgggcaacagagcgagaccctatctcaaaagcaaaaaaaaaaaaaaaaaaactcgag

SEQ ID NO: 1068 - DNA, 1303 bp, Homo sapiens
ggcacgagagttccacctaaagatttctccatacataatgaactctaacttaccggcatgtaaacagacctgacctactcttgtgccaatctctgagtttcagccaatcacaggcagccaactgtttaatccctgttcaaataaggtaaatgccaagctgtaaccaacccagctgtttctgtacctcacttccattttctgtacatcattttcctttttatgtccataaatcttgtctatgtggcagctccagagaatctctggacctattttgattcaggggctgctcaacttatgaatcactgttcaattaaactccatcgatttaatttgtctaaagttgttcttttaacaccagaataatgtatatcataatctccctcactctaatcatgtggagattcagattttttcagctaatgaggctccaaccctgtctttgtttaaaaaaaatgaaaaaacaaaacaaaaccatgtcctagttttactgctaacagtatttctctgacttttctggatttcagttttgtacaatttctataataagaggttaacagacattatatgctagcctcacatgaatattacctcctgatacctataataatatgaataatatagagttatgggtaaggaacagacaacttattttacattcttgtcttttcctctccttttccttttcaatcttgccagcaaatcttgccatttaaaattttatatttaaaatgacgtatgcatttttctccatagggaatattagtggtctataaactagtcagtatttcttccctacaataaagcaaaagcagtagaggtcttttgctgtatcctatcaaaccagtaataatccctctgccaaaatcatcatctgttctgagtgtctactttttcatttgtctgatagctcctcttggcatatagtactctcttttgaaccttctgccaaacaagcacaaaataggacaggaaataaaaactctgaggccaaggtctccatggcccacatccccatctgtgagagcacaagagctattgctctcctcactaaagattgcctgatctatttgttggtctccaacaatttcctgagtgtatctgaatgaatgcaagttatttggaatgagtggttgctttttagtctcaatactggctttatactctacctctcgtcttttcctgttccatctcctatcatcctttttttaaagggagcatgtggaagtgaaaggacacggcggagccagaacaagagtgactgagttttgtctccactgcttacttgataagtgaccttggacaa

SEQ ID NO: 1069 - DNA, 1522 bp, Homo sapiens
ggcacgagggcatagtctttaagggctgcagactaagttcatctttgtgctcccgtgctgcttccatttcaaaggcttcgccagcgaatcccgtgagtcattcctggaaccttcaggagtctccatggtgatggggttgagtgggcctgggggaagccagcattcactccacttcctaacaagttcctcttttctgatttttttttcttttttttcaatagagactggggctgaggcttgagcttttttgtttttttaaacaaatcacaaaataagaatccctaagccttctttccccatttttttggaaacccattctagataaatatataatctattcttacttgcctctgttgagaccatataaaacaacaaagcacaacaaaaactgtgcatttgctttctttttttttttttcttttcctgcaagtgttttcagaagggatctggttttcttgttttcctcagtgaaaagatgaaaaggctctgggtaactgattgtagcctgaagcagagatgccggcagcatcaagcccagaggaaggcaggcctgtctagcctactaccgcccctgtggaggtctaccaggagcctgaaaattatgcccagtcatggttggcagaactgtgcatattcttataatccccacctctccttcattctgaaatgctctggaagarcgtagtatctggggtttgttagggaacgagcattaacgttaccattttaggtacaggaaaatgtagctaaatctacaggcatctatgggattttccacatggtaccaaaaattaaaatttgaaaccaatctaatgtgaattgatgaacataaataatctttgggggtataaattctgtgtcaaattccataatggtgttgtggccccaaagttcccacacctgagggtgaaaatgagttttcagtaacattgaaaacttgaattctgctgacttcgttatcccctcaggttgaagcaggacgtgcagcttcctgaggttctgcccccagatttctgggggtcttgggggcattctcaccatgtgctcccactctggagagtgcagccaatctctgctggtagcttaaaattgccaaagccttgcccggggctggggaaggaggtggggaacagcttttctctgctgtgttagtcgctgtgtggggccccacagcaaggctgcttgagccttcattgaccagctatctagtttttgcttccagtctgctctatcctccctcagccccagccttgcccctccaggagcacgccaggttaaagccacatctttgtatttggaatcctactttgctctgacaactgaggcttttctaacaggtcaagctcaccaaatctcattctgggttcttacagcgtggtttcttaagctgtgaaaccttttcaaaagatgataaaagccccagaaattctctcagaaaagtgaacatataggtaacatttcacagacaagctcaggagtttctgggccttcaggagagaatccttcctcacaggaattttct

SEQ ID NO: 1070 - DNA, 1572 bp, Homo sapiens
ggcacgagaggaccccgtcggggtccagatcaggtcactctgccccagtgctctcttgctgtctgctgacaagggggcatggagcatctcttcctcttctgttgccaaatagaaaagggtcagggcatggagaaaggtgaccctgatcccaaacctgccctcccaagtctctggtgttggggagggcccgtgtgtttgtgtaactgtgtgtgcatgttggtctttgtgtgcatatctgttttccaggtctatgtgagtccttgtgctcctgctcctcagctctccaccccaggttgcctctctcctgtgggcctctgtcttctgggaataaagcagggtttcctacttcaggggatgtagagagatgcccaggttgcacaggatgggatggggtgtggtagcaaaaggagggagaggagtcctttttgtgccaaatccctaagtgccgttcgggggccatgtgtgcagcatgactctccctgtctgtggcaggacccaagcgcttgcttaagccccagtgctccatgccagcacttgaactgtctggggtttgatggacagagctgaggaatttcctggcttccccagatagtgtcctgggacatggtatgctttggggctggggtacatggaatccctctgaggacctggatactggtactacggggtggggaagagaaccttaaacttggctttccccagccttcagcctgagtctagcatgtttctagctccccagtcccttgtgaagccttgaggctggcagaagggttaggagttgaactctagattcccttcctgtctttgccttccttttacccctttccctgcaacctccttgactctggcctgaatttgttggtgcctcagtttctctgtctgtacctatttaagccaaaggcactagcctgaattttgcttgaagatcactttgtcttggaaatgactagagaggcagaggagaagggtttccagagttgctaggtttgggatggaaggggcaggcagtgcacttgcccctcctcatgccccttctgacaccagctccctgtggaggcctggtttctgggtaatgcctcccttgggcatcttcatgcatcaaccaaatgggccatcaggtacttcattagtcatggcagaaggaggggaaaagacttgttttccagacagaaaatctactcccctgtccccagccatatccctggataggaagggataggaagagactacttggtgccatggggtaggggtgagggtataagtagatcagagtgggaagacctcagccttgggtggcttgtctctgcttcttgccaggtgggagggcctgtccacaccctggatccccgtaccacagtgccagccatgcccttcccctgggctaccattgtccctttcctcacccagttggtagaggagtcaggaggtgggaggccgtgggctttggttttataatgtaaccactgtgggggtgggggaggatggtgaaccatgtatttcagtgaaatatttaatatatttaaatatcaataaaatcaaactctttgtaaaaaaaaaaaaaaaaaaaaaaaa

SEQ ID NO: 1071 - DNA, 1631 bp, Homo sapiens
gatcccccgggctgcaggttcccctctatgtgtccctgtgttgtcatcatttggctcccacttataagtgagaacatgcagtatttggttttctgttcctgtgtaagtttgctaagggtaatggcctccagctccatccacgtccctacaaaggacatgatctcgttatttcttgtggctgctactgacatagcatctatcttgaaattcatttcattcatgcaaagttgtccagcgcttacacagaacacagagagcagagttgggccaaaggaccttagcttttatcatgtctcccttttttttgactgtgctaaagcattattttgcttttctgtttgttaccaaatcctttatcttcaatggttaattttttgtttatatatttggttaaacaggaaaactgtggtatgtctgtgtgtaatggtaaaatatatatcctgggcggaagacgggaaaatggagaagccacagacactattctctgttatgatcctgcaacaagtatcatcacaggggtagctgcaatgcccaggccagtgtcctatcatggctgtgtgactattcatagatacaatgagaaatgctttaaactctgaagacaggatacctcaccgaagaagccacactgatccaagatgggaggttttaaaaactctacagtgggaacttcacatatctcctttgtgccatatgcaaaaaatagtaaaaataataatttggtgcctttctcctcaaaatatcaatctttcaaactataataaagcctttcctataattgaaaaaaaaaacttttttgttaaaggtaatggtggttgttacttggcctttgaagagtgtacctttgtaagtatttgtaagaagtctatgtgaattaggaaatgtctgtctgcataccttttaggagcgtgtgaatggtgtcttcacttattatgtatgtttatctgtatgtatattccttattttgtcatatatgtagagaaaattgcatgacttgaggcatcatttaggttgaagaagttaatgcttaggatgcattctaggagaaaaaatcagttttaaaaacctttgttgttaacaaagtatatccagattggttaattttattgaagggtttttttctgtaattgataaaaatgtaatgacaacaattcaggcatcataaaatactgaactattgtgactttattcttagaattgctgtcttacattaaacatgtttttagggggaagttaggtaggagatagaaaaataagtgcccctacaagggggattaaaattacaagttaattcctaagagaaaaatggaatggcctttgaaggaaaaatgacccactatggctctcaaagtttttatgcatcatctcttcaatcctctaagaaagcctcttttcttaacttgataaagcagtggaaacccattttgcaatattgttttgtgaaaaacagggacagacagccaggtacagagactcacacctgtactcccaactactcagcaggctggggcaggaggattgcttgagcccaggagtctgaggctacagtgagctatgaacgcacacggcaccctagcctgggcaacaggttgcgacactgtctcaagaaaaaaaaaaaaaaaaaactcgag

SEQ ID NO: 1072 - DNA, 1902 bp, Homo sapiens
ggcacgagatcggcatgagtgtaacagtgataacctgatctgtttgttttaaagattattaccaagtgaaaaattcagaatgaatagaatttacactaacatgctatataaaatgttaaagtctgatgctgtgaaagcaatctagtgctatatttctacctcctcatttgtcttaattatttggtaagtgggattatgatgagtaactggaggggcttagaaacaaaaactggatgaaagagtatgcatgaagaaaagcttctttgataaatgtggagttcttcattataaatatatattcatgaattcacagataagtacttaaagaacagacagtttacttggcctaaaaatattttgatgtttactcaaaaagtacctcttcaggtcttgagaacatggaaaagaattgagtgcttttaaatactttttagaaagtaatcataaaagtaaattgaatttcaaacctatttggcttctgttttgtgaacctttgaactatatgtatgtgtataagggtatacacatacatatatggcatataacaagtgtacacatatacacataacaagtgtagaagtatatattacatacatacactcactctgtctggtataggctaattttgaagaactcccataagtttctgctgcttctcccataactgctgccaccaccatcagaatcataatcaaacctaacctttttgtttggggcaccaaatctgaagacaaaattaatttgcaccagtaaacttcaagctgctttctttcttgaaaactaaacgtttaacgtataatgtctgtttggatactgttccaaattgttgattgcatgtggttaatgttgcattagagcactttgcaattgcataattcattaatgttttgtgagcttgcatttgtgagttattggatgatcagactgaattttgtcaagtatcacattgtacatcttgcctagatgtcgatgactgcaagtaataatacagtttataatgaaactatctacaattcttgttttagcacatctgttatccgtaaaacacctgtaactagcttttttaatttattatttgaattttaggatagcgaatcactaatttttagttgctgaggttggcattttagtgattattaagcacttctgtcagtctttgaaaaaagaacgtattttttgtgctttgaagatctctgaagaatttcttttataatagaatgggcatgtattgtaacagttttatgtcaaatgatctgtgctgtagaaaaacattaacccttgttcaaaaaagaaatggataaacttggcctttctaagtggtaagaatgacctgtcactataatatactgtatgtttacattttatttaaatttaatctcttatgtatagggtgataaccttccccagaaacaacagtgattgcgattgttttctagaaacttctttaaagtgccacatttggcagtacaaatgagtctgagtgtaatagcccagagatttatatatagttgaatggttaaaatggtaaaatgtgccactgtgtcaagttacagtggcttatgtttttcatagtaattcaaatgaacttcctatttttgatagtaaatgtcatttaatagtatacttgccatttgagcctcactgcaaaattagtgcagaggagaaaacaatttttaatgtaatcttgattttacctcatatactgtacattccaaaaactctaaactttttaaagattatagatacactaccaaacatatcaccttaaaattgtataaggctgaatgaacttcatacaaatgaaaaaaatctcataaaaatacataaactatgtagcaaaagtatctgtaaaatccatggaaaataaaagttgtatcattctttttgaaaaaaaaaaaaaaa

SEQ ID NO: 1073 - DNA, 2054 bp, Homo sapiens
  SITE (428): n equals a,t,g, or c
aattcggcacgagtagaaacgaaatttattttaaagcagtagatggtggtggtcaaaatagtaatgaatagtgatcagcacccaagattttcaaaattatgtcaaacacagtgtccaagcagtaatatgggatttaaaaaaatacatttatgggggatgaaatgagcataaggacttggtcatccacacataactactccactgagtaagaagttccgtctctcccacggctggtttgtccccacttccggacctgtcttctttctctgttgcagttggcaaggtggaaggtttaaggaggaaagacttacacaatattgttgtcatgcaacagagcccgtgcatgtaaatgtattatgtgcagaaaacaaacccgcttgtgattgcgatggggactgtttccataaactttttttttttttacaagnaaaggaaagtctattgaattttaaagagccagaaaactgccggatgtgctgacagctagaggtgtcttgggtacaaaacacgccaaatgagccttccctgcattcactctaatatccttcatccaaaagcaggtctttcttcttaaagttcagttttcattatgacatagagatgcatcttggtaacaaacagttagcgtacgtaatcttattaatcttactgtgtccgtcagttgcatttttaaaatagtggtaggcgtatctgcaaacgtacacccaacgtctctgagaaggatatgggctcatccagtcttcatcacgagatccacatacatctcttcatctgagtactatcacacagaaaagactgacggcttgtgacaattgtacaacattgctctttacccgtacatagctaagcaatgttgatatccatgttagtaaggactcaacattcattttcaggtgtcgtttcacttttgattcattttctctctgtgtttatttatttatttatttarartcytgrtctgttcattcattcactttttaaaactaaattataagaaaaaagtgtatatatcggaaatgagaaatataarataaatatcattactactgagaaattgtactgkaattgagragggagaagtkgttkgtttccctttgatctyccccagsacttagcaaaaagccttttacagaaaaakgaagataaacattaataaacaggttgatcagttaaatggtttaatgaaacaaattagtacatctatggaactctttttccatccgtgtttgctaaatcagaggaatgactaattacagagtgctcaggctaattaagaggggactggtaatgtcctaggagaactacagataaggttaaaatcatgtccaacataaacttctgttcccttcctataagcaaagagattaaatgtgtttgggttctcaaaaatcccaggctcacatctttacatttctgtggacaaccaaaaagggaagcaatcaagggtaatagatactgtgtaaactgggttaaaaaatccgtacagtgccagggatgtaataaagatggtctttcattctgtgaaaatataatgaacttcctcaaggcaaattacataatatcatagaactcaatgtttctgctactatcgggtaaggtgaccatacacagtcgggagsctgtggctgcatgcgaggtgtatgcttcgttcctcagggttattgctgcttccctcatctcagctgagcagaaatattacctagctaaaaaagacactctgggctcaaacagatgtgaaaaacacagcaaaactaggacgtgatgctcatctttcttttctttcctttctcctttggagtgacacataaaccaagcagtcaacatttttttttttttggtgtgtttattcaagtaagcaaagcctttttcgtatgagaaatgagaaatgagaaatgtgcctgcttctcatgactgatagaaacaattccgcatgtagtcataagagccccagttcaaggacgtgcctattttagtacaggcctttgcagaacgagagataaatgacccactcagaacaagaactcaggaccaaaaaaaaaaaaaaaaaactcgag

SEQ ID NO: 1074 - DNA, 1003 bp, Homo sapiens
ggcacgagggcatgttattttcatcgcaaagttactgtaagctgggagaagtggcacacacttgtactcccagctactcaggaagcttaaggtgagaagattgcttgagcccaggagttttgagaccaacctgggcaacacagcaagaccccagctcaaacaaagaaaaaaagttattgaattttttatttctatggatcattttttgtagtttcttattcctttcacccttcattcccacttttgatcccatcttttatttatttagttttattaaatgtatatttgtctgataattctgctatctacagttttttgtggacctgactcagcatttctttgtttcttcggattcagactgttggtggcttgtgattttagtgatttttggccgtgaacatgtttcttggacttttgtctgtgggaattctctgtgtactctgtataaattaagttacttcaggtgttttgcattttcttttgccatgcacctggggcctgggtcactacccttctggtaccacttaaaactgaatttttgtcttgggtgctcgtactgatcctgtatgagtacaggtttatacttactgtagaaatatggtgtttgattatggggtattgtcccagatggtgctggagtattaatatgctctctgttaaacttaatgtgttgtccctgtaaaactccaaaattctgaattccagaatactactggccccaaatgtttaagataagggcactgcctgtatttgtttctgcctcccactattttccttagtttaacacaaactcacctttttaaaaaacattttgagagaattcagtattgggaagagtttctaacctgtttctggaaatggaagtccaaagtctgtttctgtaattgttttttttttgagatggagtctcactctgtcacccaggctggagtgcaatgacgtactctcagctcactgaacccgggaggcagaggactgcatctcaaaaaaaaaaaaaaaaaaa

SEQ ID NO: 1075 - DNA, 1832 bp, Homo sapiens
ggcacgagaaacatattcaactgaagctttccaataatctttatatcaagaaagcatgcgtcttgtcagctacattgttttcttagatggatttctcctgttaatcctcaaatatctgaacttctgtgttacccaagtgtcttatacaagcttctggtgtctaggacaaatttatggcaaataaaattagcaaaactgaactgggttgaactgaacaagaggatgggggaattgtgcaaatacgttgttagtagaaggtcaatttaaaatagggactagaaattatttgaagttttctttattacggattcaaagacttattttgaaagttggaaggagaagggagggaagagagcagagggagaggtgtagtcaagctcttgaatataactggtggtattgtgggcagagatctttagttcaaatccacgtattttttaaaagagagaaccggaggtagagcaatgatcagatgggtgcacagaccagtgccaatctgaacattgttaatggcctgtgacatgatgagcacaggaacaggcatgaaagatattgccatacaattttaatttatacaagtattggcccctcaagtggttggaaattttttttttaatctctttttctgaacagggtcttactctgtcgcccaggctggagtgcagtgatgcaatcacggctcactgcagcctcgacctccccagctcaagcaatcctcccacctcagcctcctaagtacctggtactacaggcgcgtgccaccacacctggctaatttttgcatcttttgtaaaacagggttttgccacgttgcttaggctggtcttgaactcctgaactcaagtgatccgcccacctcagcctcccaaagtgttgggattacagacattagccatcacgcctgccctagaaacagttttttaataggagatatttgagaggcattgaggtaggagactctatgacatgccctcagaatatcagaatcttcttagaaataaactaggaaatgcagatgtttttaactactcagacttttgaggaattaatccttttaaaacatttttgttaaagttagtgtatcagtaagaaacagacctagtttaaaaggaataatcaacaattttataaaggagatggcttattcaaccatagcccctccaacatatctactggaaattctgctggttaactttatctctctctctcttaatttagactttcaacctatgaaaatgtaaatacctttgaaaaaactaaactatcagtcatttacatcctctcatgaatgaaatgcagtgtagggagaggagatggcaggacacagcaaacaggacacatttgcctgcttctctcttgcctaattcttcctgacctgtatttactgatgcttaataatacttgtaagactctaggggttcatttcccatttcagcggaaagtacttcactcaacaacaatattctcaagagtcttctactggaagctagaaagaaataggaatttaagtccatagaatgaaggtagttattcctgcctgtgttgcccacctgttcacaaaaagtacctttatgcttgaaaacattaggttctttggttactgcactgtagtttcaaatggatcctccagatggcattcatgtcttactcagaaagggcactgccattgtccccaaggcttctgtctactaattctattggtcttgtgttttgcttgcttggcaaaaaaaaaaaaaaaaaaaaaaaaaaatggagctattttctgtctatataaatctacttatatgaataaccattaaagtgattttgtataaaaaaaaaaaaaaaaaaaa

SEQ ID NO: 1076 - DNA, 2352 bp, Homo sapiens
tcattgtatcaacagtacacttgatctccagtacagacatatggtggaacagaagcctggatacaggactcagactcttactgagttggccaggagcagcaggcaccacagcctgtgtgtgtgcagatacagtgtactactaccaaatggtgcccagctggaagtttaggtctcctcctacctggatctcattacttgggccgttttcaggatcgtttaatgtggataatgattctggaatgtggctatacttactgctctattaacattaaggggttagaattgcaggaaacatcctgtcatactgcagaagctcgcagattgatgaagtttttgaagatgcttttgagcaagaatacacaagagtatgttcccttaatgaacactttggaaatgtcttgacaccctgtactgttttgcctgtgaaattgtattctgatgccaggaatgttctatcaggcataattgattctcatgaaaacttaaaagaatttaaaggtgacctcattaaagtacttgtgtggatacttgttcaatactgctccaaaaggcctggcatgaaagagaatgttcacaacactgaaaataaagggaaagcacctctaatgttgcctgctttgaacactttgccacctcccaaatccccagaagacatagacagtttaaattcagaaacttttaatgactggtctgatgataatatttttgatgatgagccaactatcaaaaaagtaatagaagaaaaacatcagttgaaagatttgccaggtacaaatttgtttattccaggatcagtagaatcacagagggttggtgatcattctacaggcactgttcctgaaaacgatctttacaaagcagttctattaggataccctgctgttgacaaaggaaaacaagaggacatgccatatattcctctcatggagttcagttgttcacattctcacttagtatgcttacccgcagagtggaggactagctgtatgcccagttccaaaatgaaggagatgagctcgttatttccagaagactggtaccaatttgttctaaggcagttggaatgttatcattcagaagagaaggcctcaaatgtactggaagaaattgccaaggacaaagttttaaaagacttttatgttcatacagtaatgacttgttattttagtttatttggaatagacaatatggctcctagtcctggtcatatattgagagtttacggtggtgttttgccttggtctgttgctttggactggctcacagaaaagccagaactgtttcaactagcactgaaagcattcaggtatactctgaaactaatgattgataaagcaagtttaggtccaatagaagactttagagaactgattaagtaccttgaagaatatgaacgtgactggtacattggtttggtatctgatgaaaagtggaaggaagcaattttacaagaaaagccatacttgttttctctggggtatgattctaatatgggaatttacactgggagagtgcttagccttcaagaattattgatccaagtgggaaagttaaatcctgaagctgttagaggtcagtgggccaatctttcatgggaattactttatgccacaaacgatgatgaagaacgttatagtatacaagctcatccactacttttaagaaatcttacggtacaagcagcagaacctcccctgggatatccgatttattcttcaaaacctctccacatacatttgtattagagctcattttgactgtaatgtcatcaaatgcaatgtttttattttttcatcctaaaaaagtaactgtgattcttgtaacttgaggacttctccacacccccattcagatgcctgagaacagctaagctccgtaaagttggttctcttagccatcttaatggttctaaaaaacagcaaaaacatctttatgtctaagataaaagaactatttggccaatatttgtgccctctggactttagtaggctttggtaaatgtgagaaaacttttgtagaattatcatataatgaattttgtaatgctttcttaaatgtgttataggtgaattgccatacaaagttaacagctatgtaatttttacatacttaagagataaacatatccagtgttctaagtagtgataatggatcctgttgaaggttaacataatgtgtatatatttgtttgaaatataatttatagtattttcaaatgtgctgatttattttgacatctaatatctgaatgtttttgtatcaagtagtttgttttcatagacttcaattcataaactttaaaaaacttttaataaaatattttccttccttttcaaaaaaaaaaaaaaaaaa

SEQ ID NO: 1077 - DNA, 1050 bp, Homo sapiens
ggcacgagtttacaggcagggatataagcataaattttcatgtcaattctaaagtcaatgggatgagttcctaactagagtcagaaaactctgttaaataataacacttctttgcatttggaggatgcttattttccaaatcatttcacagcaattgccttatttgcttcttgcaataaccacaggaagtcaggagagcagatatttttattcctgttggacaaatgaaaaaaaatgaagcatggaagagttaattgaatcacctaagattccacacacgtaagkggmcagagttctagattagaaactctcttctgattctcctatgctaggtgtaaaagagtagtcaagagtggttataggtacagcttaagacagacctgtactgaaatccacttgagtccggctacaacttgtccaggtggatcttgagtatttttagtagagacgggggggttcctcacgttggccgggctggtcttgaactcctagcctcaggtgatcctccctcctcagtctcccaaagtattgagattacaggcatgaggcaccacatgtggccaatagctgtactttccaaaaatgtccaagtcaagaaagacaaagtaaggctggagaactgttccagattagactaaaaacacatgatcctgaattgaaaaaatatgatcctgaattgaaaattatcttgagaactgaaatgggttaaatgaatactatttagacaattgccaaaatttgattatggactatattcgtttcctacggctgctatggtgaattaccacaaatttggtggcttaaaataacacacatttattttcttatcgctctgaaggtcaggaggatgaagccagtttcactgggctgaaatcaagatgttaacagggttgaactccctgtggactggtaaagcacacattatctccagtttactcttttttttttgatacggagtttcgctcttgttgcctaggctggagtgagctgagatcgctccaccgcactccagtctgggtgactctgcctcaaaaaaaaaaaaaaaaaaaa

SEQ ID NO: 1078 - DNA, 746 bp, Homo sapiens
gggaatgctgaccaaaacttgatttcatcagcttcatgaaaaggactagtgtcattaacctgttgaacagaattggtttattaaaaaaatcatttccagtagtgtgaaacctttacgagtctttaacatctaaatgttatgactccttgtaccttaagttttccagtctttcttatttatatcatctccaagtacctctggctcctttcctcttgctcaccggaaccttagttttcctcaacagaatgctttgttaaagtagcccacaggtgcaggatccatagcaccgtcgtgcagactagcagcccaaaggtgtgtttggtttggcttatacggtgttttgctttttaaactacttgccataatttaaaagtggcaacactagacttaaaaaaaaaaaagtctgattgcccatattagattttttttttaattcttcacaaaatctgctcttcctgaaagatcaaagtgtctagaaagcccaaacatgtattcttaacatagtaggcaccagctgaaacatgttcagggcttctagaacactaaaaaatttggcttaaaccagtgttcagtctggtgccaaacttcgaatggaatacaaattcacataatctgaactttgttcacaggttatcctaatagagtaattcttcactttgctctattgaactgtcttaaggatttgtttaaacagctaagttacttgattaaaataatgataaaattgtaaaaaaaaaaaaaaaaaa

SEQ ID NO: 1079 - DNA, 2608 bp, Homo sapiens
cccccgggctgcaggattttatgagtactgttcattgagagatgacaatgaagattagatgaaattggaaataaaccaacattgtttacattccaggagacttgtagctcagccacacacgcagtaatgacctgtgcccgttcgcctctggcactgcccacccctctttttttttttcttctaattctgtactcacaaaagagaatctcattttcttctttcttccattcccttaaattctgagtactgtacatatatttctgggttcccacgatgatgtgaaaaactaccagactgttttttgtcttctcacaaagacaagaaaaatcagggcattttgtgagtgccttaagatcaaactaacaagatctgaccctctcccctcacagtgagccactgccccacttcagagggtaagagccaaaagcctcattgtgaaaggcactggacttggaccagggacaccatcagggccttggttttctcacgcataaaatggagagtggattaatcgccaaagattcttctgatctgacattttgaaattgtgagagaaactagatgactgtaaacttggtcacaggcctggttctggcagttctttgcggacttttttctagcattatgccaaataaacatgcagtctcagtgtgctctcgcatgtatgaatatctagtcctttctgtggttctcagccaagacataaaaactaggactcagagcacatacaaaaccagttatgtttcggaaagagggaaaagagtccccgagcccggatcttgtgctgcttttctcactgacgtgttgccttttttctttacaaaatctgctttgatacttaggacctctctggactaatttctcttcctagacagctcagcacagctattgatatgttagaggcagtatccttaatattcattctaaatgagttaacgacttaacttgaaattgggcctaaggagtgagaactacaaaaatacaaaatgcttgtccaggactcagccatgcacaccttgagcagcgccggcaggaggcacggaaggaactgtgctccgttctcctcactgtcatggtgccaccagtgtctgatgaagggcagagtgacccagactgcaggcagtaactgacttcacacagtccctggcatttagtcatctgtgattgttttatcactctggactgtgcagagccacctgccaccgagatctgcattccgactgcctatgaacgggtgtgggggccgggggctggcttgctgaagtcttcaacttgcactcggagctcctttgatacctcagagctggctgtcaggtggcagctcacacccagactcactggccacacctcagcagggggggagtcgagtgtcagtctctttctgtgaaggctttttttttcctttggcctgggaatttttcccatttttatgaaggggttttaaattgtttcattttgtgtgctgtgcttcaaagccttaactgtcaaatcttgcattatcttgtttgtacagaaatatactggcctagcagaggcaaaaaaaaaagaaaatgaattttattttacttgtcacacctgtcttaataaactggagttttgctgctaaagaactcttctctctgggggcagagcttctatttatggcacatagacatcagctaggcttttgggaatcgtttgtgttctttgtggaaatgtcctttagaagcacccatgaagtagtgtgttcagactgtgcacacagaaaacaggctctgccttcacatgtgagacggtggacttttcctctggacaaaatgacagcatcctggcgactccacagtggagctgagcgccactccctgtagccgatctgggactgaaacgcttacacctctgcctcagaaggagtcccccatgccctgcctgaaatgacttcactggacacagcggggctgcagctaacggggtacaggtaggagctaactaacttcacccctgagtccacttgcggggtaagagataaacagtaacccttccaggagcccactgacgttggagtgctaaaaatgccccttcagggggaaaactgcattttctcttccaaaaaggaaaggttcttccaggcgagaaacctgtggtctagaaccacagcaagaagaggaggcatgctggcctgcaccggaagactcactttgtctgccctgcgccagcctcacctcaccctgcagttcccgtttccgccatggatgcctcatcaccaaccctgaccttccccctcccaaccctttattcatcctcactcccactcatacccgcctccctggacagttccctgctgcagagttctttctgctttcagccctaccttggtggtgatttacctgaaaatcttcacaactgatcattatctccttctctttgagacctgactgaaaaaattaggtgtgcacacctgtaatcccagctacctgggaggctgaggtatgaggattgcttgagcctgggagtttgaggctgcagtgagctatgattgcaccactgcactccaacctgggtgacagagtgagaccctgtctcaaaaaaaaataaaataacataaggaccttaaaaaaaaaaaaaaaaaaaa

SEQ ID NO: 1080 - DNA, 1067 bp, Homo sapiens
ggcacgagaaataaataaataaaataataataatgataatatgatagcagctattattttatcgagggctctgccaagtgctttatatgcgctaggctctataatcttcacaacaacctttaagaaagactctgttaccatcttcaatttacagatgcagaaacgaagcacaaagatgtcatcaaagtgtctgaaggtcacagggccagtaaggccatgggaaatgtgcatgttaatctgggctctttccattctgctcattgcttctcaccttcccttcctttctaggtaccagggggaacagagtaggtagagactggtctcaggctgcctgaaggctgacacagacccagccctgaccctctcacaacgtcacactgcatttgcccccagctcctctcagtctagaaacctgcaaaccccaggatcctagtgtctaagcacaggccccagtgtctgttaggtcaccccattccaggcttggatctagccccaccccctccctcacatctcccacctcctcagtcaaaagcaaagtcaagacaggcagccaagccagtcccagcagaactccttgagaaaggtgacatagcagcagcaacccagcctgagaaagtgcctgaagccacagcagccaacctgttcaaacagatcacctcctcctccaccaaaaagaatttacctggaagggtggtttcaaaacaaaagtccaggaataggtgaaaggtctactcagggaaactaaggatgggaaggaaaaaaccactcctgaaggaatgaggtgstcaccctataatcccagcattttggaaggctgaggctggtggatcacgagtccaggagttcgagaccagcctggtcaacatagtgaaaccccatctctacaaaacatacaaacattagctgaatgtggtggcatgcacctgtagtcccagctacttgagaggctgaggtgggaggattgcgtttaggagatcgaggctgcagtgagccgtgattgtgccaccaccacactccagactgggtgtccagagtgaaacctagtctcaaaaaaaaaaaaaaaaaaa

SEQ ID NO: 1081 - DNA, 2466 bp, Homo sapiens
  SITE (1348): n equals a,t,g, or c
  SITE (1449): n equals a,t,g, or c
  SITE (1457): n equals a,t,g, or c
ggtgagcctctgcacccagccacagtggtgactattgaacaaaactgagtaatagtcacatctcctgctcccttgaatgcagaagcaattgtacttcagggcatggtgttatctacttgcaaactttttattttttgatcttacagcaactacttttgatagtacctcactaaaaacatcagcaaggagccgccaatatacattgaccactctggttctaactgctttccccatagctagtctgcctttcaaattgttgctggtgtcagttttacctagtgattggtcaaaacataacaagggtctctagtttttcatcctgcaatatctgtttccacactgccggttgcctggcaacacaataccagagccacatattttagatttttgttatgatggcacttttccattcctacgtatcagtcagctagagctgcataacaaatagcaaagactgggtggcttaaacaaccaaaatttgttttttaacagttctgwkggccaaaagttcmaggtcaaagtgttggcaagtttggtttctcctgaggcctctctccttggcttgcagatggctcccttcttgctgtgtccttacactaggcacttgtgcccctaatgtctccctgtgtgttccagtgttctcttataaggacaccagtcttataagattagggcccctctctatgatttcatttaaccttaattatctcctgaaaggccctatcttccaatatagttacattggggctttggccttcaacctataaattttgggggtctacaacttagtccataatattctggtactgaatttaaaactattagggtgtcggctaagccactgtaacagagaaacccccaaatactgtagttccaataagataatttattttctttcttgtagccatcaggaggtagcccatgaaattgtccagggacttatatttattctaccattatttttactctattattattttatattattattatacttattctaccatttattctgccattccctagagtgtcctcttcatagtggtcaacctgtgggatggagaagagaaaagtaaagggcaagcacatacatttgaataaaatgagatagaagttgcacacatcaagtttgkatattcttttggtaagaaattaactgcagaggaacctcttgctgagcagccatgccttctaaaacctgggacagagattttattattaaaatgaggaaagggagaatgaacgggggggaggattatcagttccttcctacattcctcttctatacatcttacattytgtattgagtatgagaagagacctgaaatttagatgattctttacattnttatttatctaaaattgaagtttacctaatttagtttaatttaattattttactgatttaaattaatcagattttcttaaaattccrgtaaaagaaaaaancgtaaggnaagctttgttgctttgcaaaatagggagatatttcagaaggtaagggaagaggtctatcctacagtatggagtacagaagtgggacttagagatagccaagagagtttgaaatattcaaagaatatatccaatataatctgtagccttttttaaaaaaaaaattagaatttccatctctctgaatgtattccagttgtaaaaaaaaaatgtattgagtttcccatcatatggaagtttttaaaattgtaggaaataaaatattcagaaggctacacaaggtattaaaaaaggggacagggatataatagcttactagcttattagaatgaatttggttccttatgagggataatctagagaaaagaggcatagaataagatctttggaaccaaacagtctgagtttgaatcctggctctcccttttggcatctgtgtgatcttgggcaagctacctaatttctattacagctttgttatctcaactgtaaaatgaggctgatattgatatatcattggagaggactaaatgagaccatgcaaaatgtgtacttggcacagtgcctgatccacaaatactgatgatgatgatgatgatgatggtggtggtggtggtggtgatgatggtgataataacagtgatgatgatggtagtatagcattagtgcagcaaaaaggaaaaatggactcaaaactaatttttcctaaaaatttgtgcttttatttatcagatgcttctaacttagtccccaccagtctaagactagaacaatattgggattttccttttcagaagttctatcaytggcaagttgtttttatttccagaactccaactcagaagaaatcacctctgaattcattgtctatttaataaagtcaagattcttcaaattctccattttattcagtattaaataactttcaaaatatggctatcttgaaagtctccacttcctcatacttagcaatttccagcattatttaaaaaaaaaaaaaaaaaactcgag

SEQ ID NO: 1082 - DNA, 2549 bp, Homo sapiens
ggcacgaggagctgctccccccagcccactcctacctcactccatctgcgctcaccctgttctcatcctgccccactgtttgacttgactcccagcacaggcgccctggcacagcagggatcttgcagcgattccggttgcacatccacaggggcttctaaagaatgcactcaggacttctggcctcattcccaccccatggaccttacctcacccttttctccagcaccattgggccaaaatgagaccttatcaaagaaagaacaggacgcttgcctttttcctcaggttcttaattatgtttttagttttttgcgagtctctctgaaatcctgaagatgtggaagagtttgactaaagtacataaatactcagagctctttttttttttaaacatccaggatctcaagggtgttcagaaccttttcaaaaaaataatttagccatagatgagaagcagccactaggcccttccttgtaaagtggcccctgtgtggggatgcttcaagccaggtggaaggacggctggactgtgataggagtgagaaaagaacagatctttttctttgagggatgtgagcccccttagttgtcagacccagagaggcattgaaatgtgacagttgttacgtttcactccccaccctgacctaagtaatcgcctgctctgtggactctaggccagtagcctgtaaactctgtatattaattttgcctcagtttctttaggtcaatacgaacaacagagcggtggctgactacacataatgtttgggatcttacctgaagagcttctgcaaggaggcttccagatgtttaaagtttggcttgagttggggtgtcctcagaccccactgacatggagtagtcctcattctgagaacttggtatctgttatgagacatggtttggctgcgtgaggtggtgattggcttctcaccatgacaagccaccttaggctgccaggagaagctcttcctgggggaggggctgcccctaggtggagtggaaccagatgttggggtctcctgatcacattttctgctttacagactgatgaagagaagcagcagggcttacctgtggtgatgccagtgtttgacagaaatacctgcagcatccccaaatcccaaatctctttcattgattacttcatcacagacatgtttgatgcttgggatgcctttgtagacctgcctgatttaatgcagcatcttgacaacaactttaaatactggaaaggactggacgaaatgaagctgcggaacctccgaccacctcctgaatagtgggagacaccacccagagccctgaagctttgttccttcggtcatttggaattcctgagggcagccagagctccttggtcctttcagtactaggcagaacagcccccgatctgcatagcctgtgaaagcccacggggacatcagtaaccttctgcagccaccatccaatgccattactgcaaagtgagacttggccactgacctgggcctgctgcaggagctcttcagaaaggcacatgaggaccacggtttgctcagtttctggtaaaacacaagtctggagtgcccctgcaaagggtattgatggacttcctgccagtgacagagcatgtctattgcaacaattctctcagttacgttcagcacttaagaacggctaatggcaataggatctttagcaactttttcacatcatagaaggtgcaatcgctcacttgggaacactactgagagtgacttctcttttaaaattgagtagcagatgaaaaattaaaatttgaacttgattattaatatcaattaaaatgttttatttattttattaaaagctcaatattttctatgaattcaaaaatacttcagagccaaagccaacttcaaataccgtgaccaaatttacatgattcatattcattatgcattacttggtatacagacttattttcataatgcaaattaataaaatgacacttttactgcactatagaaatattcatgtatgttaaacttttctgattgaggctaactggaaaaagctggggtcgtattctaagtgctaaagaaggctgcttctactgtatagaacccagggctctgaaacagctctagccgcctaatgcacttcacaggtaactccccaaggtaaaactagactctcttgttggttcgcaaagaaaagttaggacttaacacttttttctaaaattttataattcaatttccaaaagtctactctattttatactgtttctacaaaatattccttataaaaacaaagaacaaaaattgaatatttaatgaattgacattttataaccaacctgtttttatctacggtgggaatctttgatgccagaaatttataaagaggttctgtatcttcacaccttgaataagcataataccataaaaaatgacacttgacatgtcaatgtatttgtcatttcattttaaactcgtatttgtggtttttttcccagataaaaatgaaattaaaccatttctttttaagaaaaaaaaaaaaaaaaaaaaaaaaaaaaa

SEQ ID NO: 1083 - DNA, 1068 bp, Homo sapiens
aattccctctcagcagaacacactaccagtgaccatccccactgtagggttagctgagaggccctattaggtacagaaatggctactattttaattttgtccatgcatctccatttacttcaagcttctagtaaaggtctctgtttctgcactctcccctccacatttctatacgacttttaaaatgtagtttttttcaaatcattttcccccatgatattttctctagtatctctacgscacttaactaaattttcctttgttcataatttgttagaacaaatatttactgagcatctactatgagccagatgaatgttagacttactagaaacacaaccataaataagacagacaggtagctgctcttggaatccacattacaatagaaagacaaaatgcatgattagatacacagacagataaagcagtcaaatgaacaaaataagttttaatagtacacacaggaaaaaaggagctgagacagagaatwacaaatagggcttgaactgtgaactggggacagaggaagctcttctgataaagcgaccttgcaatgcaacatgtataaaggagctgactacaaaactgggtttagaatcaggaagacggggcagagttctcagcacaggccaagaactaaaggcagaaagagtgtagccttggggacgtggaagcctagagcatttggaagacgcaaacaagggagaggggagcagctgacaatggaagggaaggggaccatcatgcagcacactggacctgggtcagcaaacttctgtaaaggggaaagtagtgaatgccttaggcttcatgggccgtaaggtctctgccacaggatccaaatctacagctgtagtacagaggcagccactgactacatcgtcagatgaacatgcctgtgttccaataaaacggtatttatggatactaaaattgaatttcatataatgtaaatatcatgaaatagtaaacatttgaattttttttttctcttaaccattcttacctcatgggccattaaaaaaggaattcgatatcaagcttatcgataccgtcgacctcgag

SEQ ID NO: 1084 - DNA, 1546 bp, Homo sapiens
cgtaaaataaactgatatttctgcagctctacgctgtattcagcgctaagagcaggtagtcaaactgtaaagcaaaccaggtgtcatgactctgccttcctggttttcctgctacctctctgactgccccttaagaggtcctctctctcctcctgtcctctcatttttagtttccctcaaaggcttagtcatgggcctcagaccttctaaatatgctcctggcttcaattatcacctctatgcagctgaatccaagtctatacagctagtcctaaattgcacctgatttccaactgtctattaaggcttcctctcttaagtgggaaggtcatatcctatggctcccaaccccatatattcaaattaaatgcacaatctttctgctcctcatgctccacaaaccacttccctttctaagtgctcaatttctatcagctattaaatttatatcaaatatccctattatttctttatcaccttggcctgaaacctcagtattccctttaccactacgcctcttgtagttttcttaataatgtccaatgtcctccaaaatgtcacttggattcacctttcctcctccttttcctcacttcattcctgtgattgttttctcgctgtatttattttctcctccatttgattcattttcactcaccatcagacccatttttctaaaatcgttttcatcaaatcaatctctctgcacaactcaagaaggctcaattgaatcactactgattgcagcctcaaggctaaactgttgtgacagactctcaaagccatccataatgtgccccctctcctctccccagttatctaaatttatctccccttcattccaaatcagtggttctcaattttgctgccgagggacatttggcagtatctggagacatttttaattgtcatgacttggagtaggggggagtacaaccacatctagtgggtgaaggccagggattctgctaaacatcctacagtgccaggacagcccccaacaacaaagaattagccagcccaaaatagcaagagtgccaaggccgagaatctgctccaaatcaaggctctctgtccccagaccatgctatatctatacctctgctcagaatatttccctagcaacttagaatgtcgtctctcttccccttaactatcaatgttttatttatcttcaaatcccattctaagtctatagcccatggctttaaataccatccagtggtgacgcctccaaaatgtttatcttatcttctgagttccttacccagctgcctactagacatctcctgagtgtactatttaacatatctgaacctgaattcctgactcccccaaaactccttttcctcaaataggtatacagccccagcaatcacccagttgctcaggaaaacaggtgggagttattctggatgctctcctcaacgttctctgctccagtgtcttgccacaaatcaatccattagcaagttctgtcaagagtctacctccagacacatcttaaatccaggaattcgatatcaagcttatcgataccgtcgac

SEQ ID NO: 1085 - DNA, 1392 bp, Homo sapiens
ggcacgagggacggtggcgttaagggaacgctgaggtcccgcgctccccgaccgaggtatatctccatgaataacctaaatgatcccccaaattggaatatccggcctaattccagggcggatggtggtgatggaagcaggtggaattatgccctgttggttccaatgctgggattggctgcttttcgttggatttggtctagggagtcccagaaagaagtagaaaaagagagagaagcctaccgtcggagaactgctgcttttcaacaggatctggaagccaagtaccacgccatgatctcagaaaatcggcgtgctgtcgctcagttgtccttggaactcgaaaaggaacaaaacagaactgctagttaccgagaagcccttatctctcagggacgcaakttggtagaagaaaagaagcttctggaacaggaacgggcccaggtgatgcaagaaaaaagacaggtgcagcctttgagaagtgcgtatttgagctgcctgcaaagggaagaaaactggcaaaggagagccaggcttttgctgaaagaatttgaagctgttctcacagaaagacagaatatctactgcagtctgtttcttcctcgcagcaagcggctggagatagagaagagcttactggtgcgagcgtccgtcgaccccgtcgccgctgacctagagatggcagccggtctcaccgacatatttcagcatgatacatactgtggtgatgtctggaacaccaacaaacgccagaatggcagactcatgtggctctatctcaaatactgggaactcgttgtcgaactgaagaagtttaagagagtagaggaagccatactagaaaagtaagacaagagtgaaatcaaactgcttttagtgactcgaggccaggcagtcatgcgccttctgggtctccggcgtcttccgttcccgtgctgcccgtgtcatggccacaccgtcacccttcagcagcgacctccactcccgccaccgtctgagcagaagtgcaccgaagcctcagagacagagggtctcctcccgatgctctgccgctgttggggatatggtttcttgaagcatttttaggctgccagtattgtattaagcagaacagtataacctcgtattttagctccagggtaaaaatggttttttaaaaagtcaaatacaatactggtccttascacaagtaattttctgtctgtttcatcactccctaaatactttctcctcaaattatttttctctgtcaccagattacattaagaatttgtcagataatgtgtagaactgcataacaggtaatagaaagtagtaatattatattatcaagggtttatattttaaagatctctctcactccataaaggggaaataccaagtgtttcttgt

SEQ ID NO: 1086 - DNA, 1250 bp, Homo sapiens
cagtggcgagatctcagctcactgcaagctccgcctcccgggttcacgccattctcctgcctcagcctcccgagtagctgggagccagcgcgcccagcctaaaaaacttttcaagtcaatattactacgatttaacattagagtgtggacatgtgatttaatcgctatagctaaaatacgtcaaatatacgttgtcatgtgcttgaacatgatgctaaccctgacaggatgaaggaaagtaatattctttcagtgtagttcaggagagcatttgttttcttttctaccaattaacccatcattgcttttaaacaaccatctgaaggagcagagaggcagggtagaagacagaagggggatctatgtggtaactaaagaatgtttctgttttgttaattattgtgtgtgtgtggttttattgtttgcttaagagaatcaaaaactgaaaaaaatgagaatacaggaaatggctcttgtttatttttttgctgtgtttacagcttgttaatgctctactgtctttgtttcaagagagatttgttcactgcccagctcgttttgtgtcctgagccctatgcccagcccaccttataaatcatgcctgtttagatgtttgattttgttctgtttgctattgttatcttaaaggtgtataactctgacatgccagacatcaaattaagctcaaattaagctctcgtttaaatgtttaaacacctaatttatattctaattgatcccagccactgatgcatgtactttagctacttctgctaaataagcatattaattttccacatcaggccatcagatcttgagaaccaacagttatctagaattccgtgtctactaatgtttcacctgcatgcagccttcattaattttgtagcaaaatataaagtgatcattatgtagtttctggattaaaaaaatttgtgtgtgaagttgctttgtaaagtgcatgtggaattaatgggacagtgtgccctttgtgttagatgttagagcaaaagaaagggcttatagtgttagtattggagcactttgaagatagatattttcagaaaagatgtaggatttaaaagttaaattttaaattttagaaaaagatatgatggcaattggaaatagtcacaatgaagttcttcatccagtaggtgtttaacagtgttattttgccactggtaatgtgtaaactgtgagtgatttacaataaatgattatgaattcaaaaaaaaaaaaaaaaaaaa

SEQ ID NO: 1087 - DNA, 2107 bp, Homo sapiens
ggcacgaggagttccaactttgactccatctatatctgccccagtaccttcgcctgtgcacagcttgccactggcgctgcctgccgcctggtggaggctgtgctctcaggagaggttctgaatggtgctgctgtggtgcgtcccccaggacaccacgcagagcaggatgcagcttgcggtttttgctttttcaactctgtggctgtggctgctcgccatgcccagactatcagtgggcatgccctacggatcctgattgtggattgggatgtccaccacggtaatggaactcagcacatgtttgaggatgaccccagtttaacccaaactggtgctggtctcaactggctttgatgctgcacggggggatccgcttgggggctgccaggtgtcacctgaaggttatgcccacctcacccacctgctgatgggccttgccagtggccgcattatccttatcctagagggtggctataacctgacatccatctcagaatccatggctgcctgcactcgctccctccttggagaacccaccaccctgctgacctgccacggccccactatcaggggccctggcctcaatcactgagaccatccaagtccatcgcagatactggcgcagcttacgggtcatgaaggtagaagacagagaaggaccctccagttctaagttggtcaccaagaaggcaccccaaccagccaaacctaggttagctgagcggatgaccacacgagaaaagaagttctggaagcaggcatggggaaagtcacctcggcatcatttggggaagagtccactccaggccagactaactcagagacagctgtggtggccctcactcaggaccagccctcagaagcagccacagggggagccactctgggccaaaccacctcagaggaggctgtcgggggagccactccggaccagaccacctcagaggagactgtgggaggagccattctggaccagaccacctcagaggatgctgttgggggagccacgctgggccagactacctcagaggaggctgtaggaggagctacactggcccagaccacctcggaggcagccatggagggagccacactggaccagactacgtcagaggaggctccagggggcaccgagctgatccaaactcctctagcctcgagcacagaccaccagacccccccaacctcacctgtgcagggaactacaccccagatatctcccagtacactgattgggagtctcaggaccttggagctaggcagcgaatctcagggggcctcagaatctcaggcccccaggagaggagaacctactaggagaggcagctggaggtcaggacatggctgattcgatgctgatgcagggatctaggggcctcactgatcaggccatattttatgctgtgacaccactgccctggtgtccccatttggtggcagtatgccccatacctgcagcaggcctagacgtgacccaaccttgtggggactgtggaacaatccaagagaattgggtgtgtctctcttgctatcaggtctactgtggtcgttacatcaatggccacatgctccaacaccatggaaattctggacacccgctggtcctcagctacatcgacctgtcagcctggtgttactactgtcaggcctatgtccaccaccaggctctcctagatgtgaagaacatcgcccaccagaacaagtttggggaggatatgccccacccacactaagccccagaatacggtccctcttcaccttctgaggcccacgatagaccagctgtagctcattccagcctgtaccttggatgaggggtagcctcccactgcatcccatcctgaatatcctttgcaactccccaagagtgcttatttaagtgttaatacttttaagagaactgcgacgattaattgtggatctccccctgcccattgcctgcttgaggggcaccactactccagcccagaaggaaaggggggcagctcagtggccccaagagggagctgatatcatgaggataacattggcgggaggggagttaactggcaggcatggcaaggttgcatatgtaataaagtacaagctgttaaaaaaaaaaaaaaaa

SEQ ID NO: 1088 - DNA, 1174 bp, Homo sapiens
ggtctggcaaccagtgacgatacagaggtgtcttatgatttcgtttgcgttttcctggttaaacatgaggtggttattgcttgtgtttaatcagatacgctttactgtcataagcctaatttgcatttattatctcttcgctattattttgtacaggatcttttggattcatgttcttgcgtgattgatttctcaggaactttctgagtttggttttggtgtgccagctccacagaatgagctagggagagctttctctgtttctatacctgaatgcttggtgtaatattttaaattaggtatatgattgattttgagtataaaaccagccttgtatgtcagggataaatcccatgatgtatactctttttgttgtgttgttgaatttggtttgctaatattttattgaggagttttgcatcaattttcattagagaagtgggcctttagttttttgtttgtttctgttttgtttgtttttgtatttgttttttggaactgaatgaagtgcactgtgttctctcaaaggagatttgcgttgctttctaggggtttgggtgcacaaatccacagcttccggccttttaagccacttgtcaaggtcactctgactgcagggccagcagcctgggaccagtacagaccatcacggcacaggcttcctgggctagtcggagaaggtgaagctcgcatagtggccagggacttggcctttctgccctcacctccctgaggccacacaaatcctcagcctgtgtggctggaggtgccgccatccacagctcacctcagtttcaatatcttgtcctcattttcttttccctttttacaaaatgaagcacatatttcttctggcttttgtggcgtttctctgtgggagaggccatctgaatacctaaccagtgtgttacccagataatgaaagttagcattcactttttaaatagcagtaccctcaaaaaaaattgaaaaagtcctatgtagtaatgatgctaatgaagaattgaaagtgtttattaggtaaataatatggtcttgcacattgtttatgtggtaaagactgatttttgtagtcttgtaaaagacattttctgttcatttacttttttcattataagatatgtataaaataaaacttgccattttaaccattaaaaaaaaaaaaaaaaaaaaa

SEQ ID NO: 1089 - DNA, 2029 bp, Homo sapiens
gaattcctcccatggagacagaatggctttcttcaaagtcagttaccattttctgattgctctgctcacttacaattggacacagccaactctaagtgcctctgtcaatagctaaaacttcctgtcacctgagacaacagacatggtcatccagacagcaacataaagttcctccacagctcttgatgctgagaaacagagagccatgctgacttccttcttcttttcctatattgctctctttcttgccttagggttttaaattatcttagaaatcaccacttactgcttacatagatcagtacctttcaaacatccagccctccaaaggaaaggcttttgatagctaaagattaatgactgtatattccagattttcaccctaataggtgctcaataaaaattacttaaacttcatcaagggtttatcttgtgttattctttaatggcaagtgcattgcatgtactggtgaaaatgtttaaaatattttttcaaaaggaatcagtattcaattttacattaggttggatggcagtcacattacaatatgacaatattaattctaactcttctatgctagacaaagacaaggtttcattttcttacttaatgcactgacattttggtcaatgcccattttaagtgatgacaagaatgcttcttaaatggtatactgcttgcttactattggctcaaatataaactcaatcttctttaggatgaccacttaactacaatatcatcaaaacactgcaagtaaataaatgtacgttcctcatcacaactcctgaaggaaatttcttactgatcatccttaacgtaaggattcaaagatacaaagaaaacttaagaaattgaaagttctatcctaaaactatcacctgtaagggctggttaaatatatatatatgttaattatagagcactgccacataccacaataaacttaagtagaatacaattatcttaggacagtgcctacttggggaatcttttagtttaatctaacaaacacttattgagcacacattaaataccaggtacactgttactcattggaaatatgaaagatacggtctttcccccactgagaaactcagaccaatataaatggctgttgtcttgggaacgtaacaccagatgacatgctttgaatatgaatgtaaggaaaacaaatctacttttttcttataaaaaaaagtcccattttaaatttcctataactgctatataacaacaaaaaaagaaaaagccatcataggtatggcactctcctatgtwcctcagaaaaatcacgtccaccctacgctttgccttcagaatcaggactgaagcatcaccattcagtcagagcttaaactaattgcaattaaagttgttttaaggagaaaaaaaaaagcctaagttaaatgaccaaacccaaatttagaaagataatgacagcaaacatcacatgaagctaattctcatttttcattaccatacaattaaagttacaatttattcctccctaagagtcaaaaaaagagttccctgcatgtactgctctagcatattctacatgtagaatcttttttctacaaattatatatttctcttcttacaatattatatatttcaagaacttaaaaagaagatgtcagcttcatattaaagaccagtcttgaataccagacaaaattatccttctcttttcccctcatttttctctttctaaccataggggcattccatagttcctttgcctctagcacacaactaagaaattctgaaagaatattgaactcaactaaaccaatttaataaacacataaaagatatttaataaatatgtaaaggtagtacactttttatctgctatttaaaattttgttttggtttggggagaggggtcaaagaggaaggaagataaactgaaagtgttatagagaggagggaaatttgaagacaccatattagaaacatgatcctatcagaatgacacagcggaattcgatatcaagcttatcgataccrtcgacctcgaag

SEQ ID NO: 1090 - DNA, 1035 bp, Homo sapiens
aattcggcacgagctatattcttcttgatttctagccttttattggctctcagattgccagagttgggactcaatagtaagtaaccattttkttgaggtggtagtgattctaccagggtgagtwatcatgacagcagaatcactgcgtttttytctctactctgtggcatagactctatgccatagagtgacgtgtgaaaggcttgaggctccctacctacgagacaccctggtccattctagcagtatggcacgtgctgactgggttttgagtctcttgctgtataatcacattactgcacttccctgcattttctcatccaaaaatggggattacctgctttgtggatcggtttgcagatgaaataacacacgcagggtatctagcacggtcccccacatggcacattcagtgttagccacacttccatactaactgccctgcggggatatttaatgagctcttaaatggcagaaatgttgtgtcttttcctgttcccttagtattcctatttttgttggtaatttttcttatgaaccatgcagttgtctagttcaggccattttagtatgcagttttatctttgcttccaacatgatttaatgttcccaaattggatttcacataatcctagtgtcctttgagacttgaattggttctaggccaaaaaagggtgagggggaaggaagaaattcagagtcaaatttggcaaataatatatccctgtcgttttgttttttctttttaagacttgggccgggtgtggtggctcacgcgtttaatcccagcactttgggaggctgaggcgggcagatcacctgaggtcaggagctcgagaccagcctggccaacatggtgaaaaatacaaaaattatccaggcatggtggcccacgcctgtggtcccagctactcgggaggctgagacaggagaatctcttgaacccgggtgagccgagatcgcgccactgcactccactctggtcgacagagctagattccatctcaaaaaaaaaaaaaaaaaaaaaaactcgag

SEQ ID NO: 1091 - DNA, 458 bp, Homo sapiens
ggcacgagcacctgtagatccagctactcaagaagctgagttgggattgcttgagatcgagaggtcgaggctgcagagagctatgatggtgtactgcgctccagcctgggtgacagtgagatcatctcttgctctcaaaaaaagaaaatttactactaatatttttgtggttctaaattttccaaaaactagaattatagtctacattctgcttgtaatttgcatcttttaaatttagaaatataagatgaatttcacttttattatattttctttgcatccacttcattatttaaaatttatcattgcttaaaacaattacatcagtagtaatgtttattataaaaatttgattcacctctttatgtggcaagtttctgaaatcacatatggggcaagagtatcgtgtccctctttggaaaatgccatctgccatagcttccttgagtgcagggatt

SEQ ID NO: 1092 - DNA, 1610 bp, Homo sapiens
tgcaggaattcggcacgaggcaagatctctgtctgttaatctgcctcatgaaaatgacgaaccaggagaatctatgggacagtaggaaaagctgccagtcactcagatgataataacatttaccttatacatttataatggaaatcctgccactgtttacaccagaaacagtttctttttttttttttaattttattattattatacttaaagttttagggtacatgtgcacaacgtgcaggtttgttacatacgtatacatgtgccatgttggtgtgctgcacccattaagtcatcatttatcattaggtatatctcctaatgctatccctcccccctccccccgccccacaacagtccccgatgtgtgatgttcccccgcttcctgtgtccatgtgttctcattgttcaattcccacctatgagtgagaacatgcggtgttttgttttttgtccttgtgatagtttgctgagaatgatggtttccagtttcatccatgtccctataaaggacatgaactcatcattttttatggctgcatagtattccatggtgtatatgtgccacattttcttaatccagtctacaccagaaacagtttctattgagaaaatggattttaatagaaaattctcatttaaaatttgggcagatatctgtattgttgagttaaccaaatgagaagagaaaaatccttacaacgtagcttgtcatttgcctgacttgatgcagactgctttgcttagtaatcatgcagcactatcaagactgtgtacataatgtcaggatccatctacataagatgtagtatggactgatgccaagtgagcctggggtggaaatcagaactggatgcaaatcctgatgttatccgagaacaggcacctgttacataggctgtgttactgtggcaaaggtaatggtaaaacacagactggccagaagcattgtgtacaatgagaccttgcaactttgtgtatattagtatgtggggggatgtgaattattaaagacatttaaaactgactgaatcagcaacctctaatctataaaaaaaaattccagacgtccagccgggcacgttctcgtgcctataatcttagtgctttgggaagctgaggcaggaggatcacttgaggccaggagtttgagaccagcttgggcaacatagtgagacccctgtctctacaataaaagtaaacaacttagctgggcataatggcatgtgcctgtagtcccagctactcaagaggtggagatgggaggatcacttgagcccaggagtttgaggctgcagtcagccgtgactgcaccaccatactccagcctgggtgacagagcgagatcttgtcttaaaacaaaacaaaacaaaacccagacttcctataattcctaaaaataaatgtgggtttgagaggcctaccttgaaatgtacaagatcctggccagacttcacctatctaacaatatgctagtaactatttgttgacatgtcttaaagaaatgttcatcagggcctcagaaagcaaggcagagaacaggtccctgaaatttactagcttgcaccaaaccatcagataaagataggttaatatttgacagaaaaaac

SEQ ID NO: 1093 - DNA, 1085 bp, Homo sapiens
  SITE (506): n equals a,t,g, or c
gatgggtgccccaaatgcttggtccaccatcatcgtgcctggcatgaaggatgctgtgatccacgcacttcagacctcccaggacaccgtgcaatgtcggaaggccagctttgagctctatggcgctgacttcgtgttcggggaggacttccagccctggctgattgagatcaacgccagccccacgatggcaccctccacagcagtcactgcccggctctgtgctggcgtgcaagctgacaccctgcgcgtggtcattgaccggaggctggaccgcaactgtgacacaggagcctttgagctcatctataagcagcctgctgtggaggtgcctcaatatgtgggcatccggctcctggtagagggcttcaccatcaagaagcccatggcgatgtgtcatcggcggatgggggtccgcccagcagtccctctgctgacccagcgaggctctggggaagccgaggatcaggaagtttaaggaagttgcccaaggttgcacagctcanaagggcacagctgggatgcagacccagcccgtcaccacttccccagcctccacaccaaggcccagctgccttctccccatgtactccgacaccaagggccaggtcctcagacgacagcacagcaagctggtgggcactaaggccctgtcgaccacaggcaaggccttgaggactctacccacggctaaggtcttcatttccctcccaccgaaccttgatttcaaggtggcacccagcatcctgaagccaagaaaggctcctgctctcctgtgcctccgaggcccccagctggaagtgccttgttgcctctgccctttgaagtcggaacaattcctagcacctgtcggaaggtcaaggccaaaggcaaattcaaggccagactgtgacaaacccagggctgaggcctgccccatgaagaggctgagccccctgaaacccctgccccttgttggtacattccagaggcgcaggggcctgggggatatgaagctagggaagcccctgcttcgattccccactgcccttgtcctggatccaacaccaaataaaaagaaacaagtgaaaaaaaaaaaaaaaaaa

SEQ ID NO: 1094 - DNA, 910 bp, Homo sapiens
ggcacgagagcatgtgtgtcaaggaccttgctgggtcaacaattcatttgcctttgtctggagtctgccagcagcagtagctaatgtctaaaagacaacaggggccaggagagaaaagggaggaaagaactaagtctctcctagtctatggcatgctatcatggggtcaagtaggggcagggaggcttcatggggcctacctttgggatgacattaccccagtgggcattgtttgggtggttttcttttaaactatttacactgatatgacagactcaaactcatatttgctattctccgagcacatggaaaggtaactcactctgtacattcagatatcaaactatgcactgtgagggctacgagaagcgcaaacagtaaacgcttggcaggagggaacacttcctctctctgaggaagaggctggaagctggtcttccccctccaagaatacacgggtgcactgagtctttatgcaaaggcaacactgagccatggccaagggcatctctgcggggaccctgggaaaggagcctgcttccaggtgttccccaaagagatggaaaacaagacagtcatttggaacagtgatgcataataaaatgtatgtggccaccttacaatactgctaagttgctaaaatatataaagttaatatttgagttctatttttataaaatagttctagatttatggcaatataaacgtgtatagccttttgattttaatttctagttttgtgctttgaagaaatatatgtaagattaaagaactgtatattgtaagcattatattcaaattatttaaaaattgttctaagtctatattcaataaaaagtaatgccaagaaaaaaaaaaaaaaaaaaaaaaaaaaaaaaaaaaaaaaaaaaaaaaaaaaaaaaaaaaaaaa

SEQ ID NO: 1095 - DNA, 1654 bp, Homo sapiens
  SITE (450): n equals a,t,g, or c
cccccgggctgcaggaattcggcacgagcctctttgaagtttctagatgcaccacttcctgctcacagcctggaattcggttaacaagtcagtgtcaacctacctttcccttcatgatttatagacttttgggagtaccttctggtagcttttgtcttcccataggaaagaggcccaatcccagtttgtcctcacaaagcggccagctccgtgatatctcttttgcgggcagagttaagattgtacacagatccccacaagtaccacgatttttgcctcaggaaggataaagcacatgtttgtttctgctttcgttttcttttttctttttttcacgaagccttatggagaagtatgtttctgctttctttcctgaggaagcctagcttctgggccacgggactgatcctgtctacatcctctttccctccattctccatcgtgtctctncccccgtctcaccccaccccgtgcccctctctgcctcagcttcccctcttcccctgcagtgagtttcctgcgcagcggcactaagctcatcttccgccggaggcctaggcagaaggaagctggcctgagccaatcacacgatgacctctccaacgcaacggccacgcccagtgtccgaaagaaggccggcagcttttctcgccgccttatcaagcgcttttccttcaaatccaaacccaaggccaatggtaaccccagcccccagctctgaggacccagctctgaaagggcacgagttctctcagcccattccccacctccccttccataccccttcctggatctccagtgcctgggccaggaaagccctctgggttccgggaagccccgtccaccctgggccatggggccggttggaaggatacttggaacgggaagcacatgagaggtgggcacccggtgccgaggacatggacgagggactggtggctgggagggagaggagggccctgtccggcatgtgtgggtattccccagaagcatttgcctcctgctgagcctggtccctgagcggagtcccagggtgctcagctcttcagctgacccttcttcccttatttattctcttttctatttatatgtgtggcttaggaccctccgtgaacagatgatagagggcatctctcccaggtgacccttcttttctgtcccaggagggtgggtaattccctttgggatggggctcccacacctccctcaggtccccactcagaccagcaccagtgtctgcctctgagaatgttggcagctcacagagagcagggccggcccgggatggggggcaggtactccccaccttcctgcctcccctcctgctcctcatccctccctccccctttattaccgttttttgtacttgatgccttctctgtgagcagtggctctgtgggaaggagggagccgggagcctggtgggaagccttccccagagagatggctttaggggctttatttaaagactgtgatgatggagccacgcaaggctgcacctctgtgtgttgggagacgatgatgatgtccattgctgtgtgatggcttggaatttaatttattaaagtcaaattggagtttaaaaaaaaaaaaaaaaaaaaaaaaaaaaactcgagggggggcccggtacccaattcgccctatagtgagtcgt

SEQ ID NO: 1096 - DNA, 1193 bp, Homo sapiens
aacaggtctttcctgttttctggacctgctagaaagcttcagtcagtttggtccctgggagagaaaacgctcttcccatgacggctctgtggaggccaggaatggggtaggtgggttgactgggagtactccttcctgccgccctggtcaagggactagtgtgagtcgggagtgcatttttggaatgggggcaggggtgtttttcatgaccatttatttgagtggttttgatggttatgcatactctttaaatttgaatccaaattttttgcaaaattacttcccaatcagatcttgacccttagcctgggacaccacaaactgaggtgaattcyckgctttgctcgtcacaaatgccaaactgactgccctttcacggtgtccatcttgctgtcttttgcttctgtttgatttggtctgcatatcttttaatgtgtctgtttttgttttgtttgttttatttttatttttcagttaacgcacgcacagacttacatgtcaagagtggactttagactttcatgtgttaagttgcttgagttacaccttgtgacccttctcccataacatggtgtgaggacggactgggagccggtacagactccagtgtttacagccttgctttcctcccaccgaccctggccccaggctgccccgggcctggcgggccacccctctctatgcaaacacgtaaaagccatgaatgctggaatccaaaactgacgaggtttatttttttcagagccagtggctggtcttccatttacagtgtcactattccctgacggagctgttatgtgccgctctagcgaaggccccagccgggatgctaggcctaattgttcagcgtggagatggcaactcacgtggtgccctaggtgcagctgcgtggtctggtatacatgctgcaaaattcacccagttcccctcattttaatttttctaacctacagcttaattttaataactttaaaacacttctaaatatttattttggcaccagcgtcaagacaaataatatcctctcccattattttcataagtaacacagattccctgatttttaaaaactaaaaatacagctaaacctttcttatgtataaagtatgcctatcatatacagggagaggtgggtaataaacttcctgtaatgacaaaaaaaaaaaaaaaaaaaaaaaaaaaaaaaaaaaaaa

SEQ ID NO: 1097 - DNA, 983 bp, Homo sapiens
ggcagagaaggaccccaagttaaatctcccaagttaaggctgagagctccagctctcttccgaaaagctggagctgccaacccttcccttgggacctgccgattatgcagttttcttctgatactagctttggtttctgaggtattctgccctctccctcccctcttctcccaaaacatctgcctctcctcagtccccgtctgggtggtgggtgcacaataccaagtgcctgaaaagcctgagagagagggtctggggtagggtggggaccactggacaccccaagtgcaaactgctgctttctgacccttgcttgcttatgtactcccttttcaactgtgttgaattttaatgacgtttttagtggtgtagaaatgcaagtattttggcttaacagcatgaagtctgggttgcacattgtatcagaggtgctgtaatctttccagtatctctgatatacggctttctggttgaatgtcaccctgggccctcttgactggataaacaaccatgagggctcttctctgtggagctgccgagagcttggtggtagaaagcgatgtttctaaacaactgcagcggctctttcctgtctgaactgcatcgtgtgtctgactgccttgctgtccatacatacagactccttcccaggcccggctctgtgcagaacttccatgttttaccacatttttctctcctgaactccctttgtcagccccagggtgttgaggctgggtcctctctagcaatctctaccttcagaagagacttttctaaatattttgcttttccagttcttgttgcttttgtcattgtgaagagtcacccaggatgctggcgcttggtaccctaagatcagaagtggtgtgtgtgtgagctgtgagacatgcacaccctttcagagtgatactgtgtggtggaaggactgttagaactcaaagaatagttaataaatccagtgtattaaaaaaaaaaaaaaaaaa

SEQ ID NO: 1098 - DNA, 847 bp, Homo sapiens
ggccgagcgccaatgaccaatttctgactaaccagccaccttttctctctcttagctccacgtcagcactgagaccagactcgagcacccctgtcctgtaagcgagacaaaatggcgtgtgttattttggggttttgtgttttttggtgggtttctttccttggctctccagatttacttttggggcctgttctaagtgcaaacccagcaagtttcacttgtcctgcccattagatacaactacatcttgcgggggttgtttctttcttgttccacaatgaaattgcacatccatctccaccccagctgatagcctgttaataagcactggtctaacacagccaaccctccttccacagcgccatattaatggaggaggggaggaaggtgaaatctactgcatgggattcaggaaacagttgtggttggtcaggacggaagttggggtaagtttggttggtcagagggagttgtgctggagattgtgaaaaatgggttcttgaatgatctactataaggcagggaaggttcatttgtaagtagtaatgtgaactgaattgcattaagagtgtgtggcctttgttgtgatatactatgtattttcttatatgcatgagccaaactgttgcatcataatttagcactgatgtctgcttttattttgatcatctttgtccacccttattagttcttggctgttaaccgtagatagatcttgtaaatcccacaacctttggttgctgcattccccttggttcgattccacgcaaggagccacaagtgagaactccactgtccttagaagaaagggcatttttacttttgaaccaaaaaaaaaaaaaaaaaa

SEQ ID NO: 1099 - DNA, 282 bp, Homo sapiens
ggcacgagacagaatgctgttgccaaaacctgcacagccctgaggccagcctcggccttggtaacgggggaaagtagctgacagtgagacggggctcctggcccacgtgtggggcacgggcatcctggatggttggggaggcgccgacaggcacttcacgtattacaattggggatgtgggtgagggagggaatctggttttgttacttggcagtggttttttctcacccttcctttttaacaataaaatcccatttgggtcttgaaaaaaaaaaaaaaaaa

SEQ ID NO: 1100 - DNA, 2707 bp, Homo sapiens
  SITE (938): n equals a,t,g, or c
gaattcggcacgagcggcacgagctccaattcaaacaaggagaacatggcaaccttgtttacaatttggtgtactctgtgtgaccgcgcctatccctcggactgtcccgaacatggaccagtgacttttgttcctgacactccaatagagagcagagcaaggctttctctcccaaagcagcttgttctccgtcagtcaattgtgggagcagaagttggtgtatggactggagaaaccattcctgtgcggacttgctttggacctctaattggccagcagagtcactccatggaagtagcagaatggacagacaaggcagttaaccatatctggaagatataccacaatggtgtcctagaattctgcatcattacaactgatgaaaatgaatgtaattggatgatgtttgtgcgcaaagccaggaaccgggaagagcagaatttggtggcttatcctcatgatggaaaaatctttttctgcacctcacaagatatccctcctgaaaatgaactgcttttttattatagccgagattatgctcaacagattggtgttcctgaacacccagatgtgcatctctgtaactgtggcaaggagtgcaattcttacacagagttcaaagcccatctgaccagccacatccataaccatcttcctacccagggacatagcggcagccatgggccaagtcacagcaaagaaaggaagtggaagtgctcaatgtgcccccaagcttttatctctccttccaaacttcatgtccactttatgggtcacatgggtatgaagccccacaagtgtgatttctgtagcaaggcttttagtgatcccagcaacctgcggacccacctcaagatacatacaggtcagaagaactacaggtgtaccttgtgtgacaagtctttcacccagaaggctcacctggagtcccacatggntatccacactggggagaagaatcttaagtgtgattactgtgacaagttgtttatgcggaggcaggacctcaagcagcacgtgctcatccacactcaagaacgccagatcaagtgtcccaagtgtgataagctgttcttgagaacaaatcacttaaagaagcatctcaattctcatgaaggaaaacgggattatgtctgtgaaaaatgtacaaaggcttatctaaccaaataccatctcacccgccacctgaaaacctgcaaagggcccacctccagttcgtcagcaccagaggaggaagaagaggatgactcagaagaggaagatctagcagactctgtggggacagaagactgtaggattaacagtgctgtgtattcagcggatgagtctctttctgcacataaataaaaggaaaagaaacaagcaattttggatgaaaatgcaaatggaaaaatacacataaccagttatctactataatggtttttatataaaatggttcctgatttattttcagccagtaatcaaaacagactgggaatgaataaagcacttacagaagagtatcctaatgaaaacactttaaaacagattgggaaaactgagcatgtgtcctrttttaagtggtggactgggagggaagtgtcaacttctgaggtctttatttacatgataatctgggagatgcatttatgcctgaatcaaagctgccttctgctcaaacaaatcagatttatttcacattcttccattattccattttcctgctggtcctgtgacttggtaacattctaaacggtccttgccccatagccatcctgattgctgatagtgttttatgcagactcttgtgacttatactcaccacagaatggattgggacacagcagcataagtgtgctacttggcagctagtaagtttaaagcaggacctgccttaactgctcctggccacttggaagtttagggtagatcttgttttccaaagtttcggcaggtgcctggagggcaaataaaaaagcagcagtcagtcagtagtcagtgatggagagaacaagaggagagatgcctggcctctgcccaagaaattagctttgatggaagcctgagcaagtcacctggttattgtaacgtggagatctttgtaggtttagacatggctccctgtctccagtaaacatccagccattcagacaaagggggcctggagatacagagagcccaaataatgcctgctggattgtctcctgatgagtacatgtggactcacctgaggaagggaaggaagggaataatcttttatgtttcatttaccttatgaaaagtgttaaaacattgccaactcaaaataacattatttaatgcatgtgcaaagttaggtcttcccagttgtctcagtgctgaggaacctcatcagagaagcatggaagatgccaaaggatttttggaaggtaaagaaggctgaatagtgaccacatgggcctgttttcagggtcccagcttagttaagtcacccatgcacctggtcattgtgtctcccgtgcacatccagcgtttctcagaagcagacccacccttaagttgacaggattgatggaacatgctctcctgctcaaggcacaacctctgggctggagtagaggactctggtgggaaggttttgctgctaatgtatttatggaatgaatgtatttcattcaaatctgtattcctctaggaaggattaaaattaaacttttttaaaatamaaaaaaaaaaaaaaaaaaat

SEQ ID NO: 1101 - DNA, 429 bp, Homo sapiens
ggcacgagcacgggatcatccatggggtcacccatgacgtggagctgcaggagtctgtcatcactgtggtggccgcccgtgtcctccgccagacaccgccgctgttccaggcggggcgatccggggaccaggggctgacctccattcgtaccccactgcgctgtggcgtccacccgggcccaggcaccttcctcttcatgggctggagccgctttggggaggcccggctgggctgtgccccacgattccaggagttccgccgtgcctacgaggctgcccgtgctgcccacctccacccctgcgaggtggcgctgcactgaggggctgggtgctggggaggggctggtaggagggagggtgggcccactgctttggaggtgatgggactatcaataagaactctgttcacgcaaaaaaaaaaaaaaaaaa

SEQ ID NO: 1102 - DNA, 1721 bp, Homo sapiens
ggaccgagcagctggtagccctgatcgattgcttcctggatggttatgtttctcagcttaagtctgtggataaatccagtaatcgggaaagatatgacaatctggagatggaatacctacagaaaagatcagatctcttatctcctcttctttcactaggccagtacctgtgggctgcttctctagcagagaaatactgtgactttgatatattggtacaaatgtgtgagcagactgacaaccagagccgactccagcgctacatgacccagtttgctgatcagaatttttcagactttctcttccgttggtatctggagaaaggaaagcgaggcaaattattatctcagcccatttctcagcatggacagttggcaaattttttgcaagctcatgaacatctcagctggttacatgaaattaatagccaagaattagaaaaggctcatgcaacacttctgggtttgcaaatatggaaactcgttactttgcaaagaagaaaacccttcttggcttgagtaaattggctgcattagcttcagacttttcagaggatatgctacaagaaaaaattgaagaaatggctgagcaggagcgctttctactgcatcaggagaccctacctgaacagctgctggcggagaaacagctaaatctcagtgcgatgccagtattgactgcaccacaactcattggtctatatatctgtgaagaaaatagaagagctaatgaatatgatttcaagaaagctttggacttgttggaatatattgatgaggaagaagatataaatataaatgatctaaaactggaaatcctttgcaaagctcttcagagagataactggtccagttctgatggcaaagatgatccaattgaagtatctaaagacagtatatttgtgaagatcttacagaaacttttaaaagatggcattcagctcagtgagtacttaccggaggtgaaagacctgctacaagcggatcagcttggaagcttaaagtccaatccttacttcgagtttgttttgaaagcaaattatgaatattatgttcagggacaaatataactttttctaaaaatggccattgtttatgaaatctgtataagtgtgtccttatacaaattttaggccataaacaagtgtaagtttgtacaatttcataacatgtatagctgagtttttatactttatatgtaggaagctaatataaaatagttatgtaactgtgattttggttttcagttatgtgacttgttttttccacctgaaatgtgtcagttgttgttcctgtactcggtgccctttctttttactctcacgtggtcccaggttctggagttcttgtcctggttctagctgctcacatgtacaaatcacttctaggcctcagtttctgcgactatgaaaattactagattgcactagcttgtctctaaaattgctgtgactccagatactttgcactgaagagaatctagggtgtttgatatctgtttcagttagggctaatgggaaatgtctagtaagataaatgtcaacttttgctgacttattatgagatgaaaaaccaaaggagagtgggcctaactcatgtgagcttgataactgatgaactcattgggagcattttaaacttttctacataaataataaatgagcactaatgaaagtaaaaaaaaaaaaaaaaaaaaaaaaaaaaaaaaaaaaaaaaaaaaaa

SEQ ID NO: 1103 - DNA, 1287 bp, Homo sapiens
cgtgccgaattcggcacgagctaaagatttttagactgactgtgggttcactggaataaaaaggaagaaacaaagagcattgcaggcatcgggactgtcacatttgacaagatcaaagctgcaggaaaatggacagtgaggttcagagagatggaaggatcttggatttgattgatgatgcttggcgagaagacaagctgccttatgaggatgtcgcaataccactgaatgagcttcctgaacctgaacaagacaatggtggcaccacagaatctgtcaaagaacaagaaatgaagtggacagacttagccttacagtacctccatgagaatgttccccccattggaaactgacgcttggctcctttcttgtggatggattttctcaaagtacacagataaagcatggtttgtttcagtctccaaattcaaacctttgagtaataaatcagcactcaaaaatgtacacccatttagtttgtggtagcaaagtgcaatgcgaaattgaatgagaaactgagatttctcagtaatggtgaatatttcgctctttaaacctaaaactcttcattgagtagcttatatttgaacatgattggtttaacatttgcctctacctctgattttgctttgctgtcaaagtttaacaccttccaactacttatgtgtgtcctgtaacacaggtgattgaccgtatgagaggggaaaggcaaagaaaaaggaagccagacactaggggaattattaacttctcatacttccccacattgagaagcattcggagtgtatttagccctgtagatgttgtgatatgcaaatatcccattccctggttactggcattcctaagattcttcatggtattttcaaactttggataaatttacagattagaaagatatctgacagttaatctctgttctccttacaaattccttttgtgctgctggaaaggatctttggctaggtggatgactagttttattcaaagccttttctcaaagccctttcagttacaaccaccccactatggaatcagtatttagttatacatttgtataagaacctgtattttgaaaaacacattcatgtatatttattcctggcattatttgcctgttaaacagtgtctttcatgttctctccccagattgtaaactctgtaagaagctgcttgtatctgtatcccttgttgaaactctgaaaacactgaataactaaaatctcttctcatccttttaaaaaaaaaaaaaaaaaaaaaaaaaaaaaaaaaaaaaaaaaaaaactc

SEQ ID NO: 1104 - DNA, 1290 bp, Homo sapiens
  SITE (1279): n equals a,t,g, or c
  SITE (1284): n equals a,t,g, or c
  SITE (1286): n equals a,t,g, or c
ccaccgcggtggcggccgctctagaactagtggatcccccgggctgtttgaattcggcacgaggcctggtgcattccgaggctacatccaggctcatggaaggagtgtagtattcatttagccatgtctgccatgggtccagaaatgggaaagggaattgctgtccttgccctgtggtatgctgccacctctttgggaagcaggccttgcccctgtcccaccactcattctcagctttgaatgggaggcctttctatagtggaggcctttccttgaagcctatgaactgcaggcccccttttgccattgatctcaaagcacttgtcctcaggatagggaagagcagggggatgcaggaatagcagggatagcttgctcccagccccctccccaatttggttccgttgacataggaattttacgattcccaaaccatgcaggggctgagccttccttatgatgactttgttctccctcccactgggggaatcctccctatgccttaaaactgccgagccccactccatgtaataggattcctgggcttcctcaatgggggttcatgttcttggactgcgggccctcagtccttaactggaaagtgaccgtccactgccccatggagcccatctggacacagcacagccccaaaaccgttagcagctggctctgtttccaagcctggggaggggttcctcagtgcaggagttggggacaggctggggatccaagctgcttgagggggtcaaccttggaccaaagttgccttaagcctgtggtaaaagggcttcagggaaggtaagtgggccacctgctggaagctgccagctgcccggctggcaatggtgtgagtgtcttggccctgtccctgccctggggtccagcaggtcatccctcccttcttctctctcctttggcgtttgttcctgtagtcactgggctaatctccccctagcttcaagctgtacatagggcctcccagtgcaaatcctcctgcccataccgtgcacccttagaagcctgcgtgtgcatagagcgccccctacttcccagttaactcccagttcttctccctgagcttggtatttgtcatgtgccaactctgactctgaggtgggcagtgagggaagcagccccgggcctgcttgcttcctgtccccgaaatgttcgtttcttctgaagtaaatatacatatataaataaatgtataaatactgctttgtatctgaaaaaaaaaaaaaaaaaaaaaaactcgagggggggcccggtaacccaattngcccnanaagg

SEQ ID NO: 1105 - DNA, 1037 bp, Homo sapiens
aattcggcacgagaacaaactaaggcagaaatactaaaaatatctggttcaataacataggggcatggagtagacatgcagaaaatgcttgttcacttgccttgaaatggctccaggtggcctgaaggaatcaatgaaacttctcaagtatctacattacaaccactggtccccactacacatttatttctaaataaaggaggagaaactctagcaaagtaatatttaacattttcattgcttccaggataaatcttattgaatatggaggatctgatagtggtaggtctatcaggaatatcagggaaaatgcttttgatgttgttggcaaagtcaattcctatcatttgtacttgacaccagctacctagcaggctcattgtgaacttcaggtttcgcccacgttatttatataaagtatctcagtgtaatatagggagttgctggttatttgaaaatagtaacaaagataacccaaacgagaaactccatttccataattagctttcctgaaagtcaggcatgtctttgaggacaggttttggcagtattatttttgtgcacaggaggaaaattgttagtaggtttatagatgttatttttataatagaatgttaaacccctgaaaaacatcaaaaattgtctcctagaactaattctatgttttaaaaacttgttttaaaaaggattctaaatagcaatagggtctttcctcctttctccactccaatggtttaatgggatagaggaatcaatgtttatatttttaaacctgtaaatattttattttgggtattttgtatatttgttgatataattccattttgtgcatatgtaccattgtgcatgttgctgtttttgatagtcactcttttaatgaatgtaagaagcttgggctaatagcacttttcttgttccattcaaacatctgaaaatgaaattacaacactgccattttactgttgtgtttaattcagtcaataaattttgttgctcctttccatttaaaaaaaaaaaaaaaaaaaaaaaaaaaaaaa

SEQ ID NO: 1106 - DNA, 946 bp, Homo sapiens
ggagcttttaagtttggcctctcacactctcccacacctgctaaatccttataaatgtttcttctcttccctcaaacttccctcactgtcttatttgtttcttgccctgtggaaggcagtagggtacacattcttcttagtgtaaatatgccttggaatttgcacaagggcaggacaatgtgttcttttttccaacagctgttttgatgatgcttggcaacatgttggtatttttggcccgagtagcacatattgagaccacatcctcaaggaatactttttgatctctcccaagtctcttttctagactgaatggtttggattttccattgatgaaaaacattccccttttcttgcccacatgagagtttatctgcccgtttttctgatcatctctctcctcttgtttacagcacatgcaaaagtctcttgggctcttcctatagtttataacttttgttttagttttatattacctggaatagcttaggatcatctcagagggactctggcatagtccctcttggagatcagggatgccaggaggggcattaaggatggagagatcaggtgaatagtgaaggagtgatactggacaaattgtaaagctctaaagctccaccaggtggaggagggcacaggtgctgaaagacaagagaggtaagggaaagcctagaatcaagtcagaggcacagcaaacaaaagtaccccaagcaagccagttagaccaagagagaggctcattgtcctgtcttttctttcttatgggtgcgtggccctgaagcaggagattctgmtcttgaatgggaaagggttttcaagagactctttgaccagttctccatccatgagaatacatctcaattaccatggagacttccatcttaaaaatagccattgagtggaatcttagtgcaaaaaaaaaaaaaaaaaaaaaaaactcgag

SEQ ID NO: 1107 - DNA, 1636 bp, Homo sapiens
aattcggcacgaggtcactgggagaggcctatgccagagaaactgaggatgaggaggcggaggctgacagaacatccagaagaggctggaggctgcaagcggtggctgtgggcctcccggaccgtgaggatgcacagactggctctgtggctgctgggattatggggggtgatgtggtcccacacatcagcgctgctggcgctggtgaagctttggaaggggcgcttgggcaaggctgggactcgaaagaaaaggaagaggcagcagcaggagagcatgcaggtgggcaagaatttggtctggagggctcagcagaggaagaggtgactggcagaggcagccaagtagaggcttttgagtccagggagggaggaccttggggagggcgggtagaggccgaggaatctgcaggcgcagaggacagctgtgggctggatcccgcgggctcccagacagcgagggcagaggggatgggagccatggtggaggctggggggcttctagaaaagtggacgctgttggaagaagaggctgttggatggcaggagagagaacagagggaagacagtgaggggcggtgtggggactaccaccctgagggagaggcaccaaggctccttgatgcagagggtctcatggtgaccgggggccggagggcagaggccaaggagactgagccagaaagcctggaacatgtcaggggccaggaggagcagccaacacaccaggcccctgcagaagctgcgccggagtcagtcggggaagccgagacggctgaggccatgggcagtgccagaggaggtgctgccaacagctggagcgaggccccgctccccgggtccctcctagacgtctctgtcccaaggagtcgcgtgcacctctcgagaagctcctcacagcgtcgctcccggccctcttttcgtcggactccagcctgggagcagcaggaggagcccccagcccccaaccctcctgaggaggagctgtcagctcctgagcagagacccctccagctggaggaacccctggagccaagccctctgaggcatgatgggaccccggtgccagccaggagaaggcccctgggacacgggtttggcctcgcgcaccctggcatgatgcaggagctgcaagcccgtctgggccggcctaagccccagtgactgagacccggtgctctgggagccaggccctgagtgggtgccagaaggcttgctccaatgccactgagccctgctccctctgccactgtggacacatcctctccaccctctgggcctcagtgtcttgatgtatcattcatggagcaggcaaaaccagacgtctgggaagaccgtgaacttaaggagtctgattctccgacacaggctggtggaccacgtaccccactgagaccacctctcagggtgcctgccctggttcctccccagcctgagtcagctgtctggactgcaaggaggctgggcacggggctcacgcctgtcaccccagagctttgggaggccaaggtgggaggatcgcttgagaccaggagttcgagaccagcctgggcagcatagcaagatccccatcttttaaaaacaaaataaaacaataaagactgcaaaaaaaaaaaaaaaaaactcgagggggggcc

SEQ ID NO: 1108 - DNA, 409 bp, Homo sapiens
  SITE (388): n equals a,t,g, or c
  SITE (401): n equals a,t,g, or c
gacaattaagcagcatatcaaggttcatgtaagttacagttattaggtttaatatttagttttaatatttttcacccaacatcttgttgcatcttccagaataaatctggggtccataaaccaaaccaggagagggaaaatggaaagagtgggcagaaatctgacagctcttaggtttcttctatttgtgttaatactgagacttttaaaaatcatttttatatgtagtgtttattatgaatagttgtaatttgttctgataaattagttgtattaaacactgttatttggctaatattactaggtataataaaatgatatttagtgggaagacattcatcaaagtagaagtagttaatttgggccaggtgcatggctcacgcctgtnaatcccagccacnttgggagg

SEQ ID NO: 1109 - DNA, 1652 bp, Homo sapiens
aagcttggcacgaaggccacattagtggagggagcaaatctctgcttggaccttcgtcagtttggaattgtgacaattggagaggaaaagaaaatttgtactgtctctgagaatttcttgaggatgtgcgaatctactgagctgaacatgaccttccacttgtttattgtggcacttgctggagctggggcaaggaattctgacagaaacacaacaagggttaatggtagccagccctgctcagaccctcaatgacacgctggatgacatcatggcagtcagtggaagagcatctgcaatgtcaaacactcctacccacagtattgctgcatccatttcccaacctcagactccaactccaagtcctatcatctctccttcagccatgcttcctatctaccctgccattgatattgatgcacagactgagagtaatcatgacacggcgctaacacttgcctgtgctggtggccacgaggaactggtacaaacactgctagagagaggagctagtatagagcaccgagacaagaaaggttttactccactcatcttggctgccacagctggtcatgttggtgttgtggaaatattgctggacaatggtgcagacattgaagcccagtctgaaagaaccaaggacacaccactctccttggcttgttctgggggaagacaggaggtggtggagctattgttagctcgaggggcaaataaagagcacaggaatgtttctgattacacacctctaagtctggctgcttctggtggctatgtgaacatcatcaaaatattactaaatgcaggagctgagattaactctagaactggtagcaaattgggcatctctcctctgatgttagcagctatgaatgggcatacagctgctgttaagctcctgttagacatgggctctgacataaatgctcagatagaaaccaatcggaacactgcccttactttagcctgcttccaaggaagaactgaagtggttagtcttctgcttgatagaaaagcaaatgttgaacacagagctaagactggtctcacaccactaatggaagctgcctctggtggatatgcggaggtgggccgagttcttttggataaaggtgctgatgttaatgcccctccagttccctcctcaagagatacagctttaaccatagcagcagataaagggcattacaaattctgtgagcttcttattggcaggggagctcatattgatgtacgtaacaagaaggggaacactccattgtggctagcagcaaatggtggacacctcgatgtggttcagttactggtgcaagcaggtgcagatgtggatgcagcagataaccgcaagataactcctcttatggcagcatttagaaagggtcatgtgaaggtggtgcgctacttagtcaaagaagtcaatcagtttccatcagattctgaatgtatgagatacatagcaaccatcactgataaggagatgctgaagaagtgtcatctttgtatggagtcaatagtacaagccaaagatagacaggctgctgaagcaaacaaaaacgccagcattttgttagaggagttagacttggaaaagttaagggaagaaagtcggaggctggctttggctgcgaaaagagaaaaaaaaaaaaaaaaaa

SEQ ID NO: 1110 - DNA, 1528 bp, Homo sapiens
tttttgaagattgctttgtattttatttacaacagaatgtaagaaaaagtaagttattaacaataataaataactaggaagaaaaacacagaacagccacaaaatgacacagaaggatggcatatgtaaggatcaacttttgtttgctttgcttatagtctgtaatgctgtgtattccaacacctggtccttcagcagtggcagtggtatgtggattaatttaaccaatcaagatcccagcttgaatgtaaacactacaaattacacttgagctacatgtgagtggtacaggtacaacaccaactcagagaccctctcctgggtgatatatagaaactgaagggagacttgcaatttgacagacatgctttcaatttaaagcaaaaaacatcaagaggcttatcctaaagtccttgttaatttaacaacaaaattacaattattaatggcatctgaaaatttcccaacatattcacattctcttattacactaactcctaaaaagcttaaacacttatatttcaaatgcaaacagattgttttgaaggtagaacacaaaagaacccaatgttttgcctcagcatgccaacagtgtgctattgtgtacacttcagtttcagcaagaatgaatagttaaaatagtttattcataatcagattgcagtcactggacagactttttaaatctcaagaactatggctcagatgacagattgtctcctagcctactgagtcagatgatcagaaaggtactaaaactatttggacaattcctctctattggattatctgattacacattatatgtagagtcagctatacactggcccttcttaagagtaaaattcctatcgacgtaagccagccaatgacctattactttgttgtcgctgagccatgaagagatgccaaagaaagtagaatttaaaaatacacataaatacattagccctgaaacttttgcagagaatgatttatcgagatgtatcagaatctattctcttagttcactgtttattacagtgtcttgaaagaaaaccacagttacttttgcaggtattgtggtaagtgtctgcataatatacccacaactgtgctacttagagatttattttcaggaccaacaacatggctaataaatacttccaaataaattaaaattttcctcacacacagatgcaaaaccgtaacagaagccttgataaatcagttcaccaacaaacccatattgtttgagttacaacggtggcaactaaaaatgtcacggcctccttcattgtgttccttttcctttgctttgtcttgcaacaacccaaagtgagaaaatgaaatgatcttcagaggtgatttctaacaaagcttatgtgttaaatacaccaagatcttctcatcccaggaaagcacagctaaagcaagaatgccgtgctatggccaagaaaatgcacaggggcacttcacatttgaaatcttcccagagttatgaaatgtacagtcattttgatggtctccactaacttcagacctcgtc

SEQ ID NO: 1111 - DNA, 1790 bp, Homo sapiens
taacaagcttggcacgaggttagggaagcagggtctggcttttaatatgaactgcaaaaagcagcttctcactgatatttttttgttgttgtttctggggggtttttttttttttttttaatgcctttgagtgcatattttcttcctcgtctgaaaccgaactcccaaagtggctttctttagccctggctggaaaaccacctctcaatagccttaagcaataaatagatgagtagagaatgtggcttcaactgggcttattaaagtaagtgtgtctagttttcacttgaacaagtgatagctgcagatggcgaaagaaacccatttaatttttgtagcttacaggtggtagaaacaaaaatgcaattttaaaaccttaaataccaaataccaaccattgccttttttttttttgagatggagttttgctcttgtcacccaggctggagtgcaatggcgcgatctcacctcactgcaacctctgcctcccgggtccaagtgattctcctgcctcagcctcccaagtagctgggattacaggcatgcgccaccacacccagctaattttgtatttttggtaaagacagggtatctccatgttggtcaggctggtcttggattcccgacctcaggtgatccgcccacctcggcctcccaaagtgctgggattacaggcgtgagccaccatgcctgcccagcaataccaaccattgtcttttaaattcgtgttggcttctcagacagggagatcactggaataaaataaccgatggtcttattttgtcacacgtaaatcaaaagaaatgtcctctttgaagttgtaagactccaccaatgacagacacccttttcggtggactctgagtggtgtgtagtggttttatagccatggaaactaggagtatctcactttccactgagaacccctgcccccaatccctctaagttggggtgtggcagttgggcagggtcaagtgacccagccctggctgtaggacagccatatacagtgaagagttctagaaccagctaaaaatggaagtttgggtgtttaccaacaaggtacctctttatggatgcagccccagtaagctggctttaactctcagctccttccctgtctcctcctaatccaagcccttttataaaataaagccccttctgtcccactgctcacatacttatgtgctgctagtctctactcgaagttcgtgcaggactaatgcttttaaaatgaggtctaaaaaataattactagtcgagactattatctttaaacgactgcctttttcactctttatgtaaccttctattgtgtggtctaacaaggcactattttaaaattttttaatttttcccatagcacttaaaagagattttgtaaagaccttgctgtaaagattttgtaataaaatggtctaagggctctttttccaacattaccatttttaaaaaatgttttaaaagctagaagacaacttatgtatattctgtatatgtatagcagcacatttcatttatggaaaaatgttctcagaatatttatttactaatatatttatcttaagccatgtcttatgttgagagtgtgacattgttggaataatcattgaaaatgactaacacaagaccctgtaaatacatgataattgcacacagattttacatatttgcagaccaaaaatgatttaaaacaagttgtagtcttctatggttttgtaacaaattgtacacatgactgtaaaaaaaaaatacaattttatcaagtaaaaaaaaaaaaaaaaaaaaaa

SEQ ID NO: 1112 - DNA, 2324 bp, Homo sapiens
  SITE (41): n equals a,t,g, or c
tcccctggcagcccaagggtgttgggtccgcgaagctggantggccctctggtggagcctgcatccttgcctcgtctgcctctgctttacatttggtgtactttcgggcgtggtggcagtaaaatgacaccgtgattgagcttgtcagcagagctgaaagagaaagtagaaggatgtgcattgtttcttgtaagatatcttgcatgtatctgtgtattcaaattcaaacagagatggtttgtccatttgtccactgagaaattataaactagggacaagggggaggaaaagtactgaaatacagtttatgaagcaagtgtgtctcgggctgtgcttgtcccaggagccccagcagcatctgaactgaggcttcttcagtcctgcaggaacaggatcatctgtctcagcggtgggcagatgttttcatagacagccagggagtaaacactgttggctctgtgggctgtatggtctctgccataaatagtacagagatgtggctgtgtctagtacaacttttagacacagaaatctgaatgacatatattgttctgtgtcaagaaacttagattttttttttaactatttaaaaacgtgaaacctattcttagctcacaggccatggagaagctggtggggaccagacccagctccttagctggctgggctggggagggggtagtgacagtggcagctgctactcactgctcagtgtggaaaacacaggacttggcaatcacagcccgcagaaccatcatgtgtggcagaagcctgagggatgcggtttcttgcccacgtgctctgttcattttctgttgtttttctgcacttaaagaattcacatggaagcatgttttataaaatgaattaccagagaaacagagatgggccgagattttcagaaatggtcccatgtgaccaagttctgctgtttgggtgacagtgctttgaagatctcctttgaggatgtgcagtctttttttttttttttttgagatggagtttgttgcccaggctggagtgagtggcacagtctcggctcactgcaacctccacctcctgggttcaagcagttctcgtgccgcagcctcccaagtagctgggactacaggcatgcaccaccacgccaggctaatttttgtatttttagtagagatggggtttcaccatgtctcaaactcctgacctcaggcgatccacccacctcagcgtcccaaagtgctgggattataggcgtgagccaccgcacctggcctatgagtggtcttttaattaggaacaaatctaatggaaaggagagttgactgaagttggcccacaggattgtgagctgggcagtgccttcatgaaggcttgccaccttgggacgccccagtttactggggtgtcttgcggagtgcagaaggctttctggcagctgcctgggtttggccagaccctgcctcccctcccgccggccaacccctagtccccttcctgtctccacttgcattcaggggtggctgctgttctgagaacattagaactgggaagagagatggagtcacatggatttttggtgggcattattctaaactttcgtatccaagttagtcccccttattccactgtggcattgccgttctaagcagttacctgatgcctgctgctgaagagctgctcacaggaggcggcggcggccctggcactgccccttgcattaggtcttgtgtttgatgtgttcttgtgaatttactttgtcagaacaaaatatttacgcgttgggttcaggaatttcttttagctccccatctggctgtgaaattcaggaaacctcccgttgcctagtaatcaccccatgtaggtgtacattgtgacaaagtgcatctgaccactaaggggcccccttggtgaccccagcacattcacagcagtgttaaaatggcctgcattttggagatgctggctggcctttcagtgcctcccaggaagacacatggcctttccctcttcagatgcctgaagggagtgctttgaggcaggtgatgtgctgggagtgtgggcggcctccctctggccccggggccctctgtggaccttggctccctccgtggacctgggcttcgtggtgagcactgcagcctccctgggcattccctccagcgccagcaccactgcaacatatagacctgagtgctattgtattttggcttggtgtgtatgctcttcattgtgtaaaattgctgttcttttgacaatttaagtgattgttttgtttactgtaagtttgaaaataaaaatgaagaaaaaaattccaatgacaaaaaaaaaaaaaaaaaaaaaaa

SEQ ID NO: 1113 - DNA, 2913 bp, Homo sapiens
  SITE (2288): n equals a,t,g, or c
  SITE (2753): n equals a,t,g, or c
acaaaagctggagctccaccgcggtggcggccgctctagaactagtggatcccccgggctgcaggaattcggcacgagatacgattgacgtatgtaatactgttgacataaaaactgaggatctgtctgacagcctgccacccgtttgtgacacagtagccactgacttatgttccacaggcattgatatctgcagtttcagtgaagatataaaacctggagactctctgttactgagtgttgaggaagtactccgcagcttagaaactgtttcaaatacagaggtctgttgccctaatttgcagccgaacttggaagccactgtatccaatggaccttttctgcagctttcttcccagtctcttagccataatgtttttatgtccaccagtcctgcacttcatgggttatcatgtacagcagcaactccgaagatagcaaaattgaatagaaaacgatccagatcagagagtgacagtgagaaagttcagccacttccaatttctaccattatccgaggcccaacactgggggcatctgctcctgtgacagtgaaacgggagagcaaaatttctcttcaacctatagcaactgttcccaatggaggcacaacacctaaaatcagcaaaactgtacttttatctactaaaagcatgaaaaagagtcatgaacatggatccaagaaatctcactctaaaaccaagccaggtattcttaaaaaagacaaagcagtaaaggaaaagattcctagtcatcattttatgccaggaagtcctaccaagactgtgtacaaaaaaccccaggaaaagaaagggtgtaaatgtgggcgtgctactcaaaatccaagtgttcttacatgccgaggccaacgctgcccttgctactctaaccgcaaagcctgcttagattgtatatgtcgtgrctggsaaaacycctatatggccaatggggagaagaagctggaggcatttgccgtgccagaaaaggccttggagcagaccaggctcactttgggcattaacgtgactagcattgctgtgcgtaacgctagtaccagcaccagtgtaataaatgtcacagggtccccagtaacgacgtttttagctgccagtacacatgatgataaaagtttggatgaagctatagacatgagattcgactgttaaatcagtgggtcttttaaacctactcctggtagggaaatagctacagttttacggcagctatggttctgttggtttaacttgccggagctcctgcatatagatcacttgtatcaagtgttttcattgctaagttatatgtgttagtgtcggggaaatagtttgcagataatggaggagtaaccctacaactatatgtccttagttcttacagaacctcatagtttgagaacaaagctgatgcaactgatttatacaaaatgaactttggcaagaaaaataacattaacctcattgtttatggccatgctttgtgcataatcaaagtttatgattaaatgtaaggaagtggtatctagtcagtccataaagattgtgctaatttttttgtggaaaagtagccattagttcaggaaactcagtgctgccttcagatgtcattgatgtttctcctgttggaaagctgatgtgtccagctcaacctttgtgctgacatcataccatttctgatcatgaaatattggctactggtgtatgtagcagttcttaaatcagcagtattatgaaaaaaaattccccctcattagaatgtttaagaaatctttttaaaaagtaaaattctgtcagactacaaatgtttagctgttactcatttctagggaagaaattctaaatccctccttcactttgagcagtgttctaattgggataaatgaaggagagtagttttattctgaaggtaattaaatttagactatgtagtatgtgacagaatttttttaaaattatwaaaagrttttatttagtaattgggatttacttaaaataattttggaataatgctcccagacttgcccagatttgtgtattgtacttattgccactggccgccactttgacttattttctctaatagtttatttgccacagtctttattttgaatatgctcctagtttttttttagggtgctgttcattatgaaggcttctttatagaggcctaataagaatgcctttttataaagcctgtgcatttaggtaggttgaagctaggaggattttctttagaatgctcttttgcatgtaaagcacaaagtatgtttcagtttaaatgcacttcttccnggttaattttwatggggaagacaagtgagtcacaaacattctgttgaagggaaatctagtcagttgcttgaaagagcacagcccaaataaaacaaggactgactaggtgtaatgaaataacctgtgatttaaaagaagagctgcagctttgacagtgcttatttaaagaaaaatactgctggaaaatttccaatttctactacgttcaccatctctagtaagatctgacatatgctgaagttatgttttgatttggcacacagcatgttcaatgatggttactcgcctagtacaagacatggagaagaaacctttggacacagagcagatgacacctccttctgttttgtagtgtatcctggtgtcattttctgtgaatgtggtcaggtagagttgtttttgttgttgttgttgggcttttttttctttttttttttttggtctcttttggtggggtgggggtgngctaaagccataggaagaaaaatgtgatgtgtccagtatgtactattttgtttttgttttgcaagaagagttgaactatttttgataacaagagtaaatggtggaaaatgcttaaaaaaaaaaaaaaaaactcgagggggggcccgtacccaatcgccct

SEQ ID NO: 1114 - DNA, 424 bp, Homo sapiens
  SITE (409): n equals a,t,g, or c
  SITE (416): n equals a,t,g, or c
  SITE (417): n equals a,t,g, or c
  SITE (421): n equals a,t,g, or c
ccggttggtctcgaactcctgacctcaagtgatccacctgcctcggcctcccaaaatgctgggattacaggcatgagccactgcgtctggtccttggctgtttcttagscccactcctggcagtgtctcttctcttcagctatgactggggagtagatgaccgtgcttgtttctgacacacagcacagtgtcctctctgtacacaagctggtggttcaagggccaatggttccagagagatagtggttcccttccttccctcctcaccaataggcagcctcaggccttttctgtgtataactgtgtatatagacataaaaacctacaaatgtgaaataaatctatgctatctttcatagtgttaccacaaaaaaaaaaaaaaaaaaaaaaaaaaaaaaaaaaaaaaaanggggggnncccntta

SEQ ID NO: 1115 - DNA, 1844 bp, Homo sapiens
  SITE (1699): n equals a,t,g, or c
aggaagtgccgatcggctgctggggcgaaaagggggcgccgggccgctctagccgccctggtccagcgcctccctctctcagcatggacgaggagagcctggagtcggccttgcagacctaccgtgcgcatgcagcaggtggagctggccttgggcgccggcctggattcgtctgagcaggctgacctgcgccagctgcagggggacctgaaggagctcatcgagctcaccgaggccagcctggtgtctgtcaggaagagcaggttgttggccgcgctgkacgaagagcgcccgggccgccargaagatgctgagtaccaggctttccgggaggccatcactgaggcggtggaggcaccagcagcggcccgtgggtccggatcagagaccgttcctaaagcagargcggggccagaatctgcggcargtgggcaggaggaggaagagggagaggacgaggaagagctgagtgggacaaaggtgagcgcgccctactacagctcctggggcactctggagtatcacaacgccatggtggtgggaacggaagaggcggaggatggctcggcgggtgtccgtgtgctttacctgtaccccactcacaagtctctgaagccgtgcccgttcttcctggagggaaagtgccgctttaaggagaactgcaggttctcccatgggcaggtggtctctctggatgagctgcgccccttssaggacccagacctgagctccctgcaggccggctctgcgtgtctggccaagcaccaggatggcctctggmacgcagcacgcatcaccgatgtggacaacggctactacacagtcaagtttgactcgctgctgctgagggaggccgtggtggagggggacggcatcctgcccccactgcgcacagaggccacagagtccgactcagacagcgacggtacgggtgactccagctatgccagagtggtggggtcagatgctgtggactctgggacctgcagctctgcctttgctggctgggaggtgcacacgcgaggtataggctccagactcctcaccaagatgggctatgagtttggcaagggtttgggccgacacgcggaaggccgggtggagcccatccatgctgtggtgttgcctcgagggaagtcgctggaccagtgtgtggagaccctgcagaagcagaccagggttggcaaggctggcaccaacaagccccccaggtgccggggaagaggggccaggcctgggggccgcccagctcctcggaatgtgtttgacttcctcaatgaaaagctgcaaggtcaggctcctggggccctagaagccggggcggccccagcgggaaggaggagcaaggacatgtaccatgccagcaagagtgccaagcgggccctgagcctgcggctcttccagactgaggagaagatcgagcgaacccagcgggacatcaggagcatccaggaggctctcgcccgcaacgctggccggcatagcgtggcgtcagcccagctgcaggagaagctggcaggagcccagcgccagctggggcagctccgggctcaggaagccggcctgcagcaggagcagaggaaggcagacacccacaagaagatgactgagttctagagaccccacaagcactatggacgaagcgtgggaccccagcacgggctgccctcaggaagaccagtgttgcccgaggaggggncgcctgctggcctggggcgtgcggacactgctgagtggagacagagctgcggggtcccatctggacacttacttgcccacctgccagtgtcttgggcatttccttggcaaggacattaaagtgatttcatcacagaaaaaaaaaa

SEQ ID NO: 1116 - DNA, 2124 bp, Homo sapiens
  SITE (8): n equals a,t,g, or c
  SITE (76): n equals a,t,g, or c
ggcggttnaaagggcaatcagctgttgcccgtctcactggtraaaagaaaaaccaccctggcgcccaatacgcaanccgcctctcgccgcgcgttgccgattcattaatgcagctggcacgacaggtttcccgactggaaagcgggcagtgagcgcaacgcaattaatgtgagttagctcactcattaggcaccccaggctttacactttatgcttccggctcgtatgttgtgtggaattgtgagcggataacaatttcacacaggaaacagctatgaccatgattacgccaagctctaatacgactcactatagggaaagctggtacgcctgcaggtaccggtccggaattcccgggtcgacccacgcgtccgagttaatagacacttgaattgttttcggtttttggcaattaggaataaagccactgttaacattcacatataagtctttgtgtgggtgtgtattttcttacttcttctgtgaatactcataaatgggactgctcagttatatgataaatatatgtttaactttgtaagaaactgctgaattattttmcaaagtggttgtaccatcccgcattcccatcagcaatgtttggaaattccagttgctccacatacttgttatgggtcagtctttttaatttcggccattctagtgagtgtataatgatttcttgctatggttttaaatttgcgttttcctaaagactaatgatgttgagtattttataatagttattggaccaaagggagttcttcatctttgtaacattgatataataagattatttaattgctagttgatactcaggttttgtcacttgtcccaataatgtccataacaagcttttccttcctctagatmcaaactatgaccacacattgggtttagttgtcatgtttctttggtttcttttaatctcagttttctttgtctttcttagacctcaacttaaaaaaaaataataaaaaagcataggcctattattttgtaacatgtctgtcaatttgggtttatctgatatttccttatgataagattcaggttggtatttttggcaagaatgttacagaaattatcttataaccttttcaagggcattgtatcaaggacccccgtatgtgactattagtgatgactttgtatgttgcccaagaaatttatgcctattctaatgttgctaataattttcctgttttcttctagaattttcatagtttcggcttttaagtttatgaactatttagaaatattttgtgtgtgtgatgtgaaatagggattgaggttcattcattttttttttcaactttttgccttattagcttttcctatttctttgayttctgcttattattattctactttctttgaaatttaatttgctcttctttttctacctttttaagttgaaaacttaggtcaatgttttatgacctttcttttttttaatataagtatttaaagctatgtatttcctgctaagtactagtatactgcatcccatgaattttgatatgtaatttttattatcacttagttcaaaatatttcctaattccctttgtaatttttttgacccttgggttattgagaactgtatttaggaatacttggggcttttatagatattttactgctagtggttttttgtttaagtgtgtgtctktgtgtatgtgtgtgtgtatgtgtgtatcagcaactataaagatctcagtattttgaaatgtattgaaacttattttatggttagtctattctcacactgctataaagaactgcctgarcgtgggtaaatttacaaagaaaagaggtttaattgactcaaggkktaattgactcaaggttctgcatggctggggaggccttaggaaacttacaatgatggcagaaggggaagcaggcatgtcttacacagcagcaggcaagagagtatgtgagagcacaggaaaaactaccgtttataaaaccttcagatctggtgagaattcactcactatcacgagaaggcttagaagaaaaccccacaaaccccattactaaacccacactcaacagaaacaaagcatacaaaaaaaaaaaaaaaaaaaaaaaaaaaaaaaaaaaaaaaaaaaaaaaa

SEQ ID NO: 1117 - DNA, 2312 bp, Homo sapiens
  SITE (239): n equals a,t,g, or c
ggcggactgacaggcccgggcaagggtcgcttcctcgtccgcatctgtttccagggagacgagggcgcctgccgaacccgggacttcgtggtaggagcgcttatcctgcgctcatcggcatggacccgagcgacatctacgcggtcatccagatcccgggcagccgcgaattcgacgtgagcttccgctcagcgagaagctggccctgttcctacgcgtctacgaggagaagcgggasnaggaggactgctgggagaactttgtggtgctggggcggacaagtccagcttgaagacgctcttcatcctcttccggaacgagacggtggacgtggaggacattgtgacttggctcaagcgccrctgcgacgtgctggccgtgccggtgaaagtgaccgacaggtttgggatctggaccggggagtacaaatgcgagatcgagctgcgccagggggagggcggggtcaggcacttgccaggggccttcttcctgggggccgagaggggctacagctggtacaaggggcagcccaagacatgctttaaatgtggttcccggacccacatgagcggcactgcacgcaggacaggtgcttcaggtgcggggaggaggggcacctgagcccttactgccggaagggcatcgtgtgcaacctctgtggcaagcgaggacacgcctttgcccagtgtcccaaagcagtgcacaattccgtggcagctcagctaaccggcgtggccgggcactaaacacccgcctgcctgccagggtgaacacacagccagcttatccctcttaagtgccaaaacttttttttaaaccattttttatcgtttttgaaggagatctttttaaaacctacaagagacatctctctatgccttcttaaaccgagtttactccatttcagcctgttctgaattggtgactctgtcaccaataacgactgcggagaactgtagcgtgcagatgtgttgcccctcccttttaaaattttattttcgtttttctattgggtatttgttttgtttcttgtactttttctctctctccttgcccccctcccgccctccccgccccataccttttcttcccctggattttcaccctttgggctgccttgctcatctttatgccccagcactaggtacggggcccaacacgtggtaggcactccatcagtgtttgctgaattgaaaacattgttgactgtggcttctatcagagtgtctaccttttgcagctcttcccctccctcatttaatttgctgcttttaatctacgtggtctgagaatttgtgaaaccagtgttgttagaagtgtatataatctgaatcaataagctctgaatggtggccaagggctctcttatggcacaaagatgcatggacttcatgacagctcttttggtggctcagaagccattttttatagaatcatggaatctagaatattcctgctggaaagaacctgagagttggtttggaccaattccctggttttccagcagatgaaacaggcccaaagaggttaaatgactgggtgaaaatcacatagctgtctggtgccagagccagcctatagtagagtcccctgaccccaagcccggtgctcattccactacctctcacacttcacaacaatttcctcaacacttgagggcccagaaagtctgatctctccagaatgatcagcccagaggaatgctgagaaatcacctggaggagggagcagaaagagaaggtttttaaggaggggcttctgaatacttgggagatacggaacggaccaaggaccacactccagggtgcattcgttgctccctggggcaccacttctggattacagtgtgccaggtcctttggaggccctaccccttccccattcattgccaccagtgagaaatgggggtgcccctgtgtaaagaaacctaccaaaggtttacatttgcaccttagcctcaatagctacgaaccctagagaagcagctagctggagctcatgtgcaactcctgattctcaggagaaagatggattttaacccaaaattatgagtgagctgttaactctaaaatgtacttgggagataggccaagcgagaggtcatgggccaactaagtgttatccagtagaaaagacagtacactgcttttcttttagtgtttgcttttcctttgctatatgttttgctatttccttgtggcttagaatgtaaaattgattgttaaaagttttgttctgaataaatatttatcttttgtattgctaaaaaaaaaaaaaaaaaaaaaaaaaaaaaaaaaaaaaggggggggggc

SEQ ID NO: 1118 - DNA, 1058 bp, Homo sapiens
gactttttttcatctgcttattttcagcctatgtgtgtctttataagtgaaatgtgtttcttgtagacaacagataattgggtcttgtttttttatccattcagagccactctgtgtcttttgatttgagagtttagtgcgtttccattgttattaagaagtaaggatatgttctgccattgtattgtttgtcttttgcttgttttgtggtcttctcttcctttcttcattccttcatttcttttattgaaggtgattttgtcttgtggtatgatttaatttcttcctttttattttttaggtatatgtyatatggtttttgatttgaggttatgatgagtcttgcaaatattatcttacaacctattattttaagctgataaccacttaacattgcataggcaaaaacacacagaggcaaaaagaaaaccaataaaagctctacactttagcctcttgctttttaactttttgttgtctctgtttatatctcattataatttctatgtcttgaaaagttgtcattattagttttggttggttcatcttttagtctttctccttaagatcagagtattttatatatcacatttacagtgttataatatgctgcatttttttgtgtacttactattaccagtgagttttggaccttcagttgatttcttattactcatcaacttccttttctttctgattgaaaaactcccaggctggacacggtggcccatgcctgtaatcccagcactytgggaggctgaggtgggctgatcccttgaggtcaggagttcgagaccatcctggaaaatgtggcaaagctccatctgtwctaaaaatataaaaaattagttgggtgttgtggcgagcacctgtaatcccagctacctgtgaggctgaggcaggagatcgcttgaacccgggagacgaaggttgcagtgagccgagatcgcaccgctgtactccagtcctgggtgacagagcgagacgccatctcaaaaaaaaaaaaaaaaaaaaaaaaaaaaaaaaaaaaaaaaaaaaaaaaaaaaaaaagggcggcc

SEQ ID NO: 1119 - DNA, 2732 bp, Homo sapiens
  SITE (334): n equals a,t,g, or c
  SITE (1885): n equals a,t,g, or c
aggccaggcagcccgctatccttggatggcctttccacgcaatagcatcatgcacttgaaccacacagcaaaccccacctcaaatagtaatttcttggacttgaatctcccgccacagcacaacacaggtctgggagggatccctgtagcaggtattccagcgtcttcaggaaacagtttagactctcttcaagatgacaatcctccacactggctaaaatcccttcaggccctcacagagatggacggccccagcgctgctccatcacagacccaccacagcgcccccttcagcrcacagatcccgctgcacagagccagttggaatccctancctcctccttcaaacccttccagcttccactccccacccccaggctttcaracggccttcagaccccccagcaaaacccccacagatttactacagagttcaacactggaccgccattaggcawagaggagcaaccattakaaaatgcaggatttgtcccactctkttttctccctctcagcccaccacccacagctcccttctcatctcttatgttctgaagaatccagtacctgatcaattttttttctccctaaccccagatgcaatgcgatcacagggtcattaccatctctttattaattgtaaaaatttttgttgatccagcatttgagtgacactgttgaatgtttctaaaaatgcctttttaaggagagaaaaaaaaatcaaagggcagtctcaatacttagaaaattattgtttgtctgttgcgcataataatgacataatctgcttagcagaaaatgacgattaatctataggaaagctcaagtaaatgcattatcaactgcagaagtttgaaaaccaggttcatttacgtgagattgctaaatgcatgggggaaagcagtggtcctagcatccatcttgtattcagcttatcattattgcagggaaaatgcttttaatttaaattaatttttaattcttttggcaagttgatggcaaggacttgattgtgtcattaagcaaaagaatgtattggaagttgatggaaagacaaattcatctgtagtagtaactggccgattgctaaagagttcataaggaggtgagaagtaatttttttaaaggagaaaaattttttggctttagatttaaagtaaattgaaatgttttaaagaaaaaagtattcacagatttaatacctattaataatataagagctgaaatgtaagtcatttcttcagtccttctcctctgtcggaatcttttttgttttaccataaattcacctgacgagggcactctgagatagcactgctctggggccatctgatcaccatcgggagcaaatctctgacctccttgcctgcagcttttacttaaccctgtagtttctggacgtttgtgcagtattgaaaagacaggagaaaagaaaacagaaacctggttataacctgacgctaaaactaaaaacaaggaaatgtacctctttcttcagaattaaaactaaaatcttaaataaaacagaaaacttgatgatgacacttgggttgtccttgtttttgtttttctgttttgttggatgtgagtttgaaaggttttgtgacaagtagccatcagatgtttccatttgattttacatcttcaacagtggggagggaggatggtttagaagaagaaagtggrggagaaacaaccattttattgacagycaatggcatccttgacgttcagcccatcttgtcctcaagaatccctcttccagtgcctttcagtagaagattcctctttctgctattgtattatgcatgccaagccttcyyaactgagaagccytatgygccagtaatggagaggttattgacatgttgagatgttggttctntttagggagacctggcaggagcagcagtcactatgtcacacaagtgacatctctttgtgagtgccatgatgggaaagagatcgggaaacactgatgtagatgatccacagacacatcttttatgactgaccattttaggaagtacctgatgatggggcaacgatcgcaccactgaccaaaagagggtagaggatgaaagttacctgttccccaacagagcaccaggatctgtgtggtttgtatgtcttgccttgggctgcattcagaagcccaaagctggaactggcatattttcagccatgtccattaagggatgtgatgtaggatcaactaaatagatctagatcgtacgttctgtgctttcaggtgggtttttttcgtccttacctttatgctgtactttaatttgttaaaatttcaacacaatttttagaaacttaaacatgatattctcaaataaatgtcaccagaaatagatggtgatcaagtggatagtaaattgttttgtaaaactwacaaaatttccctggataagaggagaggactagaaatgacaggctctctttgcccttgaacttcacttcagtctcctgaaccttcacattgtactgcaaagtgatggaccaatgcacaaataatattcagatggcagtgaattgtaatcaaggctttttgcggggatgcggggaagtcctgakatggggcatatcaataaaaatgttgctttttttgtaaaaggagggaactcctaccttataaggctgtgctgtaattgtgtgtgtgtttaatcagtcatacagaagagtttataaaaagcatgactttataaaaagtatgaagaataaaa

SEQ ID NO: 1120 - DNA, 372 bp, Homo sapiens
ccacgcgtccggtgaacacagagaaatgaatttattccccatatgggtatgtttgccccctggcaatgcatttccatactctttaacttggggactgaaatgttataaattgacagttctactcagaagacctttcaagcatcttgtgtttatgagaatacaggggcatctgcggaatgaattcgaacacatggatgaattaaatttgaaaacacacagaccgagaggcagacagttcctaggctgtggtcgttgcatggattttacaaaactgttaacctacacctttggctttgctgtgttcattgtcctggggaagaattgtgggtttaagaattactctttgattaaactacttaaaaaaaaaaaaaa

SEQ ID NO: 1121 - DNA, 2043 bp, Homo sapiens
  SITE (308): n equals a,t,g, or c
  SITE (1672): n equals a,t,g, or c
gtgcatctacagggtatgtgtttaaatgaggggtagttgacccacataactccccaccctcctgcctcatggttagaatgtatgttcattggggattctgcatacattttcatcacatatctacttttctggcttttaagtaatatcctctcctttgtttttgccaacagtgttcatgaatagtgaatgtaggaaagcattatcattgctatgttttattttcacactgtatctcagtatcagcccatactttcaatgtactaacaactgtcactgaggcaaaaagttttaattaagctcacacatgnattattttccagcaaacagagcctaattgatgaaattgctaactgtacttccaggtgcagtcagtagccagtagtgcatgttagtatgcaatatggcatgggctgttacatggtgtgatactagattatatatttactatgaacgtatgtattgttctttaatgacatctawttgktcattccaaaaatatttattgagcacggactctgtgccagttattagttagagtaataatagctgctgtggcaaatgaatttcctcacctaagaaaaataaaagttaattattttttctccacataaaggtctagaatgttctgccgcatgccttccatgtcatgattcagggacccaggctccttccatcttgtggctgccccatccactaagttctcagactctttcatttccaactggtggttgttgaaagagaaggtgatgaaggtgtaccccacttacatcttacccactttcacctaraagtggcacatatcacttttattgacgtttcattagcaagaattgtcctgcaacacacttggaggaaggcagctgggaaatgctgtccctggctgtgcacagggacatatgtattttatgtattttatgagactctttgcaggatagctggctatctctgccacagctggccatgtctgccatggctagacatcatttcaggctctagggaaatagcagtgaagagaaacagacaaaaatatctgacctcatggagcataaattcttgaattaaaattcttaaattcttcatgggatgagacagacaataaccaggctaaatcagtatgttgcaaagcagtgagagctgctaaaactaagcagaaaaaggggtacaaagcatgagagagaaggatttgagatgagatagtgtggtcatagaaarmcacactttcwatcagcatgagagaaaagctaaagcaggaaaaggggtagaaagcatgagagaaaggtttgagatgagttagtgtgctcatagaaagcgtcttgaaagaaatgatattttaagtaaagaatcagagagcataaggtgtccaactaggtgaatatctaaagcaaaaacattccagatggagagaatagcaggtaaaaggactctgaagctggtgaagataataagggtgagaataatagaaggtgagatcggagaggcaatcgtcaggccagactgtgtcgggccatttaggtcatagtaaaaatctgggcttttttttttgtttttttttttgtttttgtaactaactttattgaactatgattttcataaaatatacccattcggtaggttttaaaaatgtagactgaagacattcatataatcaccactacaataaaaatatagaacntttttatcatcccctaaagtatccctatttatagttcatacctggccccagcaatcactgatatgccatcacagattagtttgttttttctaggatttcatacaaatggaaaggaacagtatgtactcttctgtgtctgtattctgtcactcaacataatgcttttgagattcattcatattgttgtcagtatcactactttatttctatttactgccattatatgaattctattatgtggatataccataatttatttaatctttcacctactgagaggcatttgagttgttgataatttggggctgctatgaataaatctgctatgaacataaaaaaaaaaaaaaaaaaaaaaaaaaaaaagggcggcc

SEQ ID NO: 1122 - DNA, 1557 bp, Homo sapiens
  SITE (1557): n equals a,t,g, or c
atcccatgagcgctgcttactgttgaataccaaggtctagggctctgcttcctgtagacacgcacacgttgtctccatccaatggccttttctgaagttacagaaaacaccaacatgggagggagtttatgaagcaaaggcaaaggcaacacgtcggctagcttcaggrtagcaccgtgagaaatgggctgtattgatactgtgaatgtttgttttccaagctgttttatacaggtttgttttttcatggtgtagggtatttatgacaaagtaaatgttgtgaaggttaaagataaattaagattatccaccaaatgctaaaaatactgatgtgtaaatcacctttatcgcctcacctcttctacaagcttttgtggcttgagggcttttgtttttggcttttgtctggatgaaagttttgcccagttgtgttttaaaaacaattcctcatgaacactaagattaattgtgtctgtatctctggaactgggtgctcatgttggttttaatgagcttgcaacccttccccgtttgctttgtttaaggaggtgcctctgttctttgtggaggagtgaaatggagctttaagtgtgtgtgtgtgttatgtgtgtttgcacacacgcgtgtgttattgtagcaataacaaaaagtagccatctccttgttccagctgaaaacctgctgtgagagttttgacagagcactttattttcgtcaagtttcaagtctgagttcaaaaccagccctgatcccttatgaccaactgctactcgaccagtcgccactcagtggccacctggtgcccgtttagatttttgcttgggttttactggccacctctatagacgagagttgcaaagttgctttgagcagagagggaaagattaatttacactgctggccaccgaagcaggtgtttcctgggtagtaatctcacggctcttgatctggaaacttcagagtacaaattggtggatggtggaaggcaggacacgtatctctgtctgacggaaaacagacctcggggctggcgtaaaccctgctgccaggccctctccccactgccccaaaccggcctagacacgaagaccaaagcagcctgcacagggcaaggcccccgcggaatcctgcagagcaaactcaggttamcttgggtccatgaccgtttgcattcgaaacacaatacactgcctcgttctctcagttagcagctgggcagcagcgcaccattcatcatttaggcttgtggtttgttgtttactctaccaatgttatgtygaaactgcattgtaaaaagagaagaaaatggcaggttttccaggtccacggaaaggtttggcctgacgctggagtgcggtgatgaacttacgtgacaatgattgtattcctcagtagcactttaaacgccgaagacagccctgcagcaagcctgcacacgggcttgggtgggttcctttggagaagatgtggctggaacacaaacaatctttgaaagaaataaatgtgcacacagaacamwaaaaaaaaaaaaaaaaaaaaaaaaaaaaaaaaaaaatn

SEQ ID NO: 1123 - DNA, 1699 bp, Homo sapiens
  SITE (2): n equals a,t,g, or c
  SITE (26): n equals a,t,g, or c
  SITE (28): n equals a,t,g, or c
  SITE (56): n equals a,t,g, or c
  SITE (62): n equals a,t,g, or c
  SITE (1239): n equals a,t,g, or c
gnaccggataccattttcacacaggnancagctatgaccatgattacgccaagctntaatanggactcactataggaaagctggtacgcctgcaggtaccggtccggaattcccgggtcggacccacgcgtccggcgaggctgggttacgtgaggaagctgggggtttcgcgggcagctttagagccccagtcagggaaaccgaggccgggcttcctggctgcctcgcgagcctcttcatggctctcgccgccgccctgaggtgcctagaatgggttccggcctccggggaggttcccagtaaccgcaggagccaccattgatttggcgtctgctgggtgcaaagcccagcgcgctaaccctttactcgcgacctttcgcttcaccttcacagcagccctgcgaggagagttgtggactggggcaacctttgccagtgatgagaagtgatgctcgtggcagtgctgaatctctctgaatatgattcgaattgcagccttaaatgccagctccaccattgaggatgatcatgaaggaagctttaaaagtcacaaaacccagacaaaggaggctcaggaagcagaggcttttgcattgtaccacaaggcccttgatctgcagaaacatgaccggtttgaggagtctgccaaagcctaccatgagctcttggaggcgagcctgctgcgggaggcagtttcatccggtgatgagaaagaggggttgaaacaccctgggctgatactgaaatattccacttataagaacttggcccagctggcagcccagcgggaggatctggagacagccatggagttctacttagaggcagtgatgctggactccacagatgtcaacctctggtataagattggacatgtggccctgaggctcatccggatccccctggctcgccatgcttttgaggaagggctgcggtgcaatcctgaccactggccctgtttggataacctaatcactgtcctgtacaccctcagtgattacacaacatgtctgtacttcatctgcaaagctttggagaaggattgccggtacagcaaagggctggtcctcaaggagaagatttttgaggagcagccttgtctccggaaggactctctcagaatgttcctcaaatgtgacatgtcgattcacgatgtttcggtgagtgcagctgagacacaggcgattgtagatgaggccttggggctgcgaaaaaagaggcaagcrctgattgtrmggnagaaggagccggacctgaaacttgtgcagcccattcctttcttcacctggaagtgcctcggagagagcttgctggccatgtacaatcatctcaccacctgtgagcccccacgtcccagccttggcaaaaggattgatttgtcggactaccaggaccccagccagcctcttgagtcctccatggtggtgacgccagttaacgtgatccagccaagcactgtcagcaccaacccagctgtggctgtcgccgagcctgtggtctcctacacctctgtggctacaaccagcttcccactgcacagtcctggtctgttggagacaggcgctcctgtgggtgatatttctgggggagataaatccaagaaaggggtaaaacggaagaagatttcagaagagagtggagaaacagcaaagcggcggtctgcccgtgtccgaaacaccaagtgcaaaaaaaaaaaaaa

SEQ ID NO: 1124 - DNA, 1796 bp, Homo sapiens
ggggacccaagatggactgcctgtattgcttccaggataaagtccaatttctagctctggtttttataaccttgcttcagctcaccttttccgtcatcatcccctccatctcctctcccacgctgggaaatggatggctgcactatactgtgtgatgttattgctatgttcatgccatcccctctgcctggaatgcccttctgcatgaatgcctgtgaaatgttgttgctcctttgtatggcctggcttccgtggttggcaggaatctcttctttcgtggtattcctgtcatctttgtgcatcacagtcagctttgtattcctagcttgtaagctacttgaggataagggcatgtctgaatctatttaatctctttgcacctgtttgggcaattgatgttttaaatatttaaataactaaactctctctacagtacatactcacttttgatttatgaattggcaaaattcaacttttttccttgaatattcttaaactgagatgaattccaaaggagagtgttctgtgtgtggccttcattgagtggttttctgttaccagaaagctcttggtggccttcctcttccctggtgtcaaggttgactgttataggaaatgggaggggagagggccgtttctgccacgcattgtcctaggttcttaacattatttaatccttataatgcaatgtatcctcattttacagatgaaacctgagaccaaagaacatgtaacacataaagtacattgcagagttaggatgtgaacccaactctgattctaaacctaatgctctcactctttcattcagaggttcagtcagttctttgtaggctgtagatccagagaagctgccgtagccaacaatgaagttgttagtttttaaaacatctatgtggtaagttggtctggcacttaaaaatgtattgtttcccaggcacggtggttcacacctgtaatcccagcattttgggaggccgaggcaggcggatcattaggtcaaaagattgagaccatcctgaccaacatggtgaaaccccgtctctactaaaagtacaaaaattagctgggtgtggtggcgcatgcctctagtcccagctacctgggaggctgaggcaggagaattgcttgaacccaggaggcagaggttgcagtgagccaagatcatgctactgcactacagcctggcaacaaagcgagactctgtctaaaatatatatatatatatatattgtttactactcaccacagatctgcaggagttcactgatctctaggatctgccttaactccaacttacatgttttggtcactattacaaactgtcatcccagaatgatgctgcagaggctagggctaggacacagaccagtgtttccatgtgggaattccctcccagtatttcttaggaaatgtatgttttttgaatccataatccctagaaaaatcagttgaggaaatgagaagtattgtaattattctgtgaatagtaacacttaccattatggagacatcactagtttgaaagaatccaacttcatcaaatattaacgtaccgagttgaaggctacaagaactgagacaggagcatagcagagagaaacggtcaccatctcattagccctatttttggttgttgtgatgccattacatctgtatatctggccatatcagctgctaatggtgagttcttgcaaacaaaatgatttgataaacaacctaccatactttatacaaatcttatggtgttccgagaaataaactttggaagcaaaataaaaaaaaaaaaaaaaaaa

SEQ ID NO: 1125 - DNA, 1535 bp, Homo sapiens
ggcacgagctggggtaagtttcccttgttcctcaagtaagacaggatatactttgcaataatctaaaaaatctagatgtgacctggacaaagagagagagacaaagtataaaatgctttcttagggataactcatactcttggtgacaagaaatgttaatggtgtcctgaaaccttttggtcagtgattgctccattatgtgggaaaaacataggaaaataaacataggaaaaacaaaggaaaataaaagactcatagtacttcaataaaagttgtcaccaaatcccaagaaaatgattgcattggaaggaatattctttttgttttaattgatagtattttaggaagtagctaacacttgttcttatttcctagcttaaaaagtgaatatatgcacacacatatataactagaaagtgatatattaacattttctattaacaagttttttatctcataaaagatattctttggctttcgaagagaagccaaaataaatatcacataggcatttcagatatcccttcctttaaatgtttatagtgatacataaaatagaaattgcaaatatttgatattttaatattatttttgctttacaatagcatttttagtgctccatttttaatttattttatctctccaggttaataatctatcataatgtccaaattacacagtattgtattggtcagctttaagtgcccagatcaatgacactgaacctggcaaatgcaatgcacatgcacaacgcctagcttctaacatcatggctgttgaaactgtctcctctccaaagcattttcccagccccatctctgccatttgggtctcatctgataaggtttaaccatgagttgttatactccatgcatggcctctggcatttgtgtgtattgtgattctaaacgtcaaatggtaaaggataacattagattatttcgcttttattttgacagagttcaaatagcaaaataaattagatatactgtcacagcttaagaaatttaaaatgaaatatgttgtagtcaggtggaagtttctgccggggaaatattaacacctaatttcccagaatacttatttcatgcattgcaaatatctatctcctgtcatgacactgagatgaaaaggatcggttaaaagtttgctaactgaactatttcccacagtgtaaataactaagtgttggtatagactagtatggaaacatactaattacactgggtgtaagctatgtgagttgccttatcttttcacataacatttatatgtattgcatttcccatatcgtttccttttgttttgctgataacaactaatgaggaaaagaaaggaagcattaaaaaaaaagaaaaaaaaagtcttccaacaaaactgctagagagagaaagccaactattataaaatataagcacaattctattgaaatatcagctccagattcaagtaattttgggcatgtgtattatgtgccaggagatttcacttacatatgttatggaacgcagtgatttaaaaaacaaaacaaaaaa

SEQ ID NO: 1126 - DNA, 1328 bp, Homo sapiens
gctgcaggaattcggcacgaggtgacccaggcacatggtgcaaacctaggacctccacctcccagctctgtagccaggggcagctcactccaccctggtccctggagtgtgcttacaggcttccgtgttggggggctgcgaggcctgggcagcaaaccgccttgtactgcctctggcctgtggatagtagatgctcaataaacctctccttcctgtcagaaactcagtctccctatgtggatgacagcattttcctaaaggatctaaagttccatccaccttaaactctgcctgaagggaagactatgaaactagaaaagaaaatggtgtggatttgtgtgctactgcagacactgctgcgacatatattaaggagcatggaacggaaccgcgtggatgataaagtctgcgtggtgtttacaaaggaatattcataagcactttctgagaagccccgtgcagctgctaacagtgactgcctaggggaaaatggacttgaaggagtagaggccaacttttcattttatacctttctatactttttaggactaccacctatgtacgtgcattttatttttgttaaatgttcgcaggggatatctggcaggacaaggaactggctggaaaggggcgcgaggagatcttctgggtgacggagatccaggtggtggttactcagatgtattttatccttcaatgagaagtttatttcgaaaacgtcctgtgtctcttccaaagatagctccagctgggcaaagtggcagctctgtgggctccaacggaagaggccaaaaggcccatcctcctcctgtcccctgggttcaattcacagccctgcctgtctctagctgtgtgatcctggacgtgcctctctgcttcctcagctcctgcttcaagacaggcctaaccaaattttgagaagtccccagcagagctcccgaccctaatcagagaagaagaatgaatgttctgagtgggtaccacatggcaggtgctattctaaatactgaacagctgtgaacccatttaatccccgtaagaaactggtgagcttggtttcatttgactcaagaggcccagagacgaaagcaactggtccagggtcacacagccagcaggaagtggatcagggttggaacctgggcagtctggccctgaagcgctgcagaaagtattattttgggagcaaataggtaataggtggtgagagccacctaaaaatacccctcctctctggcccagtaaccacttctagaaatctgccctaaacaagtaactcaaataaagcgaaagctgagataaaaaaaaaaaaaaaaaaaaaactcgag

SEQ ID NO: 1127 - DNA, 1232 bp, Homo sapiens
  SITE (22): n equals a,t,g, or c
  SITE (1227): n equals a,t,g, or c
ggaaggttaagaaatggaattnggggagcagctggcattcctcgagctaacgcttcacgcactaatttcagtagtcacacaaaccaatcaggtggtagtgaactcaggcaaagggaggggcaacggtttggagcagcacatgtttgggaaaatggggctagaagtaatgttacagtgaggaatacaaaccaaagattagagccaataagattacgatctacttccaatagtcgaagccgttcaccaattcagagacagagtggcactgtttatcataattcccaaagggaaagtagaccagtacagcaaaccactagaagatctgttaggaggagaggtagaactcgagtctttttagagcaagatagagaacgagaacgcagaggtactgcatataccccattctctaattcaaggcttgtgtcaagaataacagtagaagaaggagaagaatccagcagatcctcaactgctgtacgacgacatccaacaatcacactggaccttcaagtgagaaggatccgtcctggagaaaatagagatcgggatagtattgcaaatagaactcgatccagagtagggctagcagaaaatacagtcactattgaaagcaatagtgggggctttcgccgaaccatttctcgtttagagcggtcaggtattcgaacctatgttagtaccataacagttcctcttcgtaggatttctgagaatgagcttgttgagccatcatcagtggctcttcggtcaattttaaggcagatcatgactgggtttggagaactgagttctctaatggaggccgattctgagtcagaacttcaaagaaatggccagcatttaccagacatgcactcagaactgagtaacttaggtacagataacaacaggagccagcacagggaaggttcctctcaagacaggcaggcccaaggagacagcactgaaatgcatggtgaaaacgagaccacccagcctcatactcgaaacagtgacagtaggggtggcaggcagttgcgaaatccaaacaatttagttgaaactggaacactacccattcttcgccttgctcacttttttttactaaatgaaagtgatgatgatgatcgaatacgtggtttaaccaaagagcagattgacaatctttccaccaggcactatgagcataacagtattgatagtgaactaggtaaaatctgtagtgtttctsgkgccgaattctggaancccgg

SEQ ID NO: 1128 - DNA, 557 bp, Homo sapiens
gaattcggcacgaggaggactggagagacatggcagatgctacctgcacacttttggtaatattctgtgtgatgggatatgaaatggtccatagaaaaaaaccggaaaaatacgccaaggttaggttcattctaagagtctaaaaatttcaaaaaccaaaacaacattataaatggtgtttctcaaggacctttcactacctttttagattgtgcttgtgattttcaggcaagctaaatgtctgatgaagactgctcttcttttgttctgtgtctgacctactaattcctgcccatgcttcaaactcagttcagaaatcactgaaggaaccatccactgccggcctgcctgcaaccacagctgacagctgagttagttaggttttcctgtccctattatttaccagtttgtactgaaatgctttcatgggctgtgcttccagattatgagttctgtggaatcaggaagtatgtctctgtattcttgtattctttggcttttttgtgtagtaaagggactcaagtaatgttaaaaaaaaaaaaaaaaaaaaactcgag

SEQ ID NO: 1129 - DNA, 1320 bp, Homo sapiens
  SITE (1): n equals a,t,g, or c
  SITE (3): n equals a,t,g, or c
  SITE (52): n equals a,t,g, or c
ncnaaattaaccctcactaaagggaacaaaagctggagctccaccgcggtgncgtccgctctagaactagtggatcccccgggctgcaggaattcggcacgaggcaccttcttcaagatggagctttttgaaggcatgcgagagagcaccaagatttcatctctgttggcagaattggaggcaattcaaagaaattcagcatcccaaaagagtgtcattgtctctcagtggaccaacatgctgaaagttgtagcattgcacctgaagaagcatggactgacttatgccaccatcgatggctctgtcaatcccaagcagagaatggacttggtagaggcatttaaccactccagaggccctcaggtaatgctaatctctctcttggccggagtgttggtctaaacctgactggaggaaatcacctctttcttttggacatgcactggaatccatcacttgaagatcaagcttgtgaccgaatttaccgagtagggcagcagaaagatgttgtcatacacagrtttgtttgtgagggaacagtagaagaaaagatcttacagctccaagaaaaaaagraagatttggccaaacaagttctatcagggtctggagaatctgtcaccaagctcaccttggctgacctcagagtcctttttggcatctaacctcctgtggataagggctcagaatagcaccattgctgtgatgttgcacctgtaaccatctttttatgggtggagcagagagtcaatccctgcagccaccctgcagcgcatctctgcagttctctcagtgcaggcagttcttcctctcaggctgaagatcaaggagatgctttgtacatgaacagatgctgagtatctgttatcattgtattgtttagtgtcagtgtatcatttagtatttgtatcactgtaccatttagtgttgtatatcactcagtcatttaatattggttatcaccatacagtttaatatttgtatcatttggttcattgtatcgtttagtatttctattataacatttctatttgtagtatttgtataatatttgtgtcatttttaatagtatttgtatttttacaaatttgcagtatttgtagcatttagtatcattgtttcatttagtatttggtacaatctaataaatactaatccagtccaatactaatccaatccaatactaataatactattggtacaatccaatactaataatactattggtacaatccaatactaataatactaacagtagtattgatacaatctaataaataatgtgtttgacagtgaaaaaaaaaaaaaaaaaaaactcga

SEQ ID NO: 1130 - DNA, 1271 bp, Homo sapiens
ggcacgagatcttgacagtattatctgtacctcctcatgaggcagataacctagatcccagtgacgactcgttgggacaatcattttatgattacacagaaaagcaagcagtgcccatatcggtccccagatacaaacatgtggagcagaatggtgagaagtttgtggtatataatgtttacatggcagggaggcagctgtgttctaagcggtaccgggagtttgctatcctacaccagaacctgaagagagagtttgccaactttacatttcctcgactcccagggaagtggccattttcattatcagaacaacaattagatgcccgacgtcggggattggaagaatatctagaaaaagtgtgttcaatacgagtaattggtgagagtgacatcatgcaggaattcctatcagaatccgatgagaactacaatggtgtgtccgacgtagagctgagagtagcattaccagatggaacaacggttacagtcagggttaaaaagaacagtactacagaccaagtatatcagtacgtaaattggcacctaatgagtttcctcacaaactctacattcagaattatacatcagctgtgccaggcacctgcttgaccattcgaaagtggctttttacaacagaagaagaaattctcttaaatgacaatgaccttgctgttacctacttctttcatcaggcagtcgatgatgtgaagaaaggttacatcaaagcagaagaaaagtcctatcaattacagaagctatacgaacaaagaaaaatggtcatgtacctcaacatgctaaggacttgtgagggctacaatgaaatcatctttccccactgtgcctgtgactccaggaggaaggggcacgttatcacagccatcagcatcacgcactttaaactgcatgcctgcactgaagaaggacagctggagaaccaggtaattgcatttgaatgggatgagatgcagcgatgggacacagatgaagaagggatggccttctgtttcgaatatgcacgaggagagaagaagccccgatgggttaaaatcttcacgccatatttcaattacatgcatgagtgcttcgagagggtgttctgcgagctcaagtggagaaaagagaacattttccagatggcgaggtcacagcagagagatgtggccacctagcctttccttatccccttcccttcccttcacccccatcctcttactcctttcatgtcccatttcagacagagtaaccattaacaaaaaaaaaaaaaaaaaa

SEQ ID NO: 1131 - DNA, 2455 bp, Homo sapiens
  SITE (1769): n equals a,t,g, or c
  SITE (2433): n equals a,t,g, or c
  SITE (2434): n equals a,t,g, or c
gggctcggcgcactccactgaccgtcccgacgatgctacgcgcgcccggctgcctcctccggacctccgtagcgcctgccgcggccctggctgcggcgctgctctcgtcgcttgcgcgctgctctcttctagagccgagggacccggtggcctcgtcgctcagcccctatttcggcaccaagactcgctacgaggatgtcaaccccgtgctattgtcgggccccgaggctccgtggcgggaccctgagctgctggaggggacctgcaccccggtgcagctggtcgccctcattcgccacggcacccgctaccccacggtcaaacagatccgcaagctgaggcagctgcacgggttgctgcaggcccgcgggtccagggatggcggggctagtagtaccggcagccgcgacctgggtgcagcgctggccgactggcctttgtggtacgcggactggatggacgggcagctagtagaraagggacggcaggatatgcgacagctggcgctgcgtctggcctcgctcttcccggcccttttcagccgtgagaactacggccgctgcggctcatcaccagttccaagcaccgctgcatggatagcagcgccgccttcctgcaggggctgtggcagcactaccaccctggcttgccgccgscggacgtcgcagatatggagtttggacctccaacagttaatgataaactaatgagattttttgatcactgtgagaagtttttaactgaagtagaaaaaaatgctacagctctttatcacgtggaagccttcaaaactggaccagaaatgcagaacattttaaaaaaagttgcagctactttgcaagtgccagtaaatgatttaaatgcagatttaattcaagtagcctttttcacctgttcatttgacctggcaattaaaggtgttaaatctccttggtgtgatgtttttgacatagatgatgcaaaggtattagaatatttaaatgatctgaaacaatattggaaaagaggatatgggtatactattaacagtcgatccagctgcaccttgtttcaggatatctttcagcacttggacaaagcagttgaacagaaacaaaggtctcagccaatttcttctccagtcatcctccagtttggtcatgcagagactcttcttccactgctttctctcatgggctacttcaaagacaaggaacccctaacagcgtacaattacaaaaaacaaatgcatcggaagttccgaagtggtctcattgtaccttatgcctcgaacctgatatttgtgctttaccactgtgaaaatgctaagactcctaaagaacaattccgagtgcagatgttattaaatgaaaaggtgttacctttggcttactcacaagaaactgtttcattttatgaagatctgaagaaccactacaaggacatccttcagagttgtcaaaccagtgaagaatgtgaattagcaagggctaacagtacatctgatgaactatgagtaactgaagaacatttttaattctttaggaatctgcaatgagtgattacatgcttgtaataggtaggcaattccttgattacaggaagcttttatattacttgagtatttctgtcttttcacagaaaaacattgggtttctctctgggtttggacatgaaatgtaagaaaagatttttcactggagcagctctcttaaggagaaacaaatctatttagagaaacagctggccctgcaaatgtttacagaaatgaaattctycctacttatatnagaaatctcacactgagatagaattgtgatttcataataacacttgaaaagtgctggagtaacaaaatatctcagttggaccatccttaacttgattgaactgtctaggaactttacagattgttctgcagttctctcttcttttcctcaggtaggacagctctagcattttcttaatcaggaatattgtggtaagctgggagtatcactctggaagaaagtaacatctccagatgagaatttgaaacaagaaacagagtgttgtaaaaggacaccttcactgaagcaagtcggaaagtacaatgaaaataaatatttttggtatttatttatgaaatatttgaacattttttcaataattcctttttacttctaggaagtctcaaaagaccatcttaaattattatatgtttggacaattagcaacaagtcagatagttagaatcgaagtttttcaaatccattgcttagctaactttttcattctgtcacttggcttcgatttttatattttcctattatatgaaatgtatcttttggttgtttgatttttctttctttctttgtaaatagttctgagttctgtcaaatgccgtgaaagtatttgctataataaagaaaattcttgtgactttaaaaaaaaaaaaaaaaaaaaaaaagaatnnctgcggtccgcaagggaattc

SEQ ID NO: 1132 - DNA, 587 bp, Homo sapiens
ggcacgaggaggagcccatcatggcgacgccccctaagcggcgggcggtggaggccacgggggagaaagtgctgcgctacgagaccttcatcagtgacgtgctgcagcgggacttgcgaaaggtgctggaccatcgagacaaggtatatgagcagctggccaaataccttcaactgagaaatgtcattgagcgactccaggaagctaagcactcggagttatatatgcaggtggatttgggctgtaacttcttcgttgacacagtggtcccagatacttcacgcatctatgtggccctgggatatggttttttcctggagttgacactggcagaagctctcaagttcattgatcgtaagagctctctcctcacagagctcagcaacagcctcaccaaggactccatgaatatcaaagcccatatccacatgttgctagaggggcttagagaactacaaggcctgcagaatttcccagagaagcctcaccattgacttcttccccccatcctcagacattaaagagcctgaatgccaaaaaaaaaaaaaaaaaaaaaaaaaaaaaaaaaaaaaaaaaaaaaaaaaaaa

SEQ ID NO: 1133 - DNA, 1069 bp, Homo sapiens
cgcgcggctgctccgctctccccgctccaagcgccgatctgggcacccgccaccagcatggacgctcgccgcgtgccgcagaaagatctcagagtaaagaagaacttaaagaaattcagatatgtgaagttgatttccatggaaacctcgtcatcctctgatgacagttgtgacagctttgcttctgataattttgcaaacacgaaacctaaattcaggtcagatatcagtgaagaactggcaaatgttttttatgaggactctgataatgaatctttctgcggcttttcagaaagtgaggtgcaagatgtawtagaccattgtggatttttacagaaaccaaggccagatgtcactaacgaactggccggtatttttcatgccgactctgacgatgaatcattttgcggtttctcagagagtgagatacaagatggaatgaggctgcagtcagttcgggaaggctgtaggacccgcagccagtgcaggcactctggacctctcagggtggcgatgaagtttccagcgcggagtaccaggggagcaaccaacaaaaaagcagagtcccgccagccctcagagaattctgtgactgattccaactccgattcagaagatgaaagtggaatgaattttttggagaaaagggctttaaatataaagcaaaacaaagcaatgcttgcaaaactcatgtctgaattagaaagcttccctggctcgttccgtggaagacatcccctcccaggctccgactcacaatcaaggagaccgcgaaggcgtacattcccgggtgttgcttccaggagaaaccctgaacggagagctcgtcctcttaccaggtcaaggtcccggatcctcgggtcccttgatgctctacccatggaggaggaggaggaagaggataagtacatgttggtgagaaagaggaagaccgtggatggctacatgaatgaagatgacctgcccagaagccgtcgctccagatcatccgtgacccttccgcatataattcgcccagtggaagaaattacagaggaggagttggagaacgtctgcagcaattctcgag

SEQ ID NO: 1134 - DNA, 2777 bp, Homo sapiens
ggcacgaggtcagcagccggctgctgagaggccggtagcggcggcggtcccgaggggcggcggccgcgctgctccctgagaacgggtcccgcagctgggcaggcgggcggcctgagggcgcggaccatgaagctgtacagcctcagcgtcctctacaaaggcgaggccaaggtggtgctgctcaaagccgcatacgatgtgtcttccttcagctttttccagagatccagcgttcaggaattcatgaccttcacgagtcaactgattgtggagcgctcatcgaaaggcactagagcttctgtcaaagaacaagactatctgtgccacgtctacgtccggaatgatagtcttgcaggtgtggtcattgctgacaatgaatacccatcccgggtggcctttaccttgctggagaaggtactagatgaattctccaagcaagtcgacaggatagactggccagtaggatcccctgctacaatccattacccagccctggatggtcacctcagtagataccagaacccacgagaagctgatcccatgactaaagtgcaggccgaactagatgagaccaaaatcattctgcacaacaccatggagtctctgttagagcgaggtgagaagctagatgacttggtgtccaaatccgaggtgctgggaacacagtctaaagccttctataaaactgcccggaaacaaaactcatgctgtgccatcatgtgatgcagcctgccagaggcccaatgctggaatggcaccatcattcacatcagaactgcagcccctggaaaagaagagacagccatagacgaggagccagagtgggggcagactggccatttttattttgaagttcctgcgagaaatggatggtggaagggtggcgaatgttcaaattcatatgtgtggtagtgattcttggaaagaatttgaggtccccaaaggtgtatttttgggcaaatgaaaccataaactccgactggcttctgtagatgccaaagggctctttttcagctaaccctgggaaggctctgtgggagggaggtcggagccagctgtttctcgatctttggtatatctttggatcttatttgtacattaatgatattaacactccagtggggggtggggagtccctgatgctagggctggggtgggtggagtttgaagactcttgggaaagcctctcctggggccactgttgggggtgggagtgagcccaccacagaggccacaggcaggcccccacttcaggcccaaggcctggggcggggggaacagtcactgggtctcagattctgagactgttgtttagcttacctttctgctaggattggcttcccgcagagggcagggcccatcctaagcagcttccaagtcccacaaaggtggcttgtgggaggatttggaaggagctgcattgtgggcggggagtgtgtgggttgggttcgtaccagcaagtagactaggaactgagcccaggaaagggggatgttttcctggtgtttggatggtcagctgggagtgtccatcatcaggggaagatcaaacacaggtgcactcagctgcccagggcctctgggacacttgccttgacttgcaacttgccttgaacatcacgatcaaagcagcaggtgctgtggtctctcaaaattgatttttatttgactctgtggctctaagactgccttgaaccgcctgaggcctatgcatctgaacaagtgggtctctcccttgagcaccaggagtgggtgccagccggccccgaggattcccagcaccccacctatggtcttgccagcataggcttgctagttccttcttggtcagaggtagctgcagaggggggaggccaagggtttggtctaagctgtgccctgccacctggcaggaggcccactcactgcccaagtcatggcaacaggctggagcagcccaggagatgggcctaaaatgttctggatcccttgggtcctagtgttatgttccagtctgcccacctgtgctcaggatgcagccctgggatccagcacccatggaagcttctgctgggatggtgtcacctatgggttttgaaccagtgtggtatggtccttgggagctctgctctgagcttgccacactgctgagagcacccactgtcctgaccagagtctcagtggtcctgacccccaatgtgggcaggggctgggcaggagggtggggtctgctgtgggttcagaggactccacctcctggctggtttacctgctgctgcccattttctctgggtactgctggccagaggactttagcctacccctgaagagcctgtccatgtcattttcctactgccatagataccctaagcccagggccccttgaggcccagactcagcctgcccactggtgccggagacggagtggagtgggcctggatccgagggatgctacctctccctttcccacttgaggaccctggggagagatgggggcggggaaaatggaggtatgaatttggggtaagaggaagtgagatctccgcttgcaggtcagcccctgccttgcagggcgggctggcttgactcaggccctgtgagatagaggcccagcccagccccacccacagatcccctgctcctgttgtgttctgttgtaaatcatttggcgagactgtattttagtaactgctgcctaacttccctgtgttctatttgagaggcgcctgtctggataaagttgtcttgaaatttaaaaaaaaaaaaaaaaaaaaaaaaaaaaaaaacatccagcgtccg

SEQ ID NO: 1135 - DNA, 603 bp, Homo sapiens
cccacgcgtccggctggactgttttgatctcttttaattgttctgacagatagttggggatgagagccgaataaggtttgcctgaaataactgacactatataatttctgctttggcaaatactaagttctaacttgtcattcctggtagaacaagctttatttttcgagcctagcaatgatctagaagcagatgttatctcagtgccttttgcaatttgttgtgtgggtttttttttttttaaagccacacaataattttggaaaacaatgtatgggtagaacatgtgtctgttaattgcacacaaaaccacttttaatgggtacagagttaaatttgaaggaataagttcataatactgaagctagaaccaagcagaatctgtttttttctgaggagtatcggtagcataaatgtgattataaacatagtacacttgatatatggaggcagtgacagctatttttacaaaatttaaatctgcaaatggattcaacatgtttatgggttattaaaattgtctgatttcttaggttctttatagtacacgtgttgaaaataaatgattaagaattgtttcaagaaaaaaaaaaaaaaaaaaaa

SEQ ID NO: 1136 - DNA, 403 bp, Homo sapiens
ccacgcgtccgaccaattctgatgtagatctcacattatagcataacattacagtagaaggaatgaaaactaagaaagtaaatagtgaacatacagaacttactgcatttccactttaaaacctatttattttccctttttctaattttaaacttttgtggtcattcagaacctaatgtgccttgtgttgacatttccatagacttcacactttacaaaatttactgtttaaaaatacttgtcaaatgatttactgaacctttatacaaaagtaccctttctaaattgaccatttaaaaatgtatttttgtgataccgtcattatgttctgcatttgcctcattttggcagatctacagtatgccattaaagtttagtgttgtttttgaaaaaaaaaaaaaaa

SEQ ID NO: 1137 - DNA, 2968 bp, Homo sapiens
  SITE (454): n equals a,t,g, or c
  SITE (1437): n equals a,t,g, or c
  SITE (2961): n equals a,t,g, or c
  SITE (2964): n equals a,t,g, or c
aattcggcacgagatcctctggctgctctgctcccaccgcccggcccccggcaggccccccacccacaatgcacacaactggaggctcggccaggcgcccgccarctggtacaatgacacctaccccctgtctcccccacaaaggacaccggctgggattcggtatcgaatcgcagttatcgcagacctggacacagagtcaagggcccaagaggaaaacacctggttcagttacctgaaaaagggctacctgaccctgtcagacagtggggacaaggtggccgtggaatgggacaaagaccatggggtcctggagtcccacctggcggagaaggggagaggcatggagctatccgacctgattgttttcaatgggaaactctactccgtggatgaccggacgggggtcgtctaccagatcgaaggcagcaaagccgtgccctgggtgattctntccgacggcgacggcaccgtggagaaaggcttcaaggccgaatggctggcagtgaaggacgagcgtctgtacgtgggcggcctgggcaaggagtggacgaccactacgggtgatgtggtgaacgagaacccggagtgggtgaaggtggtgggctacaagggcagcgtggaccacgagaactgggtgtccaactacaacgccctgcgggctgctgccggcatccagccgccaggctacctcatccatgagtctgcctgctggagtgacacgctgcagcgctggttcttcctgccgcgccgcgccagccaggagcgctacagcgagaaggacgacgagcgcaagggcgccaacctgctgctgagcgcctcccctgacttcggcgacatcgctgtgagccacgtcggggcggtggtccccactcacggcttctcgtccttcaagttcatccccaacaccgacgaccagatcattgtggccctcaaatccgaggaggacagcggcagagtcgcctcctacatcatggccttcacgctggacgggcgcttcctgttgccggagaccaagatcggaagcgtgaaatacgaaggcatcgagttcatttaactcaaaacggaaacactgagcaaggccatcaggactcagcttttataaaaacaagaggagtgcacttttgttttgttttgttctttttggaactgtgcctgggttggaggtctggacagggagcccagtcccgggccccatagtggtgcgggcactggacccccgggccccacggaggccgcggtctgaactgctttccatgctgccatctggtggtgatttcggtcacttcaggcattgactcaaggcctgcctaactggctgggtcgtttcttccatccgacctcgtttcttttctttcctatgttcttttgttcagtgaatatccctagagctcctaccatatgtcaggccctatgcctcaccctgagaacgcagtnagcatgaggtggacctgtttgctgggaaccccaggtcacccccttttcttcctactctgtgcctggagcatcatgtccacccctgcagatccttggaaaagaaaatgtttatgttgcagggtattgcatggtcacgagtgagggcaggcccctggggacacatctgcccacagctgcacaggccagggcgcaggcacatctgttggttctcaggcctcagataaaaccatctccgcatcatatggccagtgaccgctttctcccttcaagaaaattctgtggctgtgcagtactttgaagttttaattattaacctgctttaattaaagcagtttcctttcttataaagtggaatcaccaaatcttatcacacagagcacagtcctgtagttacccagcccgctccagcagtgcgggagattgtaaggaagcggtggcggctggtgaagcaagtctcacatgtcggcgttcttggccaatggatacaaagataaagaaaatgttgcctttttctaggaactgtcagaaatcctcatgcctttcaagacttctgtgaatgacttgaattttttattccctgcctagggtctgtgaacgaggcctgtctcttccctggggtttctttccatggcctttatttctcctcttccagtgggagttttgcaggctcttctctgtggaaacttcacgagcgttggctgggcctcggcttcgctggagtgtactccagggtgaaggcagagtgggatttgagacccaggttaggcacgacccaggctgagaagggacgtttccatcattcacagtgccctccccacagcactacctcaccccgacccccaccctcactcctaccccaccccgcgatcgtcaggggtgccacggtgggccggagggtgccggctctggctgtccctgtgccggtccctcacaaacctctccccctttgaaactcaagcacagctgcgaggagggcagcgaggagggacccctctctcatggttgtctctttcccccgctatgtcataggtagtggaggaagcgaaggaagtgaacgctgaatgtgacgcatttctgaagagctcagctgtcaccgggcatagcctggaagccccaagtctgttctgactttgcctggctgtctccttgacccgcctcctagatcattgtccttgatgtccaggctgggtcatttaaaatagagatgcaatcaggaaggttgggggacttgggactgtggctgaattgagaccttgctgatgtattcatgtcagcacctgagtcacagcccaggtgcccggaagcagcctcttcgcataggcagtgatttgcgattactttaaagctcaccttttttcttcccctctctgttcgctgctgtcagcataatgattgtgttccttccctatgggatccatctgttttgtaaacaataaagcgtctgagggagtgtaaaaaaaaaaaaaaaaaaaaaaaaaaaaaaaaaaaaaaaaaaaaaaaaaaaaaaacaaaaaaaaaaaaaanagnagag

SEQ ID NO: 1138 - DNA, 3021 bp, Homo sapiens
cttgtgaatcagccagtgtgatggctgcgacactggctaatggtggtttctgcccaattactggtgaaagagtactgagccctgaagcagttcgaaatacattgagtttgatgcattcctgtggcatgtatgacttctcagggcagtttgctttccatgttggtcttcctgcaaaatctggagttgctgggggcattcttttagttgtccccaatgttatgggtatgatgtgctggtytcctcctctggataagatgggcaacagtgttaagggaattcacttttgtcacgatcttgtttctctgtgtaatttccataactatgataatttgagacactttgcaaaaaaacttgatcctcgaagagaaggtggtgatcaaaggcattcctttggaccattggactatgaaagtctccaacaagaacttgctttaaaagagacagtatggaaaaaagtgtcacctgagtcaaatgaggacatctctacaactgtagtatatagaatggaaagtctgggagagaaaagctaaagaaatgggttctagtttcagaatgtttcttcatttaatctttcaaacatctttagcttttttttgcaagttataaatatttatttgaggtattttttgttctcaatcttgggtgctggagccataaagcttttttttccttttaatctttgtataaaggcagtagattaagaagtgcatttgttggtctttaaaaagtatttacaagtacataaatttgctttatttttaaaaatacaaaaaggaaaaatttaaattttttttgatgtaattaaaatgttaactatgtggtcagataatcccattttacaatagtaacagaaaattgtaattcttagttctaaaattcacaaattaaactcataagttttgttgcattttgttttttcttttccatttttaaaactaatgtgatgtctttagtggcaatagaaggtacttctatgctaaatacaaaactaaaaaggcaaaataatgaaccccaaattattttatttaaaatagcagtggattataaaattagcttgtgtttacatttatgccatttttggtgatagattggctttacattttaaaaaatttatttaaaaatttatcaaatgctttaaaatatgactcctactttttttattttgcaactcctctgttctgtcagagttgttatatacaggagtgtcttatgttactaaaacattccagccaaagaatttcagatgtgagataatgatgtttcatcaataaaaagctataatggttagttactcagaaggagaaacagtgagtgtcttcaagtgaattgttcacctaaacaattttattttcatattatccacataactttttctatgttatatttaaatatgaatggcaaattttggtttttagcttttacattttattatcttaattttataaatgctaatatttcttttgtgataagttatagcatctcataaagtttgttctatttgaagttttttagagtacttgagaaatgaatttagtctgcaggtagtaagtatgctactaaaatacgttagatctaaatccttttatttggtataaaaatgcaatattgagaatcaaaacttgtttttaagagaactatagattctacacaacctgatttcaagtaattattcatagtatttatagttgtcttggcaaagtgattgtaaaattctgtaggacctattcacacttcttccttcttccatatacttctctggttttccccatagttcccctataatttcaagtttgttgaaacctgttaattttagtgggggattagaagaaaaacttggtggtttcttagcatgatggtgtatgtatgtggtaatggaaagtctgtaaaagtaaatatagtgtagcaaaaaagatttcactgagtattttagatactagtgcaaataaagatagaaaatcttgatcataatgtcttaagtttgggaactgtgatattaagaaaagaaattcccttctagaggtgctggccaaaaagccttttgggctaacttaagtattaaatttatatatttaaataattatattttaagttgtagaggattttcccaaggattttatgcttacttgaatgttctttgaatgttcagatgcatatcctaactggatgcttctcaaggccttactgcatatttgtgttgcatatttatgttagttgcaccagggccatttgtagtttgggcaaccgaatgccttaattggaaaaaaggcattgtggtttcccctatgatctaaattgttacattttaccatttcattccgaagttggttttactttattaaatgaagatttagttttcatatcgtatacatagctgtatagatttcaaaattaggttgttaatttgtgtcacttactatttttgtgttggtaatgctttaaatgcatacttaaaaatgaagtactgttatctaagctactgtgtttagaaaatgttaagaatgagcagaaatttttatagaaaagtataaacggaagaagagataagatactgcgaataggccctcaaacttaaaaaagaaaaaactttgccagttttaaggacatattttgattctttcagtattcttaacacctttttaaacaaagttcttgatagtacccactattattgggtttgttttatgccattattgattcttgatattcaagcatttacaatgtagcatatttgattttcttttttctttctttttttggcatcattaacatttcatttgaaatgcatattgttcttgaagtactttgtttttagcataaatgttgtgcattttatcttagtgtttggatgaaaacatttgtgttgtttagctttcatttgctttgtatatttaataatgtacctttattttccagtatgcctacattttgtattgcacaataaatttattttaagctgaaaaaaaaaaaaaaaaaaaaaaaaaaaaaaaaaaaaaaaaaaaaaaaaaaaaaaagggcggccgc

SEQ ID NO: 1139 - DNA, 3953 bp, Homo sapiens
gcggacgcgtttggcaacagcgagggcaaagagctggtggcctcaggtgaaaataaaataaaacagggtctgttacctagcttggaagatttgctgttctatacaattgctgaaggacaagagaaaatacctgttcataaatttattacagcactcaaatctacaggattgcgaacgtctgatcccaggttgaaagagtgtatggatatgttaagattaactcttcaaacaacatcagatggtgtcatgctagacaaagatctttttaaaaaatgtgttcagagcaacattgttttgttgacacaagcatttagaagaaagtttgtgattcctgactttatgtcttttacctcacacattgatgagttatatgaaagtgctaaaaagcagtctggaggaaaggttgcagattatattcctcaactggccaaattcagtcccgatttgtggggtgtgtctgtttgtacagtagatggacagaggcattctactggagataccaaagttcccttctgtcttcagtcctgtgtaaaacctttgaaatatgccattgctgttaatgatcttggaactgaatatgtgcatcgatatgttggaaaagagccgagtggactaagattcaacaaactatttttgaatgaagatgataaaccacataatcctatggtaaatgctggagcaattgttgtgacttcactaataaagcaaggagtaaataatgctgaaaaatttgactatgtcatgcagtttttgaataagatggctggtaatgaatatgttggattcagtaatgcaacgtttcagtctgaaagagaaagtggagatcgaaattttgcaataggatattacttaaaagaaaagaagtgttttccagaaggcacagacatggttggtatattagacttctacttccagctgtgctccattgaagtgacttgtgaatcagccagtgtgatggctgcgacactggctaatggtggtttctgcccaattactggtgaaagagtactgagccctgaagcagttcgaaatacattgagtttgatgcattcctgtggcatgtatgacttctcagggcagtttgctttccatgttggtcttcctgcaaaatctggagttgctgggggcattcttttagttgtccccaatgttatgggtatgatgtgctggtctcctcctctggataagatgggcaacagtgttaagggaattcacttttgtcacgatcttgtttctctgtgtaatttccataactatgataatttgagacactttgcaaaaaaacttgatcctcgaagagaaggtggtgatcaaaggcattcctttggaccattggactatgaaagtctccaacaagaacttgctttaaaagagacagtatggaaaaaagtgtcacctgagtcaaatgaggacatctctacaactgtagtatatagaatggaaagtctgggagagaaaagctaaagaaatgggttctagtttcagaatgtttcttcatttaatctttcaaacatctttagcttttttttgcaagttataaatatttatttgaggtattttttgttctcaatcttgggtgctggagccataaagcttttttttccttttaatctttgtataaaggcagtagattaagaagtgcatttgttggtctttaaaaagtatttacaagtacataaatttgctttatttttaaaaatacaaaaaaaaaatttaaattttttttgatgtaattaaaatgttaactatgtggtcagataatcccattttacaatagtaacagaaaattgtaattcttagttctaaaattcacaaattaaactcataagttttgttgcattttgttttttcttttccatttttaaaactaatgtgatgtctttagtggcaatagaaggtacttctatgctaaatacaaaactaaaaaggcaaaataatgaaccccaaattattttatttaaaatagcagtggattataaaattagcttgtgtttacatttatgccatttttggtgatagattggctttacattttaaaaaatttatttaaaaatttatcaaatgctttaaaatatgactcctactttttttattttgcaactcctctgttctgtcagagttgttatatacaggagtgtcttatgttactaaaacattccagccaaagaatttcagatgtgagataatgatgtttcatcaataaaaagctataatggttagttactcagaaggagaaacagtgagtgtcttcaagtgaattgttcacctaaacaattttattttcatattatccacataactttttctatgttatatttaaatatgaatggcaaattttggtttttagcttttacattttattatcttaattttataaatgctaatatttcttttgtgataagttatagcatctcataaagtttgttctatttgaagttttttagagtacttgagaaatgaatttagtctgcaggtagtaagtatgctactaaaatacgttagatctaaatccttttatttggtataaaaatgcaatattgagaatcaaaacttgtttttaagagaactatagattctacacaacctgatttcaagtaattattcatagtatttatagttgtcttggcaaagtgattgtaaaattctgtaggacctattcacacttcttccttcttccatatacttctctggttttccccatagttcccctataatttcaagtttgttgaaacctgttaattttagtgggggattagaagaaaaacttggtggtttcttagcatgatggtgtatgtatgtggtaatggaaagtctgtaaaagtaaatatagtgtagcaaaaaagatttcactgagtattttagatactagtgcaaataaagatagaaaatcttgatcataatgtcttaagtttgggaactgtgatattaagaaaagaaattcccttctagaggtgctggccaaaaagccttttgggctaacttaagtattaaatttatatatttaaataattatattttaagttgtagaggattttcccaaggattttatgcttacttgaatgttctttgaatgttcagatgcatatcctaactggatgcttctcaaggccttactgcatatttgtgttgcatatttatgttagttgcaccagggccatttgtagtttgggcaaccgaatgccttaattggaaaaaaggcattgtggtttcccctatgatctaaattgttacattttaccatttcattccgaagttggttttactttattaaatgaagatttagttttcatatcgtatacatagctgtatagatttcaaaattaggttgttaatttgtgtcacttactatttttgtgttggtaatgctttaaatgcatacttaaaaatgaagtactgttatctaagctactgtgtttagaaaatgttaagaatgagcagaaatttttatagaaaagtataaacggaagaagagataagatactgcgaataggccctcaaacttaaaaaagaaaaaactttgccagttttaaggacatattttgattctttcagtattcttaacacctttttaaacaaagttcttgatagtacccactattattgggtttgttttatgccattattgattcttgatattcaagcatttacaatgtagcatatttgattttcttttttctttctttttttggcatcattaacatttcatttgaaatgcatattgttcttgaagtactttgtttttagcataaatgttgtgcattttatcttagtgtttggatgaaaacatttgtgttgtttagctttcatttgctttgtatatttaataatgtacctttattttccagtatgcctacattttgtattgcacaataaatttattttaagctgaaaaaaaaaaaaaaaaaaaaaaaaaaaaaaaaaaaaaaaaaaaaaaaaaaaaaaagggcggccgc

SEQ ID NO: 1140 - DNA, 3953 bp, Homo sapiens; identical to SEQ ID NO: 1139

SEQ ID NO: 1141 - DNA, 658 bp, Homo sapiens
gcagtttatcctttcccaggttgcactcctggagcaggtgaatgccttggtgcccatgctggacagtgctcacatcaaagccgttcctgagcatgctgcccgcctgcagcgcttggcccagatccacattcagcagcaggaccagtgtgtggaaatcactgaggagtccaaggctctcctggaggaatacaacaagactacaatgcttctctccaagcaattcgtgcagtgggatgagctactttgccagctagaggccgccacgcaagtgaagccagcagaggagtgatagctgctccccatcccaaagtgggcctgggcagtcaggctccagggccctatgccaacctgcctttgttacaaggcagaggaagctttgtatttattggcttcaaggcccacctctctgtactctgggctctaaagttggaggtcaggttacctgaggtttgcaatttgcaacacccaccctccccccaatcagtgttcttatttcagtgacaataaaccatagagatgaaaaaaaaaaaaaaaaaaaaaaaaaaaaaaaaaaaaaaaaaaaaaaaaaaaaaaaaaaaaaaaaaaaaaaaaaaaaaaaaaaaaaaaaaaaaaaaaaaaaaaaaaaaaaaaaaaaaaaaaaaaaaaaaaaaaaaaaaaa

SEQ ID NO: 1142 - DNA, 633 bp, Homo sapiens
cccacgcgtccggccacttggaatatatatcgatacattatggtgccgagtggtaacatgggagtgtttgatccaacagaaatacacaatcgagggcagctgaagtcacacatgaaagaagccatgatcaagcttggtttccacttgctctgcttcttcatgtatctttatagtggtagcaactgcccttgctaatcaccgtaacctcggctgagaaagaagaggaagcgaaatccaagatgcagctcagttcatcaaagcctagcaggtcccctcagctgccttttcatgcctgccacagactacagtaggacaaaacctgacctggtctttgaagttaagagctaagaaagcttcctatagtagtatctcccatggcacttaccacattctatctggtattacaattatttgtatgcaattaatcactcttagattgtatgttcctggagggcagaatatgcccattcatatttgtatcttcttccttctgctcttggcacctaacacagtgccttgcacacaaacaataaatgattgttgagtgaataaaaaaaaaaaaaaaaaaaaaaaaaaaaaaaaaaaaaaaaaaaaaaaaaaaaaaaaaaaaaaaaaaaaaaaaaaaaaaaaaaa

SEQ ID NO: 1143 - DNA, 275 bp, Homo sapiens
ccacgcgtccgagcttcactccttgctggccagggagttggggactcagagggaccacttggggccagccagactggcctcaatggcggactcagtcacattgactgacggggaccagggcttgtgtgggtcgagagcgccctcatggtgctggtgctgttgtgtgtaggtcccctggggacacaagcaggcgccaatggtatctgggcggagctcacagagttcttggaataaaagcaacctcagaacacttaaaaaaaaaaaaaaaaaaaaaa

SEQ ID NO: 1144 - DNA, 1439 bp, Homo sapiens
ccacgcgtccgggctctctcatttccagcagacacccttcctcttacccagtggagaggactcagggaatcttggcagaaccctgctggcaccatcagcggcgtatgctcctcctcgtttctgtcttttcacccgttctcttctctcggtcttccactgtggagatggatgtggaacctttttgcttagtcctgtcttctgcctttcctgagattaccccaccgatctcctgtttgtgtctcaatatgttcttttctctgctcagatctccccattcttaaaagaactgtcccctcctcctcgcctccttcttcaattctgcccctcctgtgtctgagaccgttcacaggaacgctctgccaaggatgcctgactggcccccagcaagccactcctggggcccttgtgtgctggctcccttccagccctgccttcctgcttctgctctcagactccgtggtctctcttgggcttcagggcctgggacctcctggcagcagtgggctaccccaccccccaaccccacacacacgggaaaccaccctggtgaccagatatatatatatatatatatatacacatatatatatgcatgtgtatgtatttacacacacctgggaaatatatatatctggtgtatatatatttacacacacctgggaaactgccctgatgaccagagcacactgtctttctcctctgccctctgagcacctcaagctgctgtgcctggcgctcttcttctgttctcccctcacagaattcacgttcctccacagtctcagagaacatctttgaggaaatggtctccccatatgggactctcacttctgtcagtcctgaacatcagtgggtgaggacagggctgggcttggccctcagaagaggagaggagcacctgcctccggggagggtccctatcccaagaggtctgtccctaaggctgggatggggcttcttggtctccacaggttcactctccaccagccagctcttcttcctgactccctgtgtctgtgctgggcacctcctcctgctgcccaccaggcttggagtttgggaatcatctccaatacttttctctccctgtcctgcagctacctgtttgtttggtcttaacgggtcccccttccctttcctccctaccccagtgcccacagagaatatctaacagcaaaacgtacttttcctccactggactccaccctggcttggagcagatatggaattcccagttctgcccacagcctcctcccttagctcccgtccccagctgctcacccccaaacacccccatcctcctgccacagttttaaaaagtgttgcttggattgggccatcgcctgcttagaaacttaaatgtcttttgtggcttctcaaataaacatttaggcccttagtttggaaaaaaaaaaaaaaaaaaaaaaaaaaaaaaaaaa

SEQ ID NO: 1145 - DNA, 1020 bp, Homo sapiens
gggggacacgggaaaggcccgtgggaataggcctttgaggggaagcacgctgatctcttgttctgcagcgcatgcttgggatggtatgcgcatgccttctctcactaagactaggactgcttacagaatgcgaatataagtatccttatttgggagaaaagtacattttcaagggctggtaaaatgacgtggaggaagggaggatccagggagccttctgaagagtattgtcaggatgtctcttctctttcagccacctggatatgtttcacattttgtttcccaaacaaggactagattggatcccagaagggaatggtttccttagtatacattccgaattcctttgtaagggaaaaatccacttcatctggtctaagaatacataagaacaaatgaaaatgttgtggctggagatgttcctgagttaatatcaggatgtttgcctgctggtttctgttttaccaaacaaaacatagctgccaattcatccatctgtaaaagtgctccttgtggaccccctcaagagaagtactggttattttatttgcagaaaacgttttatkgggagttgttactttctgtgactgaagtggggaacatgagggtccctttaccgagccctcatattccatgtgtactctgtattttattgaggctgtttcccagtcagaacagcgtctctctttgtttgtcattccaaatctttcagtgtctttagggctctgagggccctggagagcctcacccaacctctcatccttccatggctgtccccacctctgtgcacttatgagtcaatgttgccgcacttcattacatgctgttcatattacagcattataagattttttcttttaaaagcctatcttcttcaatcgggtagtaagaccattgtgggttgaggcatgtttcatacttcccacataatcactccagacttaaaacagaaccggaaatacatgaaataaaaaattatttttctgttctcaaataaaaaaaaaaaaaaagggcggccgc

SEQ ID NO: 1146 - DNA, 1076 bp, Homo sapiens
gagacaataggggaagagatttttatgttttgttcactgctgttttcacagtatgttcaatggctcttggcacagaatagacaatattcgttgactgaatgctattggacattatctgtttattgaattagtgataaatattttaccctacgttgatataaatggacatattctacaggtaacaaccctttatttctaaagcatgatctcaatgtattataaattactgaagtagattagttcttttctttttttttttgagacggagtctcgctgtgtcacccaggttggagtgcagtggcgtgatctcgtttcactgcaacctccgcctcccaggttcaagtgattctcccgcctcagcctcccgagtagctgggattacaggcatacaccacccgcccagcgaatgtttgtagagacggggtctcgctgtgttgccaggctggtcatcaactcctgacctcaggtgatccacccacctcggcctcccaaagtgctgggattacaggcgtgaaccacctcgcccggccgattagttcttaaagtagtaatagacatctcccctccacctttgggaactgcctcctctagggagaagagtaccccgtgagttaggaagccaggtgatatggtttgaatatttgttctctccaaatctcacgtggcaatgtgacctcctgtgttggaggtagggcctggtgagaggtgtttggatcatggggcagatgcctcctgaatggcttggtgtcatcctgtaacaagtgtattcttgccctatttgttcccatgagaacctactgtttaaaagagtctggtacttcctcttctcgctctctctctctctcgcttctgtctcaccatgtgacatgctggctttccttcaccttctgccatgagtagaaggttcctggggccctcaccagaaaaaaatgctggtgccatgcttcttgtacagcctgtgggaccatgagccaaataaacctcttttctttataaattaccctagcctcaggtatttctttgtatcaacaacaacaacaagggcacacaccaaaaaaaaaaaaaaaaaactcgag

SEQ ID NO: 1147 - DNA, 1109 bp, Homo sapiens
ggcacgagctggagtccgacctgccaagtgccgtgacacttctgaaaaatctccaggagcaagtgatggctgtaactgcacaagtgaaatcactgacacaaaaagttcaagctggtgcctatcctacagaaaagggtctcagcttcttggaagtgaaagaccagctgctgctcatgtaccttatggatttgacccacctcattctggacaaagcctcaggaggatctcttcagggacatgatgcagttttgagactggtagagattcgaacggttttggaaaagcttcgtcccttggaccaaaagctgaagtatcaaattgacaagctgatcaagactgcagtgacaggcagccttagtgagaatgacccacttcgttttaagcctcatcccagcaatatgatgagcaagttgagctctgaggatgaggaggaagatgaagcagaagatgaccagtctgaggcttcagggaagaaatctgtgaagggagtgtctaagaaatatgttcctccacgcttggttccagtacattatgatgaaacagaagctgagcgggagaagaagcgtctagaacgagccaagagacgggcattgagcagctctgtcattcgtgaacttaaggagcagtactcagatgctccagaggaaatccgtgatgctcggcatccccatgttacccgccagagtcaggaggaccaacacaggattaactatgaggagagcatgatggtgcgtttgagcgtcagtaagcgagagaaaggacggcgaaaacgagcaaatgtcatgagctcacaacttcattcccttacacacttcagtgacatcagtgctttgacagggggaactgttcatcttgatgaggatcagaatcctattaagaagcggaagaagatacctcagaaaggtcggaagaaaaaaggttttcggaggcggcggtgattatgggtgtacatatttgtatattttttgtcatcctgagatacttctaatttcattgtatataggtggttttccctggaattcattaattgtttgctttggacatgtggaaagagccttactaataaaattgattttacttatgaaaaaaaaaaaaaaaaaaaaaaaaaa

SEQ ID NO: 1148 - DNA, 1963 bp, Homo sapiens
  SITE (3): n equals a,t,g, or c
atncaagctctaatacgactcactataggggggggagcgcaagcgaggcagccatgtcttatcccgctgatgattatgagtctgaggcggcttatgacccctacgcttatcccagcgactatgatatgcacacaggagatccaaagcaggaccttgcttatgaacgtcagtatgaacagcaaacctatcaggtgatccctgaggtgatcaaaaacttcatccagtatttccacaaaactgtctcagatttgattgaccagaaagtgtatgagctacaggccagtcgtgtctccagtgatgtcattgaccagaaggtgtatgagatccaggacatctatgagaacagctggaccaagctgactgaaagattcttcaagaatacaccttggcccgaggctgaagccattgctccacaggttggcaatgatgctgtcttcctgattttatacaaagaattatactacaggcacatatatgccaaagtcagtgggggaccttccttggagcagaggtttgaatcctattacaactactgcaatctcttcaactacattcttaatgccgatggtcctgctccccttgaactacccaaccagtggctctgggatattatcgatgagttcatctaccagtttcagtcattcagtcagtaccgctgtaagactgccaagaagtcagaggaggagattgactttcttcgttccaatcccaaaatctggaatgttcatagtgtcctcaatgtccttcattccctggtagacaaatccaacatcaaccgacagttggaggtatacacaagcggaggtgaccctgagagtgtggctggggagtatgggcggcactccctctacaaaatgcttggttacttcagcctggtcgggcttctccgcctgcactccctgttaggagattactaccaggccatcaaggtgctggagaacatcgaactgaacaagaagagtatgtattcccgtgtgccagagtgccaggtcaccacatactattatgttgggtttgcatatttgatgatgcgtcgttaccaggatgccatccgggtcttcgccaacatcctcctctacatccagaggaccaagagcatgttccagaggaccacgtacaagtatgagatgattaacaagcagaatgagcagatgcatgcgctgctggccattgccctcacgatgtaccccatgcgtatygatgagagcattcacctccagctgcgggagaaatatggggacaagatgttgcgcatgcagaaaggtgacccacaagtctatgaagaacttttcagttactcctgccccaagttcctgtcgcctgtagtgcccaactatgataatgtgcaccccaactaccacaaagagcccttcctgcagcagctgaaggtgttttctgatgaagtacagcagcaggcccagctttcaaccatccgcagcttcctgaagctctacaccaccatgcctgtggccaagctggctggcttcctggacctcacagagcaggagttccggatccagcttcttgtcttcaaacacaagatgaagaacctcgtgtggaccagcggtatctcagccctggatggtgaatttcagtcagcctcagaggttgacttctacattgataaggacatgatccacatcgcggacaccaaggtcgccaggcgttatggggatttcttcatccgtcagatccacaaatttgaggagcttaatcgaaccctgaagaagatgggacagagaccttgatgatattcacacacattcaggaacctgttttgatgtattataggcaggaagtgtttttgctaccgtgaaacctttacctagatcagccatcagcctgtcaactcagttaacaagttaaggaccgaagtgtttcaagtggatctcagtaaaggatctttggagccagaaaaaaaaaaaaaaaaaaaaaaaaaaaaaaaaaaaaaaaaaaaaaaaaa

SEQ ID NO: 1149 - DNA, 808 bp, Homo sapiens
  SITE (794): n equals a,t,g, or c
gaattcggcacgagaaaagacctcatttataataaggtcactccaacatttcaccactggaagattgatgacaagaagtttggtcttacgtttcaaagtcctgctgatgctagggcttttgatagaggtatccgaagagctatagaggatatttctcaaggatgccccgaatcaaaaaatgaagctgaaggggcagatgacttacaagcaaatgaagaggattcttccagttctctagtgaaggatcacctttttcagcaagagacagttgttaccagtgagccttatagaagctcaaatataagaccttctccctttgaagatctgaatgccagaagagtctacatgcaaagccaagccaatcagataacatttggtcagccaggcttggacattcagagcagaagtatggaatacgtacagcggcaaatatccaaggaatgtggaagcctaaagtcccaaaatagggtccctttgaaatcaatcagacatgtcagctttcaagatgaggatgagattgtcagaataaaccctcgagatatcttaatacgtcgctatgcagactacagacatcctgacatgtggaaaaatgacttggaaagagatgatgctgattccagtattcagttttctaaaccagacagtaaaaaatcagactatctgtactcttgtggggatgagactaagttaagttcacccaaagactctgtggtatttaagacgcagccttcctcattaaaaattaagagtcaaaacgaggaaaagaggatggtgaacgttctcgttgcgtatanggccaggaaagttt

SEQ ID NO: 1150 - DNA, 1036 bp, Homo sapiens
ggcacgaggcggcttctacgctccggcactctgagttcatcagcaaacgccctggcgtctgtcctcaccatgcctagcctttgggaccgcttctcgtcgtcgtccaccttccagctgaccctcgtgctgcgcctggactcacgactctggcccaagatccaggggctgtttagctccgccaactctcccttcctccctggcttcagccagtccctgacgctgagcactggcttccgagtcatcaagaagaagctgtacagctcggaacagctgctcattgaggagtgttgaacttcaacctgagggggccgacagtgccctccaagacagagacgactgaacttttggggtggagactagaggcaggagctgagggactgattcctgtggttggaaaactgaggcagccacctaaggtggaggtgggggaatagtgtttcccaggaagctcattgagttgtgtgcgggtggctgtgcattggggacacatacccctcagtactgtagcatgaaacaaaggcttaggggccaacaaggcttccagctggatgtatgtgtagcatgtaccttattatttttgttactgacagttaacagtggtgtgacatccagagagcagctgggctgctcccgccccagcccggcccagggtgaaggaagaggcacgtgctcctcagagcagccggagggaggggggaggtcggaggtcgtggaggtggtttgtgtatcacttgggatctttgacacttgaaaaattacacctggcagctgcgtttaagccttcccccatcgtgtactgcagagttgagctggcaggggaggggctgagagggtgggggctggaacccctccccgggaggagtgccatctgggtcttccatctagaactgtttacatgaagataagatactcactgttcatgaatacacttgatgttcaagtattaagacctatgcaatattttttacttttctaataaacatgtttgttaaaacaaaaaaaaaaaaaaaaaaaaaaaaaaaaaaaaaaaaaaaaa

SEQ ID NO: 1151 - DNA, 938 bp, Homo sapiens
  SITE (3): n equals a,t,g, or c
  SITE (28): n equals a,t,g, or c
  SITE (41): n equals a,t,g, or c
  SITE (43): n equals a,t,g, or c
  SITE (48): n equals a,t,g, or c
ttnaaggggagggggactaatgtaatgncactgccctatantnaggtncgcctgcaggtaccggtccggaattcccgggtcgacccacgcgtccgagaaactgcgcaactgcagttcgcctggcctgcctagcaggcgagctccgttgcacgctgagcgatgactgcattccactcacgtggcgctgcgacggccacccagactgtcccgactccagcgacgagctcggctgtggaaccaatgagatcctcccggaaggggatgccacaaccatggggccccctgtgaccctggagagtgtcacctctctcaggaatgccacaaccatggggccccctgtgaccctggagagtgtcccctctgtcgggaatgccacatcctcctctgccggagaccagtctggaagcccaactgcctatggggttattgcagctgctgcggtgctcagtgcaagcctggtcaccgccaccctcctccttttgtcctggctccgagcccaggagcgcctccgcccactggggttactggtggccatgaaggagtccctgctgctgtcagaacagaagacctcgctgccctgaggacaagcacttgccaccaccgtcactcagccctgggcgtagccggacaggaggagagcagtgatgcggatgggtacccgggcacaccagccctcagagacctgagctcttctggccacgtggaacctcgaacccgagctcctgcagaagtggccctggagattgagggtccctggacactccctatggagatccggggagctaggatggggaacctgccacagccagaactgaggggctggccccaggcagctcccagggggtagaacggccctgtgcttaagacactcctgctgccccgtctgagggtggcgattaaagttgcttcacatcctcaaaaaaaaaaaaaaaaaaaaa

SEQ ID NO: 1152 - DNA, 902 bp, Homo sapiens
ggcacgagctgacacactagtggcctcgagtcactgatagtggtgcctcctccttaccttggcaagcccttgtagccctctgagccctcatcctgcaggcagagcccctcagtgctctgagaaacctgccctgaactcaccgcctcccctgcctgggcactccctcctccctgcgcccacagcccccatgccaatctccgtcagctctttctgtgctgctgtaattgttggtttgcctgtctcctttgagctgtgggcattgccggggtagggtggtgtcttcaccacagctccagaaggcactggtgggatgtggagtcaggagcaaccagagaccccccaatactagaatgggtttgagcttggggtggggtggatggggaagacttactctgaatgttcgttcaccatccgtgggcaccaggtctgtgccaagcacagggactccaggggcagctgccattcgttccagtgatgtatttggggccttctcaggtgaggaagccaaggtggccaaggccctcggtcccctgccctgatagggcttacctgtgggtgggggagggagaccacacatgtcagaggtagtgaaggccgctccaaatagtgactggggccaggcaggcggaaaagagaacagaagagaatccagaagtgttcagacagaactagggacaacagaggggcctccatggtggcatgggtcagcagagcatggagcaggcagaggaagcctatctgtggggctgggtacatttctctgagactcacggaatgtaagtgttgaggtttctgcaaagagggcgcaggcctgcagtgacggttcagatattgataacccatcccccttggcaggtgggggcttaggcatccatattggattcaaaaaaaaaaaaaaaaaa

SEQ ID NO: 1153 - DNA, 1044 bp, Homo sapiens
cgggattcgcacgagagraaagcacattgtcatctttaatcctttccatttatttgcctcttgatagatgacctttatatttttgctttttgacaatttctacctgaggcatgatgtaactaaaatttctaacatgatagtggtagttctctggattaatttatgctcatggttttgctttgtttctcccttaccaaaatgctcttttcagtattacacaagaaaaagatcatgatttgcatcatgatgtacatagcaaatttcatgtatgatcgtgtttcctgttccatcacatttctggcattttttttaacccactgggacattaggatgtcataacataattggatgttagacataggttgagaaatcaagggtagtggtagatggaggctgacagacaccttccagatccactttagaggtactgagtattcctaaaccagttatgtaatttgcatgtggtcatatagctagttggtggccaaatcagggatacaacatgtatgtgagtatcattctatcatctatctatctacttattgacagataagaatatacttgctttgtgtaaatgattaccctttgattttgtggttgtcacaaacacatgaaactattcatggatggacctacctgtctgatgatggtggtagtgatgatgatgatgatgttatcctaggatataaccactattctttaacccttgaaactgaggtgcataaggtacaataattcgcccaagctcacatagataacaagtttgcagggctagaaatcttactgagtttcatctgaaatgcagactttcagagagagagagagaggatgcttagtgtgccatatcttacgtctaacaatggctaatgaatctttaaagagaggactactccctagacatgagcgtgttaggactctgttcccatttctacacatttatgcttatatgagggccattgattggccaattttagcatttctttgtactcgtgggatgatatttaaaaatacaaaaaaaaaaaaaaaaaaaaaaaaaaaactcga

SEQ ID NO: 1154 - DNA, 1417 bp, Homo sapiens
  SITE (551): n equals a,t,g, or c
ggcagagctcggcatcactcgcccagtgccaaccaacacttgtgtcatcttgggcttggctggaggtgttatcatttatatcatgaagcactcgttgagcgtgggggaggtgatcgaagtcctggaagtccttctgatcttcgtttatctcaacatgatcctgctgtacctgctgccccgctgcttcacccctggtgaggcactgctggtattgggtggcattagctttgtcctcaaccagctcatcaagcgctctctgacactggtggaaagtcagggggacccagtggacttcttcctgctggtggtggtagtagggatggtactcatgggcattttcttcagcactctgtttgtcttcatggactcaggcacctgggcctcctccatcttcttccacctcatgacctgtgtgctgagccttggtgtggtcctaccctggctgcaccggstcatccgcagaatcccctgctctggcttcttcagtttctcttccagacagacacccgcatctacctcctagcctattggtctctgctggccaccttggnctgcctggtggtgctgtaccagaatgccaagcggtcatcttccgagtccaagaagcaccaggcccccaccatcgcccgaaagtatttccacctcattgtggtagccacctacatcccaggtatcatctttgaccggccactgctctatgtagccgccactgtatgcctggcggtcttcatcttcctggagtatgtgcgctacttccgcatcaagcctttgggtcacactytacggagcttcctgtccctttttctggatgaacgagacagtggaccactcattctgacacacatctacctgctcctgggcatgtctcttcccatctggctgatccccagaccctgcacacagaagggtagcctgggaggagccagggccctcgtcccctatgccggtgtcctggctgtgggtgtgggtgatactgtggcctccatcttcggtagcaccatgggggagatccgctggcctggaaccmaaaagacttttgaggggaccatgacatctatatttgcgcagatcatttctgtagctctgatcttaatctttgacagtggagtggacctaaactacagttatgcttggattttggggtccatcagcactgtgtccctcctggaagcatacactacacagatagacaatctccttctgcctctctacctcctgatattgctgatggcctagctgttacagtgcagcagcagtgacggaggaaacagacatggggagggtgaacagtccccacagcagacagctacttgggcatgaagagccaaggtgtgaaaagcagatttgatttttcagttgattcagatttaaaataaaaagcaaagctctcctaaaaaaaaaaaaaaaaaaaactcga

SEQ ID NO: 1155 - DNA, 1377 bp, Homo sapiens
ttggcagtcccctgacaccctaagaccggcatctgtcgatgttatttccccagcatggccgaaacagaagccctgtcgaagcttcgggaagacttcaggatgcagaataaatccgtctttattttgggcgccacggagaaaccggcagagtgctcttaaaggaaatcctggagcagggcctgttttccaaagtcacgctcattggccggagaagctcaccttcgacgaggaagcttataaaaatgtgaatcaagaagtggtggactttgaaaagttggatgactacgcctctgcctttcaaggtcatgatgttggattctgttgcctgggtaccaccagagggaaagctggggcggagggatttgttcgtgttgaccgagattatgtgctgaagtctgcagagctggcaaaagctggagggtgcaaacatttcaacttgctatcctctaaaggagctgataaatcaagcaattttttatatctacaagttaagggagaagtagaagccaaggttgaagaattaaaatttgatcgttactctgtatttaggcctggagttctgttatgtgataggcaagaatctcgcccaggtgaatggctggttagaaagttctttggctccttaccagactcttgggccagtgggcattctgtgcctgtggtgaccgtggttagagcaatgctgaacaatgtggtgagaccaagagacaagcagatggaactgctggagaacaaggccatccatgacctggggaaagcgcatggctctctcaagccatgaccacattggagaaatggtttttattgtcaaccttaacacccatcaccaaatcggtaatttcagggtctaaaaaaagtcagcatgttttaactttgttgttttactatcctcaggcatccattccaatcaagaaatgatggtgctctgcatcagtggttcagagcctggttatacatatagatcactcagggagctttggaaaaataaagatttgtcagccctatctcaaacttgaatcaaaatttctggggtgtgggcacaataatctgtaattttctttgtttatacttcccctgatgccactggttccgatgccactggctggggggcctgctttgaaatgcttgtctgcagagtcacagcagccatgaaaaccttatgaccgtgcaaatgagctctgctctaaaattgttgacattcatgtctctgagttacaaaagtgctaattcactacatgtaattgtgtaagtaaacattgtgcctttactacttctttatgtaatagaagttatatacctaagcttatataatacatggggaggattaaataaaggaataaagatgaatggacaaaaaaaaaaaaaaaaaaaaaaaaa

SEQ ID NO: 1156 - DNA, 905 bp, Homo sapiens
ccacgcgtccggggatcagcgctaccaaggcgcacgagttctgccccctacgattggttcggggacttctcctccttccgtgccctcctagagccggagctgcggcccgaggaccgtatccttgtgctaggttgcgggaacagtgccctgagctacgagctgttcctcggaggcttccctaatgtgaccagtgtggactactcatcagtcgtggtggctgccatgcaggctcgctatgcccatgtgccgcagctgcgctggggagaccatggatgtgcggaagctggacttccccagtgcttcttttgatgtggtgctcgagaagggcacgctggatgccctgctggctggggaacgagatccctggaccgtgtcccctgaaggtgtccacactgtggaccaagtgttgagtgaggtgagccgcgtgcttgtccctggaggccggtttatctcaatgacttctgctgccccccactttcggaccagacactatgcccaagcctattatggctggtccctgaggcatgctacctatggcagcggtttccacttccatctctacctcatgcacaagggcgggaagctcagtgtggcccagctggctctgggggcccaaatcctctcaccccccagaactcccacctcaccttgcttccttcaggactcagatcatgaggacttccttagtgccattcagctctgaggccagagcatggtcctccacccttcctgccattctgccctgggctcctcaggtagttggaattcctgacttaggacttggggttgggtccaaggtgcttacatcccaggggcctcatgcctaagatagagggtgggagcgaacccacatgaaccaatacagcccagctccaactagaaaaaaaaaaaaaaaaaaaaaaaaa

SEQ ID NO: 1157 - DNA, 1888 bp, Homo sapiens
  SITE (37): n equals a,t,g, or c
  SITE (1475): n equals a,t,g, or c
  SITE (1477): n equals a,t,g, or c
  SITE (1879): n equals a,t,g, or c
gggggggaaatttgagggcccccggcccgtttagganaaattttgggggagttttggaatttttttttttttttttaaaaaaaagctggagttggtggcttaggccatcacccttcccttggctggaactactggacagacccttttgagatgtgcctgtggtgctgtggagatgtgtgtagtggtcttagctctttgttgagcttgtgtgtgtgttgtgtagtcttagctgtatgctgaaattgggcgtgtgttggagggcttcttagctctttggtgagattgtatttctatgtgtttgtatcagctgaatgttgctggaaataaaaccttggtttgtcaaggctcytttttgtgggaagtaagtaggggaaaaggtctttgagggttcctaggctcctttgtacaacaggaaaatgcctcaaagccttgcttcccagcaacctggggctggttcccagtgcctggtcctgccccttcctggttcttatctcaaggcagagcttctgaatttcaggccttcattccagagccctcttgtggccaggccttcctttgctggaggaaggtacacagggtgaagctgatgctgtacttgggggatctccttggcctgttccaccaagtgagagaaggtacttactcttgtacctcctgttcagccaggtgcattaacagacctccctacagctgtaggaactactgtcccagagctgaggcaaggggatttctcaggtcatttggagaacaagtgctttagtagtagtttaaagtagtaactgctactgtatttagtggggtggaattcagaagaaatttgaagaccagatcatgggtggtctgcatgtgaatgaacaggaatgagccggacagcctggctgtcattgctttcttcctccccatttggacccttctctgcccttacatttttgtttctccatctaccaccatccaccagtctatttattaacttagcaagaggacaagtaaagggccctcttggcttgattttgcttctttctttctgtggaggatatactaagtgcgactttgccctatcctatttggaaatccctaacagaattgagttttctattaaggatccaaaaagaaaaacaaaatgctaatgaagccatcagtcaagggtcacatgccaataaacaataaattttccagaagaaatgaaatccaactagacaaataaagtagagcttatgaaatggttcagtaargatgagtttgttgttttttgttttgttttgttttgtttttttaaagacggagtctcgctctgtcacycaggctggagtgcagtggtatgatcttggctcactgtaacctccgcctcccgggttcaagccattctcctgcctcagtctcctgagtagctgggattgcgggtgcgtgccaccatgcctggctaatttttgtgtttttagtagagacagggtttcaccatgkggtcgggctggtcnanaactccygaccycytgatccgcctgccytggcctcccaaagtgatgggattacagatgtgagccacccgtgcctagccaaggatgagatttttaaagtatgtttcagttctgtgtcatggttggaagacagagtaggaaggatatggaaaaggtcatggggaagcagaggtgattcatggctctgtgaatttgaggtgaatggttccttattgtctaggccacttgtgaagaatatgagtcagttattgccagccttggaatttacttctctagcttacaatggaccttttgaactggaaaacaccttgtctgcattcactttaaaatgtcaaaactaatttttataataaatgtttattttcacattgaaaaaaaaaaaaaatttaaaaactcgggggggncccggtacc

SEQ ID NO: 1158 - DNA, 1899 bp, Homo sapiens
ccacgcgtccggaagccggccactgcctctgctctgctcctgctcctgctgggcctggcctggacccaggggagccacggctggggtgcggacgcgtcatcactgcagaaacgtgcaggcagagccgatcagaactacaattacaaccagcatgcgtatcccactgcctatggtgggaagtactcagtcaagacccctgcaaaggggggagtctcaccttcttcctcggtgagtatgggggcctgatcttcatctggctggagagagaaggggcctgaggccagagggtatggaagggaccctgtggtggccactcagactttctctttttctggcaggcttcccgggtgcaacctggcctgctgcagtgggtgaagttttggtaggtgagtgtcagagtgagccgacccaggccacatcctggcagtggaggcacagtcacccggggcagggccaggatcttggtatatcctcagatctcagtgggcagcgacatgaagtcaggtatgctctgggtgcgtgctctaaaggtgataaggaagaggggacctcatggtggggtgtggagaaagacccataataaagtgatctagggctgggtgcagtggctcatgcctgtaatctctgtgctttgggaggctggggtgggaggatcacttgagtctgggagtttgagaccagactgggcaatatagcaagaccccatctctaaaagaacaaaacaaaacaaaccaaaacaaaacaaaccattccagcctgggaaacatggcaaaaccccgtctactaaaaatacaaaaaattagccaggtgaggtggtgcatgattgtaatcccagctactctggaggctgaggtgggagaatcacctgagcttgggaggttgaggctgctgcgaactgcgattgcaccgctgcactccagcctgggcaatcacagtgagaccttgtctcaaaacaaacaaacaaacaaatgaaaaaccttagccaggcatggtgacacatgcctgtagttctagctacttggaaggcagaggcaggaagatcgcttgagcccaggagttcaaaactgcagtgagctatgatcacaccattggacttcaagtctgggcaacagagggagaccctgtctggaaagaaagagagaaagagagagagagagaaagagggaaagaaagcaagcaagagagaaagaagaaagaaaatgacctaggaccctcggaaagcaccttagggtgggaccacataggcacagctctgagaagatggtgttctagatggagcacagggaccgggatagagatgttacaggggaactgtggagaaaagagcctcctggtggaagggttcagaggtgggacgcagcgaggctgcatgggcgagaggtgatagcttggctcggcagaaccacaaactctgttttaggcggagcaaaagtgaggggcaccacaggcgaacaggtaggacagcaaaagaatggtgggtgcccagacgctgggtgaaaagatgccccgtttccgcaggcttaggagtggccacgtgctaccatttgattttctttcttctaggcaatttcttgcaaccaccaccgaggccccgaaaagcactggtcgtcagggagctcctccccttggcccccagcctgtgccagccctggcccggctgccacacctctgtttcctaggctggggacccagcttgtctctccttgtttcttcccactgcactgtggtgcttcagtggccaccagcctcgtcacatacaccagcatctttctgtacctcctccctttggtgacctgaagtcactgtgacagttctccaggaaggaggagcttcctacttttgagtttctctgtggaaataaaacatgaatcttgtttccctaaaaaaaaaaaaaaaaaa

SEQ ID NO: 1159 - DNA, 1987 bp, Homo sapiens
  SITE (435): n equals a,t,g, or c
aaatatttccaatataatttgaatggctaattttcagttgctaattaattagcagctttgtaatacttgatttgggagcatttacttggaaatcctaaggactataataaaagttttcaacatatttctaaattgtgtgagtttccagctgtagcttttgtctttgtcacattttaaaaaataataagcaagacacattggggacactggcagcagttgccaggttttagctgccaccgcttcagtatgagatatagctgtcccatcttcccccattcagggtaggagatatagtgacccagacttcatgcaaatggaaaaaaagttttaactgaaatatttatttagatttcagggtctagatggatgggaaagtagaaaaacatatgcaaatctcagtgttctcactatgaccactctgagcagagatttggnttttgtttccttttgtaacaaagtgaaaacaggtgagacaatgtgcccaaaacaaagggaagaagagaaccttctgtgactcctaaaatgttccatgctgcatttttgtttcattttttatttttccttgctttgtttttaaacatgaatataatgcttacttcaaattgtttagtaaaacaaaataactaaagaaatgtgagcttcccaaggtttctaaactatcgctgttgtatattctatagcgttccttattctttgagggaaactgtgcttgctgtgatccattttgtctctagcttctagttgtgattcttgtccataagcaccaaatttgatgcccatgatttcaaaaggtcattcttttatctgaatgaaaatggtggtactaagactgtgaaaattatgtgaaacctaaagtagttgccaaagtggctcagggttgtaaaattcattgacttaattattcatgtgccagatcaacccctttattttctctttagctgtgcatatttaaaatattggaaagtatcagatttacagattttctttgactaatttttttcacataactttaggattttcgaaagttgtaaccataactggatatcttagctgagcaaaggcggttataatttgtctttttaagatcactggaaattgataaaattttgtgataattatgattattctgtgccatttacagtttctaatactatactgtatgaaatatgtataaatatatgatgctgagtctgtggaatgatacttctgaaatcaaaattcctcataaggcatgaagttgtaaaaacttgaatgtgtatagttagatatttaaatggttgcttcttcatagaattgtctgctttttaaaactggaagtacaggattttcttcaggtaaaatctgtgtgttccaattacagttgtagctgaaggaagtatgctttggtgagtcaattagtatgggaacttgactaaagacccccagtgttgtaacgtacctttgtacccagacaaaacaattatgttacattcctcaaagtggcatgggctttcttctctaattcttytgttttattagacccaagacaagttctaaaaattgaatgcaatgagagattgtccagaaatgtaatatatactaaaatataccacttaagcattgattgccttttcttgtttgcttcaagaatataaaacttgttacttgagcttggaatcatgggcttgattgaattaattactcttggggaaaaaagacaccttgtggcattaagtcttgctttggttaaagccttatttcacataattgctaaaaactcatttttgtttaatatactacctatagtttaattatcggcacttgtattttgtaacttgatatcttacctaggattgggaatttgggacatgacacgtactataaaagtcagtctatgtacatactgcttattgatgtgctgtgatatgagggaatctgaaatgtttcataaaaataaagcttaaaaattgtcttacactggaaaaaaaaaaaaaaaaaaaaaaaaaat

SEQ ID NO: 1160 - DNA, 906 bp, Homo sapiens
ccacgcgtccgaatggaggcgactacggctggtgtgggccggctagaggaagaggcgttgcggcgaaaggaacggctgaaggccctacgggagaaaaccgggcgcaaggacaaggaagatggggagccaaagaccaagcatctcagagaagaggaggaagaaggcgagaagcacagggaacttaggctgcggaactatgtcccggaggatgaggacctgaagaagaggagggtgccccaggccaaaccggttgcagtggaggagaaggtgaaggagcagctggaggccgccaagcccgagcccgtcatcgaggaggtggacctggccaacctcgctcctcggaagcctgactgggacctcaagagagatgtggccaagaagctggagaaactaaaaaagcggactcagagggccattgccgagctgatccgtgaaaggctgaaaggccaggaagacagcctagcctctgcagtggatgctgccaccgaacaaaagacctgtgactccgactgaggcatgccctgccccaccactcgcccatcaggcctgtcctgcaggggatggtcttgggcagggatgggggctaggcttgccatcacctccagtttggcttctgagcagagactccctgcccatcaagtctgaaacccccatggatgaggtcagctccttgtctgctgggtggcccctgccattctgaatggaggcagaaccagcaacaactctgggcgtgcctgtgtctgcacatgtggatgtacatatgtctgtatatatgtatatattttgaactttctaaaaaaaaaatctggaaatagaaacaagtaaacccctgaaaaaaaaaaaaaaaaaaaaaaaaaaaaaaaaaaaaaaaaaaaaaaaaaaaaaaaaaaaaaaaaaaaaaaaaaa

SEQ ID NO: 1161 - DNA, 4597 bp, Homo sapiens
  SITE (562): n equals a,t,g, or c
ggggcgcggcggcagtcggctctatgttcgcggtcttaacctctcctctggccgagtccttgcaagaagtgaattacccgaccctgcaaaacacttactattttggagtttaaagtatgtcatcatggcaaagtttcggagaaggacttgcatcattttggcactttttattctatttattttctctctgatgatgggtttaaaaatgctgagaccaaatacagctacttttggagctccttttggacttgaccttcttccagaacttcatcaacgaactattcatttggggaaaaattttgatttccaaaagagtgacagaatcaacagtgaaacaaataccaagaatttaaaaagtgttgaaatcactatgaaaccttccaaagcctctgaacttaacttggatgaactaccacctctgaacaattatctacatgtattttattacagttggtatggaaatccacaatttgatggtaaatatatacattggaatcatccagtgktagagcattgggaccctagaatagccaagaattatccacaagggagacacaacccntccagatgacattggctycagcttttatcctggaattgggaagttacagttctcgggatccttctgtcatagaaactcacatgagacaaatgcgctcagcttcaattggtgtactagccctctcttggtacccacctgatgtaaatgatgaaaatggagaacctactgataacttggtacccactattttggataaagctcataaatataacctaaaggttacttttcacatagaaccatatagcaatcgagatgatcaaaacatgtacaaaaatgtcaagtatattatagacaaatatggaaatcatccggccttttacaggtacaagacgaagactggcaatgctcttcctatgttttatgtctatgattcctatattaccaagcctgaaaaatgggccaatctgttaaccacctcagggtctcggagtattcgcaattctccttatgatggactgtttattgcccttctggtagaagaaaaacataagtatgatattcttcaaagtggttttgatggaatttacacatattttgccacaaatggctttacttatggctcatcacatcagaattgggctagcctaaaattattttgtgataaatacaacttaatatttatcccaagtgtgggcccaggatacatagataccagcatccgtccatggaacacgcaaaacactcggaaccgaatcaatgggaagtattatgaaattggtctgagtgccgcacttcagacacgccccagcttaatttctatcacctcttttaatgagtggcatgaaggaactcagattgaaaaagctgttcccaaaagaaccagtaatacagtgtacctagattaccgtcctcataaaccaggtctttacctagaactgactcgcaagtggtctgaaaaatacagtaaggaaagagcaacttatgcattagatcgccagctgcctgtttcttaatgcattgattaaagtttaatagttatcaaaatcacctaatttttaaaaatagctttcgttttgagttctggaaagaaaactgtcaaaatcagtatatactattagttatatttaaaaatatttttttaaattctttacagataatattatacttgttacccttcacaataccacatgagaaaatatctgagacaaaatgtatacaaatatattccttatggcataatttattgcatttctgactgaaatcaaaattctgatttgatggcaattgaattttcattttacaatagataaatgcttgtgytacctaaagcacttagcacacagttaaattatatttacatcctagacccaaataaataggattgtgtgtatatttgggatatctattgaagaaaaaaagaaaaccccttaaarataatgtacatgcttcatgtcatgtctttaaaataatttaatcaactttattgtcttagtatttagactctggataactctacaataatgaggaaattcttaagaataacaaaatcactgtaccttcctctcaattttgctgtgaacctgaaatggctttaaattaatactcttattttttatttaatttaattacataaattaaaccttaccatgaccaaattgtgttaggamggcctgctatctacagcacagtgtgtcatttgcagatttgtggttacctataccacgctaggtgttttgacatgtttagtgtttctgctttacagtgctgaattccatattttagaagctatgaaagtccttttatgaaaaagttactgattgcttctcagttattaggaaaacagttgtttcacaattattatgtagatatgatgcccaaatatcatttttagtatatcttgtcgatctttaagttgttactattgtgttattcatgtctttaaatcagataccaaatattttttaggaaagaaaaatgttattactgtcattaggttgtcttttaatactttaagttattttgacgaaaagtaatagagaaaatttacttagcattttagattctagagacatggaaatgaaaattattttatgtctagagtaggtcctgaagtttggctttacattaagtttagcactgtatcagaatgaagaaactaatattttacataaaaactaatactttcaattttttatatagtaatatccccattttgtaaatgttagacttttatcatacctgtaagttaaaatacttgttatcaataacttgtcatattgtgacaaattgatcacttgtgtacgaaaaataaatctccttaaaaactaaataaaatgcactgtattcttacagttaatgtttataactatagtaaaaaattaatatatatcctattacataaatgttatttcttaggtgttccattaagaagagcaatagaataatgctaaaaaataatgcctataaatcttcagagtataaagacatccattcagaaacaaaaattagcactaaattttttataaaatagaccagatgacaaaatttattttatttttaaacagtggttttgacacaaattatgttattgaaaagcattattaatgtttaatttatttaaaattttggaatttgccatttctcagacaatgatcaggccttaggaaattaatacagtagtagtaatcattttctaggggaaaataaaagaatarrtcactatactgatattttgatataagcaagcacttacatggtaatcactatatagatccaacctgtggattttcttcttatgtccatttaactagaatatattattttaggtataatttacaaatgtcacacctaataatcttttataatataccatatttcattaaagttttgttagagaagtatctaccacagaggagtttttgtcattgtgtacgttgtgtatttgaacccaccatgacagaaagtaaattttaggaaatagttatgagattaagggaaaatctataaaaacaaggttagcatattctcaacacagataccaccactttctttttcccattatagacatggtgaatccacacagcatacttcatctctgagctttrttgtgattcctcaacacattaccctaaccagccagcagtaacagatttcagagtaagataaagcagattctgtcttcattgcaaaaagttattctcaatggaagaatggcatctgatctcataattactagtttatattaatatagtttttttctccctttttaataaaataattacagtcatccctcagtgtctgtgggggattggttccagttacccctatagataccaaaatctgcagatgctcaagtccctgatataaactggcatagtagttgcatataatctatgcacatcctcctgtatacattaagtcatctctagattatttataacacttaatacaatgtaaatgctatgtagttgttataccatactggttagtgaataattacatgaaaaaaaagagtctgtacatcttcagagtttcagtcggcaatttcttggccatggatgtagaacctacagataaggtgagccaactgcattaggaaataactctaataattctgttaattcttagagaggaaaactttcaaaatcttcctcaggtatttattacaactgcctttaccattttagttgtaacacagtttaaattgttatgataacaagtaaataagagcaaagaatttatttcttaattcaaaactatacgtttgaattcaatatggtataacttaaagtggtataatacatacaatgcatgaatcataatggattcttttataagttattaatttttatggtttaatcagtctaattgttttgactgttatagaaaccaaatattttactgtttcttttaaggactaatattgtcaaaaactgctgttattaacttcacttgagttgtttaacttccttctgttttaagattgtaattaaaaattactattttgttatatggaatggttaatttttacctaataaaaacatagatgaaatacattgtaaaaaaaaaaaaaaagcctccctccgtgccgtcgat

SEQ ID NO: 1162 - DNA, 558 bp, Homo sapiens
  SITE (6): n equals a,t,g, or c
  SITE (8): n equals a,t,g, or c
  SITE (10): n equals a,t,g, or c
  SITE (33): n equals a,t,g, or c
acttcntnanggggactttcaactggaaattcnccctcactaatkggaacaaaagctggagctccaccgcggtggcggccgctctagaactagtggatcccccgggctgcaggaattcggcacgagcctccataggaacccagtgactggggggtgacgcctacacccccagctatttgcactctggtgtgtggtttgactctgcttttcttccggattggccctgtggtcacagcctcagggggccaggctgggggaacctcacctggcccgtactcctgggggtttccctttgccattgggccccctgagggactgtgggggctcaagggtaatgccagaggcccatggccccagcgaggggctgtggggcacctagagttctcggtgtgtctccttcattcattggcctctgctggggcctcctatgggtgtcttacgtctgtccatccatctgtccgtggtcagaagtggggtcagtgtgtgagtgagagcaggagtatttatgaaaataaaacgtcgtttttcctggaaaaaaaaaaaaaaaagggcggccgc

SEQ ID NO: 1163 - DNA, 1442 bp, Homo sapiens
ccagagactgcctcacacccctcaaccagacggccatgactgcccttttgtgaacacaatgtgaaagaagcctgctgtggtactgagcgtcsggctgtcacaaggcactggaagaagggagcctgctggtccagagtgtgcgtgtgtatcggtgtgtgtgtacacttgcatgtgtgtgtgtgatccagtaggatcctagagacaacctgtcatactgtttacaaaattgtgcagctggtttcgtgctgacccttagggtgcgtctgttgggttttgttgggctagaaaaatgaaaattttcagatggcgttttcattcctctgactgatattgagctgctttggtgttaaaggtgtaatgtgtacagagttgtatttaacaataataaaagtaacttaagtttgctctatcagattttagttctgcacagaggttaagtgggaaaatgcagctgttgcaaaatgtatataaatagtatgttcatttttttcagtatattatctgatactgtgttagcagcaggtctgcttaaacctagtcttgttgttattgagtcatttcctctcctttgataactagaactgaaagcatttttaacattcttctcctggaagaaatgaattacttgaagcatgaaaagcacaccagggtggttgtttatttagcaattatgactgtagatttaaaaacaagcaaagaaacaacacctcagcagctgcccgtttccttagtctccacttcagagggggatgcgaagaggtcggcccagctccggtgaccatgaaggtggcacaggaattacagtgtgaatggctgtgtcagatgttttcgtacctcagattaaaaatattgctgaggtcagacgccacaattttcatgactttcttcagaagtagcacattttcgtgacttccgctgtcctctgaaaaacaaagttatttggaacatgttcatgcaaaagtgattctgaccaagtctaaatcgagcttttctactgacatgaaactgttggaaactgatctcattttataagaaatgattttcccctcaaggaggcgtctgtaattccagaacagtccagacatcagctgtacctcatgctcagtagtttttatttgagtttcttttgtgagttaactatgggagatttaacctcttttgccaaagagggaagtgtgtgtgtttttttaatagaaaatatggaccaaaaatttttttccctgaagaatgtattataaccctatttgtgtggttattacatcctgtgaaatgtatatatgttaaaataatgggggtgctggaaggtcatggcagactagctgctggttagtgtggaggggaartggtttactttgtagagtttacatggttttatgcgcacactaattgtaataaactatgccaaaccaaaaaaaaaaaaaaaaaaaaaaaaaagggcggcc

SEQ ID NO: 1164 - DNA, 1228 bp, Homo sapiens
cccacgcgtccgggaggtgaagagcatgccttcctgactgtaggatcaaaggaagccaataatgggcctccatttaactttcctggtaattttggtggatcaaatgcctttgggccaccaatccctcctccaggattaggaggcggggcctttggtgatgctaggcctggtatgccttcagttggaaacagtggtttgcctggtctaggactggatgttccgggttttggaggtggaccaaacaatttaagtgggccatcgggatttggagggggccctcagaattttggaaatggccctggtagcttaagcggtcccccggggtttggaagtggccctcctggtcttggaagtgcccctgggcatttgggtgggccaccagcttttgggcctggccccggccccggccccggccctggcccaatccatattggtggtccccctggctttgcatctagttctggaaaaccaggaccgacagtaattaaagtgcaaaacatgccctttactgtgtctattgatgagattttagatttcttttatggctatcaagtaatcccaggctcagtgtgtttaaaatacaatgaaaaaggtatgcccacaggtgaagccatggtggcctttgagtctcgggatgaagccacagctgctgtcattgacttaaatgacaggcctataggttcaagaaaagtaaaacttgtattagggtagccattcacatcattttttatagggtagatcttcatattgctgtgattaatgcatccagattgttttcctagtatttccaggttagaacctgtggattgtttcaattgcatatagcttggtttccataacatagagcattggttgactgtttacagaagactcactcaccaggataaacattgctgtatgttacagtaaagctatctggagagaacacataaatgattttggcataccattagagaaaccatttgtaaaactcaaatgaccacataaagcttatcaaggagtctagattggttttgttttataccatatgggatgaagaaaatagaaatgtcagtagaactcattgagggtgctcttgccagctgctgaaaatagaagttggctactctcagaatttggtttaaagctggacagatttgctttgttatagggtaaagctttgtctaaagtcctcattttcttttaaaattgaataaaatttctgtatacaaaaaaaaaaaaaaaaaaa

SEQ ID NO: 1165 - DNA, 2241 bp, Homo sapiens
ccacgcgtccgcggacgctggacggagctgcggcggctatgctgtggagcggctgccggcgtttcggggcgcgcctcggctgcctgcccggcggtctccgggtcctcgtccagaaccggccaccggagcttgacctcctgcatcgacccttccatgggacttaatgaagagcagaaagaatttcaaaaagtggcctttgactttgctgcccgagagatggctccaaatatggcagagtgggaccagaaggagctgttcccagtggatgtgatgcggaaggcagcccagctaggcttcggaggggtctacatacaaacagatgtgggcgggtctgggctgtcacgtcttgatacctctgtcatttttgaagccttggctacaggctgcaccagcaccacagcctatataagcatccacaacatgtgtgcctggatgattgatagcttcggaaatgaggaacagaggcacaaattttgcccaccgctctgtaccatggagaagtttgcttcctactgcctcactgaaccaggaagtgggagtgatgctgcctctcttctgacctccgctaagaaacagggagatcattacatcctcaatggctccaaggccttcatcagtggtgctggtgagtcagacatctatgtggtcatgtgccgaacaggaggaccaggccccaagggcatctcatgcatagttgttgagaaggggacccctggcctcagctttggcaagaaggagaaaaaggtggggtggaactcccagccaacacgagctgtgatcttcgaagactgtgctgtccctgtggccaacagaattgggagcgaggggcagggcttcctcattgccgtgagaggactgaacggagggaggatcaatattgcttcctgctccctgggggctgcccacgcctctgtcatcctcacccgagaccacctcaatgtccggaagcagtttggagagcctctggccagtaaccagtacttgcaattcacactggctgatatggcaacaaggctggtggccgcgcggctgatggtccgcaatgcagcagtggctctgcaggaggagaggaaggatgcagtggccttgtgctccatggccaagctctttgctacagatgaatgctttgccatctgcaaccaggccttgcagatgcacgggggctacggctacctgaaggattacgctgttcagcagtacgtgcgggactccagggtccaccagattctagaaggtagcaatgaagtgatgaggatactgatctctagaagcctgcttcaggagtagaacccacacttgttctggcctggtgttcagtgcgactgcagtcagtgttgagtggtgccatgtgggccgctctattccaaaggaatcatggattagacccaagggctgagctcctctagggcaggacctgcaccctgtgtgttggcaccagcatcgggtcttggactggggcagaatccccagtggaaccggaagagctggactgatgagaaacatcagaagaacacatactaccttgttttcctaatgccagaagggtgaccagtgaagattcaccgtcaaaccatgaaagtcctttcctggatccactttatcttgattagtctgcattttactagttcactggatccctcctctaggggcctggggactttcactgatgctcttcctgattctagagcaaaggtgtgggaaggggaaatggaggaatgccctcctgtctgtgtcgttctctgtgccacagctacagatgcagaaggtttctctggatagcacacctctgaatgtaaatcatgataaaatggatatttggaaacttactcctaagctgtgatttagggtgtatttctacttctggactgcctcaatatcaagggctgagacttttgaattttgaatattcgttgggtttcatgttaagaagcctgtggtctaggagtgctattcagtgtttcttttcctgataaacactttgaatattttttttgggtttttgtttccttttctgaagctgttcccccttttaaatatttttaatcccattgataaaatctatccttcaccccctttggttctactatagttgattttaattttaaatgtttaattgtatttgattaaacacttaactggattttggaataataaaactctcgtccaatttggcttttaaaaaaaaaaaaaaaaaaaaaaaaaaaaaaaaaaaaaaaaaaaaaaaaaaaaaaaaaaaaaaaa

SEQ ID NO: 1166 - DNA, 1577 bp, Homo sapiens
ccacgcgtccgcccaaggacgacgcagccatcgttggggccgtgcggctcctgtccgtgctgatcgccgccctcaccatggacctcgcaggccgcaaggtgctgctcttcgtctcagcggccatcatgtttgctgccaacctgactctggggctgtacatccactttggccccaggcctctgagccccaacagcactgcgggcctggaaagcgagtcctggggggacttggcgcagcccctggcagcacccgctggctacctcaccctggtgcccctgctggccaccatgctcttcatcatgggctacgccgtgggctggggtcccatcacctggctgctcatgtctgaggtcctgcccctgcgtgcccgtggcgtggcctcagggctctgcgtgctggccagctggctcaccgccttcgtcctcaccaagtccttcctgccagtggtgagcaccttcggcctccaggtgcctttcttcttcttcgcggccatctgcttggtgagcctggtgttcacaggctgctgtgtgcccgagaccaagggacggtccctggagcagatcgagtccttcttccgcacggggagaaggtccttcttgcgctaggtcaaggtccccgcctggagggggccaaacccccagtggctgggcctctgtgttggctacaaacctgcaccctgggaccaagaggcagcagtcatccctgccaccagccagagcacaggaagagcagtgtgatggggcctcagcagcgggtgcccctggctcgggacaggtagcactgctgtccagccacagccccagcccaggcagcccacagtgctgcacgtagccatgggccgcaggagtgcatacaaccctgcatccagggacacggccctgctgggtgacctcaggcctagtccctttcccttgcgtgaaggacacgccccacagaaggctacggggaggactgagaggacagggctggaggcagccaagtaacgtagtcatatcatcgcgctctgatctggtggcatctggctgtgcaaggaagacccggctttgccctcacaagtcttatgggcaccacagggaacatcctggacttaaaaagccagggcaggccgggcacagtggctcacgcctgtaatcccagcactttgggaggccaaagcaggtggattacccaaggccaggagttcaagaccagcctggccaacatggtgaaaccccgtctctactaaaaaatacaaaaaagctgggtgtggtggcacacacccgtagttccagctacttgggaggctgaggcagcattgcttgaacccgggaggtggaggctgcaatgagctgagatcatgccattgcactccagcctgggcaacgagagtgaaactccgtccccaccccctgccaaaaaaaaaaaaaaaaaaagccagggcaaaggacctggcgtggccacttcctcctgccccagcccaacctctgggaacaggcagctcctatctgcaaactgtgttcacccttttgtaaaaataaaggaactggacctgtaaaaaaaaaaaaaaaaaaaaaaaaaaaaaaaaaaaaaaaaaaaaa

SEQ ID NO: 1167 - DNA, 2110 bp, Homo sapiens
ggcagaactaagatttttgactctaaagagagaaaattacaagggtgttgccttatagcaaacccttgggacaatccttcatgtgagcaaagtgttgatcttaatattggttgtctgtggtgtgcttttttgtactgtaaaaatatgtggttcatgtctaactctgctgttttattgtggttgtggttcaagtttttaatgtttaaagttgatgctgttttcagaagagctttttactaatttatttgtcagtgttccctatttgttacttaaccatgatcctccagattttttggagtattcttttctaaccttaaccctgccaaaccttgatccattttgacatttgttatgcactatttttatatctctgtgagagatttttccaacagtcagctattttatggcacactttttttgactgatgacatctcctttgctatacctcaatttttggaatttagagaagaaatcagtagttttgcaatgttaattatttagatatttaatttcgcagatttttaaactttattttcataatttctgcttaatgtttaaaattgaagagccttttcatgtattaaataatgaacacaaattatataattaaaataattggagatgttgaaaatcattttcccttcttaaacagaaataaatatttggaatgaaggggaatgtactagaacaccctttttgccacgggtaaaaataacagaaatgtatggtttgttttaccttcatttctgtacaagtaaagcttattagtctaatgttttgttcctttcccacctcacccctacctcttttgttttgttttgtttttgccctttatgtactacattcttattttctaacttttaaacactgtattggaggtttttttttaatttacagatcatatttattttactatttttgtagaaaattattaattttgattgtatttttgtattttaaaagcttcttcacttgtgttccctaaatattcatattgctgcccaaaaktatgactgtggaggaaaaaaaaatactttaaaaatccacactttttgttaagaaggaaacatttagcatttatatatttgtgtatggaaaacacttgatattttatccctgttgcatctggctgcacagagcctctcctcaaagatgctacaaaacttgaatataacacattttggaaggctgactaacctcgattctgtgttgtgatgtgcaatactgtttctaatgtttgtataaaaaaaaacagtgtaaacctttttaatgcaaatttatttttttcattgcatattttgcagattttatccacagtgtcattttttactgtcagaaaagataccccttttgtcattgcaactattttttaaatccagaaatctttgtactgatgtaaatgattgtagttattttggatagtgttttgctaacaaaaggagagacttttttcatgcatatttctatttkgtttttttgggwtttattttattttaatagtagtaaaatacttggaataatttttcatattcttgtcattaatattattttgtatttttatgtggaaatatataattttatgacactaattgctaaagtttattttatgttgaattatttttggagctgaaatctttgtaatattaaagcaactagtttctaattcccagtttctgtatagaatcgcacaagtggtttatggagtgtttggattgtaattataaatggttctttgatatgcaaattaatattttcagttgattttattttatattcctaatggggtgttaaagccgttttttatttttttctaaataaaaagagaacccatgcttttatggacactaggtaaacaccttcagcttaaatttttcgttaaatattttagtttattttattgttatcttccaggtgtctaaatctccagtctgtctgttgtactggtaatttaactctgtaatggaatagtttgctgccaactatttatattaagtaatttttaaatatttgtaatattgttgactgactaataaactattaagttattggmawaaaaaaaaaaaaaaaaaaaaaaaaaaaaaaaaaaaaaaaaaaaaaaaagggcggccgc

SEQ ID NO: 1168 - DNA, 1825 bp, Homo sapiens
  SITE (270): n equals a,t,g, or c
  SITE (814): n equals a,t,g, or c
  SITE (1816): n equals a,t,g, or c
  SITE (1825): n equals a,t,g, or c
ggccgcgcggccccgagccccccgagccgggcggggcgctcaacaattyggyaastctcattcgacatccatctgaactaatgaatgttcctcttcagcaacaaaacaaatgtacagcattagtgaaaaataaaactgcggctacaactactgctttgcaatttacatacccactgtttactacaaatgcttgctctactagtggaaattctaatctttcacagacacagagttctagtaactcatgttctgtacttgaagctgccaagnaccaggatattggattgcctagagcattttctttctgttatcagcaagaaattgaatccactaaacagacgttaggtagtagaaacaaagttttgcctgagcaagtttggattaaagtgggagcagcgctatgcaaacaagcactgaagaggaatcggagtagaatgcgtcagttggacacaaatgtagagcgaagagcccttggagagattcagaatgtgggcgaaggtgccaccgccacacaaggcgcttggcagtcctcggagtcctcacaggcaaacctgggggagcaggcccagagtgggccccagggaggaaggtctcarcgtagggagaggcataaccgaatggaaagagatagaaggcgcagaatccgcatttgctgtgatgagttgaatctcttagtgccgttctgcaatgccgagactgacaaggccacaactctgcagtggaccacagcattcctgaaatacatccaggaaagacatggagattctcttaaaaaggaatttgagagcgtattttgcggtaaaactggccgaangctaaagctgaccagaccggactccttggtgacctgtcctgcacaggggagtttacagagcagcccctcgatggagatcaagtgatcggactgaacaggaatcctcggggggtgaacagccattccttcgtgacctgtgcaacgccttctgcaaccctggagctctgctcggctagtctgactcgaaaagggcgtgactcaagctgacgggactccagtagggactttgagagcacattttgtaaaaatatttatctagacgcaaatgcttatccatgaatgtcctcttagaccatttggggatgaagccatcttaataattagtaataattaattagtaataattagtaagcattttctcaatgctctgattccatcatgttttcttaacatgataacttaaaaaattgacatcctttgtactttctttaatcttaaaaagtacacggctttttacttatttaccttttaaawwtgcccctttagcaattggaacaagttaaattgttaactaaaaacagtttggaaattttatttcattcgttatatcacacccccttgtcatgactctgagtcacgtgctgctgtattgcaacgtgcaggaccattttaaacctgtgtgctaaaaattttccagatacttgctttaaagctacttttgtccacaaatgaaatactgtcacagtagacgcttaaatgccacgttttcataccaagagtcattcattacttcatgtgtcacaaactgtggtgtttggaattgggtttttcaatgagtggctttacttatcacaacaggtaatagcaatagaygttagtgcaatacaaagtcaccctcaataaatactgttaattgggagatgtgagtttgtacacaaaacatcagactagacctttgtatgggagagaatttactgtacattaaattctttattttttgttaaaaaaaaaaaaaaaaaaaaaaaaaaaaaaaaaaaaaaaaaaaaaaaaaaaaaaaaaaangggcggccn

SEQ ID NO: 1169 - DNA, 1349 bp, Homo sapiens
ccacgcgtccggtctcagggacgggctgcagccatgtcctattgccggcaggaagggaaggatcgaatcatatttgtaaccaaagaagatcatgaaactccaagcagtgcagaattggtggctgatgaccccaacgatccatacgaggagcatggattgatactgccaaatggaaacattaactggaactgcccatgccttgggggaatggccagcggtccctgtggagaacagtttaagtcagccttttcctgcttccactatagcacggaggagatcaaggggtcagactgtgtagaccagttccgggccatgcaggaatgcatgcagaaatacccagacctctatccccaagaggatgaggatgaggaagaggaaagagagaagaagccagcagaacaagcagaagaaacagctcccattgaggccactgcaaccaaagaagaggagggatcaagttaatgaaggccacaaggcactgggcaccagtccttttggagtggaccttttgcaaaaggccttgtcatcaccttccaagaaagtttccttctgttgtcctgtgcattataatatacaaaataacttattttgatgatcagaggtcttgaggtcttgacctcttgacatatacactgaaaaaaatgggggttgtatgtatgtgtgtcctacccaaacctgtggccgccacttttgaattctcagattgccctgaattttgccacttttaaataatgtgctgaataagctcagcaactaaaaaccattacccaagaacgtttcttgtgagtgagctgatttattctgattcattatattccttttggtagattttataccccttggggaaataatacaacaaaaacatctcttaaaaatgctgggatggggccatatctactagcagaggccagatggtcagatatgatttctgcaaacccatcttgaccttgagtatgtgaaggggtactgtactttattcctgatacattttggtttccatgtaggtgttgagctcctggttttctgtgtttggatgatgaagatttggacccttccattcataatccctttctaagtgaagggagaggctggcttggctgttccttgttattccgaaagccctggtttggggcccatgttcacactggctctcagtctagtcaggtgcaatgttcttgagaggtggggacctaattattaccagagtagcagcaagagaggaaacgttgtgaattaagtattcaattaaaaggaaacatgatttctacctgaaaaaaaaaaaaaaaaaaaaaaaaaaaaaaaaaaaaaaaaaaaaaaaaaaaaaaaaaaaaaaaaaaaaaaaaaaaagg

SEQ ID NO: 1170 - DNA, 1273 bp, Homo sapiens
cttaataccttcttaaatgtctatatatcccagtgctctggatcagtgtctaaaaatcactggcaacactgcatgaggttgttggttttgttttgttttattaattagtctttcacaggaggaataattgccctcctttatatacttatctattgataatcccctctccctccagaacacaaatcagagggaaagggggtgttcagctgtactaccaaatcaggaagatgtaaggtttacaaattggctaagaatcatggctctgtagccatttcaaccagaataattttattgctaatctgctttgtgtgacagcattccaggccagccagatgggactgccttgtctggaggctttgttcatctcgaaggacacacacttccacactgtttgtgagccctcccacctccacaacttcagttgtaaatcaagtgtgtggatctcaaagggtgcaatttatctttatataggaatacatttctagggcttccttcaagcccactctcttcaccctattttttcttatcttaaattgagagaaagagaattaatcttatactttgtcaaaacattttctaccatatttccagatgacatctgcgcttgaagagtcaaaggaatctgtgtctaatatcctgtttttaactgctgtaggggcaggatggaaaggatgatgggggctgccacaccactgattggccttttctttcacgtgattcatccttcctcattgtggcaaggagtttctttctctttttcttcctcctttgggatcattgtgtatgaaaagaaaaactttaaatgacaaacccagactccaggtgccttgcaaaggttgaaggccagccaggattgctgctgctgctgctactcctgccaacacccctttcattggcatgacggaatgaaaggatgcatgtctccacttcctgaccctccgcccacttccttctccctccaccacccccagtcgtcagctccttccctcatttatttttgttaagttgtgtgaattatttttaacccatttatcctgtttgtgcatagggtttttaagaagaaacagcacagtgcaacgagcaaatctttttggggtgtgtgggaagcaagggagggaggacatggagaaaagttctttaaacaaatagcaaactattgaacatgtgtaaaatcctgtatcatttatgaaatatgtataaaaagcaatgtaccttctggaacaataaatacttattcaatttttgaaaaaaaaaaaaaaaaaagggcggccgc

SEQ ID NO: 1171 - DNA, 1468 bp, Homo sapiens
aattcccgggtcgacccacgcgtccggggagagataccaatatcatcaagccagaccaacagaagttccttcgatttgctcccacgggagttccgtctggtggaagtccatgacccacccctgcaccaaccctcagccaacaagccgaagccccccactatgctggacatcccctcagagccatgtagtctcaccatccatacgattcagttgattcagcacaaccgacgtcttcgcaaccttattgccacagctcaggcccagaatcagcagcagacagaaggtgtaaaaactgaagagagtgaacctcttccctcgtgccctgggtcacctcctctccctgatgacctcctgcctttagattgtaagaatcccaatgcaccattccagatccggcacagtgacccagagagtgacttttatcgtgggaaaggggaacctgtgactgaactcagctggcactcctgtcggcagctcctctaccaggcagtggccacaatcctggcccacgcgggctttgactgtgctaatgagagtgtcctggagaccctaactgatgtggcacatgagtattgccttaagtttaccaagttgctgcgttttgctgtggaccgggaggcccggctgggacagactccttttcccttgaatgggaaggagcagggattccatgaagtgggtattggcagtgtgctctccctccagaagttctggcagcaccgcatcaaggactatcacagttacatgctacagattagtaagcaactctctgaagaatatgaaaggattgtcaatcctgagaaggccacagaggacgctaaacctgtgaagatcaaggaggaacctgtgagcgacatcacttttcctgtcagtgaggagctggaggctgaccttgcttctggagaccagtcactgcctatgggagtgcttggggctcagagcgaacgcttcccatctaacctggaggttgaagcttcaccacaggcttcaagtgcagaggtaaatgcttctcctctttggaatctggcccatgtgaaaatggagcctcaagaaagtgaagaaggcaatgtctctgggcatggtgtgctgggcagtgatgtcttcgaggagcctatttcaggcatgagtgaagctgggattcctcagagccctgatgactcagatagcagctatggttcccactccactgacagcctcatggggtcctcccctgttttcaaccagcgctgcaagaagaggatgaggaaaatataaaaggaaaagagggagattttttgtccagacctactagacccaacagaaaaggtttttgtattagaatctgtttccttaaaaattgatttgactcctgttcttaaacacaagtggtttttcctaattccagaggaactggacgtcaccaaacaaggttgcattttacttttgcaaaaaaaaaaaaaaaaaaaaaaaaaaaaaaaaaaagggcggc

SEQ ID NO: 1172 - DNA, 1176 bp, Homo sapiens
  SITE (639): n equals a,t,g, or c
  SITE (700): n equals a,t,g, or c
aattcggcacgaggtttctctagaagtaatttatgttatcaggttatcccctgagttttttcttactcaccatatgtctggtggttctcacagccaggggcactgaggggctctgccctgggatctggaggccagcactgttcacctgatctccaccactgagatacctctggctagagccataatcaggtggcccaaaggactgaacaaggaagaatgggagggcactctagactaattaaggttgtcttttcagtctaaagttaacaatgacacacatgaattttcatatcagtataattagatgcgggtcccatctaattacagtgggtcattatggctgttcggttagagcagcttgggtgctctgtgaccatggcatgtgcccgtgtcaggactagacaaagtcatttgcttggggaagctctctccccttcaggtgtgaggccaggagcacctggtgtgggtcctgtccctgaggttctgtcctacaccaccctcatgcaacacctactacacacaggtgcacagcgactgtcacaggcgcttcatgtttaaggatgggcctccgtgtcataaacttttttaaagggtatatagrgatagcttatgraatccaaatcaaaggtccagagtttncagcaaattgtacctacctatttgccaacttaacctcaccatagaaagccaaaagattcancctgtggccagtctttcacattacagagtttaaagtactttttttaaattyctattttatttttaacaaaatatttaacaaaatatagtatatctcatgtgccaggtactatttgtaatatttataaacactgatttayttaatcttcacagagactcattttacagattggaaaacagaggcagagagaagttaagtaactttaatgtcactcagctgggtagtatcaaagtcttggctgctggctccagagtctagacctttaaccactgtgttatgctttccatgggtaaagcaacctaaaaaggcccctggaatcagttacatgtggttggagactaactctgtcattgacttactaaatgcttgatattgggcaatttatctaacctctctctgcatttagtaagtcaatgacagagttagtctccaaccactgtgttatgctttccatgggtaaagcaacctaaaaaggc

SEQ ID NO: 1173 - DNA, 1779 bp, Homo sapiens
cctcagtgagatatttggtaccatggtgtaagctgatagcacaagttctggcgacaggtagcacgtatctgagagacacctgcaagcacacactgtcccagctggtacccataatgctgctgttcctgctgctgctcctgctttcctctcttctcgctttaaatgattgttagcaagttagattttcctggagcttcggaagaaatgaaaatggaaacatgatgaagatatagtcactgaatcaatgagaaaaataatgaacatatgaataccacctaaaaatacactgaataaagtacaccatatagcattatttttataggaaatatttcatgtcccttaaatatcttgttagttatagggatggacagtttatgttaagcacttagcttaaacaatccgtttatattagcactgtatcccttgtgccatccaacattttgtatgtttttgtaaacagttcatatacagtacatttctgtactgctttctttaatgtatacatgccttgtttaacttggaatctattattattaatcaattgactattaaatctggttaaatagttcacctggattaacagtattgttggacagtcctaaaaatggccagattgtggaacagctgttgaatgtaatacttccaaaatgtacatatctttccccacgtctgtttcactggttcgttcatttgtttgtttcttaaagtcaggtgctctgtcagactaacctagagagctgttatggtagagaaagttatcatatgtgtgtggcatgaaatcaagaatacacctatgaagttagtccatatactttgcaactccttagagtacttttttccttaattaaggaagtagtccttgcacttctaatcttacatagcatccatacttagaatttggcatatcatctgggattttgccaatatacgtcaaagccctttaagagtcatggtaaggagatgggtgaaggaaaatttagcaacaggtaattgaagtcctattggatatttcatgtttaaatagatattctatattaaacactaatttaaatgtaataaaggccaaaggcctctgtatgaaattggatttaaactttcttattttagggaataaaacattattgatcaaacagtatctgttctaacctaaaattataggtagggcaggctaagtgaacagcattgaggattttctgaatccctcatgataatttatagccacatactgcttcctttgacttcaggaatgatcaggtttcataatggccactgggcctgcttagattgcagtattcattatctgcatctaatttggtagtttccacaatcggtatttgatgaaagaaacttcagtccccattattacctgtgtctttgccaagctgcctagcatacatcagtatgtaatgtaaaagacatatgagcaagaaaaaagtgatttaacttacctcatcaagaatgtgcccctacaggccgggcgcagtggctcacgcctgtaatcccagcattttgggaggccgaggcaggtggatcacctgaggtcaggagtttgagaccagcctggccaacatggtgaaaccccgtctctactaaaaaatacaaaaattagctgggcatggtggcgtgcacctgtaatcctagctactcaggaggctgaggcaggagaatcgcttgaacctgggaggtggtggttgcagtgagccaagatcacaccattgcactccagcctgggtgacagagtgagactctgtctcaagaaggaaaaaaaaaaaaaaaaaa

SEQ ID NO: 1174 - DNA, 1473 bp, Homo sapiens
cggggtggtaggcaaaggtgcttggggtccggccaacgcttgggctgggcacagggcggatcagtagattgggtcagataagacgccatttgaccaggttcacgtttttgtggatcgaggggtttcccatggagtgatataatgggggcgcctactaggaagtgcagtgttcagtggctttctctatctgttcctttcctcagcgcccagtgtagcgcgtggcgttccatataagttgtggaattgaaatggattccagggccatgccattccccttctctcattctcctcgctctccaccccccctcccccgccaatgtcctggaaggacgccctttagtgggtgcctcctaggagcttggagcagctggcagctctcttgccgggcttgcacggcacccgggctcagttgtaggtggtaagggggctggaagactgtgtccggctcctgccttggggattccgaattgaatccgcgctgagactagaacacgccctcccaagggagcagtcccagagtcatccacccgaggcggattaatcttctctgagtagaaatgtgaaaagcccacaccggccaggaaccctcgcttcgattcactttattttccagccagcgattttcctttgaacatagggatcccatccaggaggaggagacacagctcctagaaacaggatccgccgggtcctcctcctgcgcgggtagacgcagaacgttcccacagtctactttatgcgagcgtggcacccctgcttgaggcaccccagagcaccctcgggccgctccttttcacccgaaagataggatcaccccccagttaagtcgcttctgggttttccgaaactcacctgacactcccaacaccccgaccccgtcccggggctcgctgctgccacctactgcccaactcgaatgaaatttcagacgcatgatcaagcccagtttaatagggaggaaaaaaaaaaaccttttcttctccatgactggggctaagagctgttctgggacaagcatgtatgtgtgtgtggtgggatgggatgggatggggtgggaggagggggcagcaggggatttttctagctggtgccagagcagccaggcctcttagaggtggggtgagtctggccattgtgcaaccccttccagttcctctgagcagataatagctgaatccagatggtgacagcccgtgtgtcaccgtttccagttgagtctaggatatgagtaactggactgaacaaaaggcctttaaagagaccagccagcttcctagaagagaggagatgctactcattctaggggtggggtcgggtgtggggggataaacaaacaagtggaaaacccattcgcaggattccatacccttcctgtgagaattgtaactcaaggctgcttacacttgagtcggactgtaggcaggttgcttaaggctgcattgtcccagcctccccaaaaaaaaaaaaaaaaaa

SEQ ID NO: 1175 - DNA, 779 bp, Homo sapiens
  SITE (652): n equals a,t,g, or c
cccacgcgtccgcatgagtggtaggaaaggattactgtcaaaaatacctatttcaggtgtcacagtcaataatagcaagatagcataaattgactttttccgccctagggatatatagtttatcttcttcagatttctgaggattaaccgaagcaatttttaccagcattcacttcttcctaacgttgtcagactgccctccttcaaggaaatctcaaatctcttctggaagtatatgggacatgaaatctagcaggttaaaacttactataaatgtgtcatctgaagaatgcaatctcatttcctcaaagatttccaccctgaccctgccctggacaagcacttcttgctttttagaagtaagacctataaatcctgtaagtaagttacagggctctacattaggaacaaccaggcataggcaggggkcttgtctccaaaggaccttcggkctatcacagcataatgctggcactaaacttactgtggtaaactacagcaaacagatcattagaaagacaacacgcaaacaatgtacaatgtaattagccttttctaaccagtgtacccttggcttcctaaacaataacaaaaacaagtgacacagaacacataacagtgagaagtaacgactagttcataatataaaagncctttatactttttcaataaatacggtatttggttaaaaaataattatgttgacttagwgattaaaatttgtttaaatctattactaaaaaagaacacgcaatgatacacaccaaatttaaaaaaaa

SEQ ID NO: 1176 - DNA, 1332 bp, Homo sapiens
cccacgcgtccgtttacattgactggtttatgaatgttaaaccagccatgcatttttgggataaggcacatttgctcagatatattctttttcttatcttccccagtttctctcattccccataatgctccagaatttctaattgccaaaatgccctttaaatacttgttcatgggttttatctctcacattctctccgctccttcttcagaaactcttcacctgtttcacttacctagtaaagagtctgaagcagatgactgattttacatttttctgggaaattcaagcagttcattgaagattatcttttggcattaagaaaatgcaatcaaggtcaggcgtggtggctcacgcctgtaatcccagcactttgggaggccgaggcgggtggatcacctgaggtcgggagttcgagaccggcctggaccaacatggagaagccccatctctactaagaatacaaaattagtcaggcgtggtggtgcatgcctgtaatcccacctgcttgggaggatgaggcaggagaatcacttgagcccgggaggcggaggttgcagtgagccaagatcatgccactgcactgcagcctagaaaacaagagggaaactccatctcaaaaaaaaaaaaaaaaaagaaattgcaatcaagtgtcacttaatgatggggatacattctgagaaatgtgtcattaggtgatttcttctgatgggaacatcgtagaacatacttacacaaatctagatggtataacctactgcacacctatcctatatggtataacctagtgctcctaggctacaaacctgcacagcatgttatgtactgaatactgtaggcaattataacactatggcaagtatttgtgtatctaaacctatttaaatatagcaaaggtactaccgtagtaaacttttatgggaccaccatcataaacagagttcatcattgacctaaatgtcattatgcagcagatgactttattcaatttatatttaaagagaaccacagttctgatatgttagacattagtaatgccattcaaaaacttgagtcaaaaactacataaatatttctgaaaatttaaaaaatgtaaatgtatattacaaaaagccaaaagaagtagtaaaaagccaaaaaagagtaatatcaatttcatttaaaaataaactgaagtggctgggcacggtggctcacacctgtagtcccagcactttgggaggccaaggtgggcggatcgtgaagtcaggaaatcaaaaccatcttggccagcatggtgaaaccccgcctccactaaaaatacaaaaaaaagaaaaaaaaaaaaaaaaaaaa

SEQ ID NO: 1177 - DNA, 2129 bp, Homo sapiens
cacgcgtccgcggacgctgggctgttttatgtgtgtgtttgtgtatgtgtggtgtgtgggggtgactgtgagagtgtgtgtgtggtgtgtgtgtggcatatgggccaactattatgaatgtgtgtgtgtgtggcctgtagggtgactattttatgagtgtgtgtgtgtggcatgtgggatgactgttttatgtgtgtgtgagtgtgtgtgtggcctgtggggatactatgagtatgctggtttggagtgtgtttctttgggcctcagttttctcctctgtggaatggggatgatcatggcgtctcgtcactgggccgtgtgaggatcgaaggctgtgttgtttgtgcagcaggcagaagggatcctggtaggagcccacgcgtgggagcctctcatgcgccatcatcagtgtctccaagtgggtccgacatggtgggagcagctggctcggcctgtctccctggcagccccttccagcctccacaggtggtcccggctgactcatggcctgggagggctagggtgggtgggaagcccgccctcgagactgtctctgcccggctctggccacggagtgtcccctgtgtccagcactatgtgcccctgtgctcctgagtccggaaacagttctgtggggtccacatccctcccccatctcatagcagaagggactgagcgtccaagtggataaaggatgaggataaaggaccgtgccaaagccagatgcctcccagcgagggtcacaatctcgcttccacctcatgagtggctgcggcgcctcgggaatgaatctgttccatgttctgtgttgggagctggcgctgggggaccacaaccctcaaagtccccagcaccaaggcaaagtgcctggggctcaagaggggaagcccacctgacgggaagctgagggcagggcctgggtcatgtccccactggctgcaccctcaggagggcgggatccatcaccctcatccccatgcagggaaaggcccagggaccaggtcagaatgacacagagcccttgagctgatgcctcccctgacccctcactgagggccatgctagaaggggggatccctacaaaaggggaaatcctgaggctctggaccgggcctccagtaggggctgtcacccctggctctgaccttgctcccggagcccacctcccctgggtcgcctcctggtcatgggagcctccctggggaagagccactcctagtgtcctagagatgtggccccaggcgctttctccaccaggctgcaaatcccttcccaagctcacatcccccaagtcgtcatccagcccaagccgagcccccagttgcaccccaaggccttagcacaaggctgcagctggtcctcgagccatgatggacacttaactcctgtcccatgcatgtgccagtgcctcacttactcaccttggtgaatccttacagccctgaggaggtgcctgttcctcctcttctccctttttactgatgtggaaactgaggctgaggttaaatcactcactcaaggtcacacagctgttcaatggcttagatgggatttgaacagaagtctgagtgagtccagaacctgggacttcagccaccgggagtgtggctcccaactgtacatgcatgcatgtacacagacacacgctacccagacacttctcacacctgatgtgcacttgggagcagtgccccggctcccacctgttctcgtggcacatctgggtagagcctgggtgttgctggtgcctgaggcttgcgtgagagctttccacttttccctaagtctcccatcaccactagggttatgtgaattggctgcgcgtgatggctcatacctgtaatcccagcactttcggaggccgaggcgggaggatcacttgaggtcaggagttcgagaccagcctggccaacatggggaaaccctgtctctactaaaaatacaaaaattagctgggcgtggtggctcaggcctatagtcccagctactcaggaggctgaagcatgagaatcgcttgaacccgggaggcggaggttgcagtgagccgagatggtgccactatactccagcctgggtgacagagtgaaactgtgcttaaaaaaaaaaaaaaaaaaaaaaaaaaaaaaaaa

SEQ ID NO: 1178 - DNA, 2332 bp, Homo sapiens
ccacgcgtccgcactatcaaataaaaatagggcatttcttatggtagatgggagtaagaaatatcatcttctgtttttaaaaaatgtaactatataaatgttaagaaagaaatctattgaataaaagttggagaaaaaagaggatggttgattttaaactctactgacttggttgacttttacttgatatgtgctatctgaaaaaatggacaatggccactccctcatttctttttttcttccttttattgaattttaacagcagttttgtctggctcttttcatttctgtgtttatttcctgtaaaattgtgatgcataatcagagtaagtttttgtttgtgtatgattttgccatgaaaagtcactgtgtatctgaagccaaaattacacttagtatttcatgcggttttggctgatttcctttctatttttcttcattaagcaagtgccatcaaggccagcagtacccatattatatgtccagagaagagccaggccagatgggaactgcgtgaaagcaaccagttatcttgctaattatgccagctagaaccagttgtattgcattaaaaaatgtggaatccaacaacttagctgttcacactcaattagcagtgtgctggagaatggaaaactcaagcaaggagtccatgtgctccaggaagtgacagctgcttccttacccagcatttaatatccatgtaaaattttttcaataaacgttgtgataatttttgcaagaatcatgtatatgttatgtctctaattcatctcataatttaaaaaaaacataaagttcagtggtctatctccactttataacctttctttagcccacatgaagaataaagtgcaaaagtaagccacaaattcttgacatgttttcaaaaagaagaaatcagtagagaaaggagaaaaaaatcaggaagacaacaattagcgtatttatcataaatgaaggaaataaaacatcgagactaaaagaagactcaagtgtttcatttgtacatcttctgagataaaaatagctggaaacggcaactcacttcactggcatttttcgttccactgtctgtcacagatgatgccgagtttctctttctgactgatcttcaagctgaaggtaatgtgacagcaggaacattacaattagtatgcgaatacctatcccctgggttacaaattggcattctttaaattctgctattctcagcttttttatttttgttattaacttttcattggtcaaaacacttaaacttctaagtaataaataactctttgaataaatgtgacatttctctgagtctgtggcataattgaaataaattccatctgaaagttttttctgaagttcatattcatctgtttgcaagacaactattgttcacaggaggttaaaccaatatataatgatatacatattataaatatacatatttataattaatattcacctttaagtctttaatctgcctaagagatcattttgttttcctttgttctttgattttcagagaatctgaggagggctctacctttagtatacttatcttaaacaactatatatgtttaactatttaagcaattttattcatgaactaaaatgttctaatataagacattgcagttttctttgaaatttatgcagtttttattgcttaataacatacatttctctcttttaaccatggatctcaagtcattttatgccaatatttctttatgcaatatgatgtttaatgtaataaggctaatatatttatcaaaacaaagaccatatattggcaattttaattatagttaaagttttataacttcatgctttgtcaagcttttatctcaatgtaatacagttctttggtagtaaaattcaactggtatgtgtttatgaccctcaatgtcaattaaaaactcttgaaagattgacaatttttcaggtgggagaaagaaagcagtcaaaagaaggtaaaaaatgttcttctccttgacttaccgtggaaatgccctagttgatctatagaaatggttagtatcagtggccctggactaatgaaactgagagaagtagaagaaatgacctaaaaagtcggtgtatcattaagaagggaaatcatcaatcagcacgatcccttttgttaattcaagcaccattaagtaatgttcttaggataagcaaaaactgaatcattaaacatattttcactttttgttttgctcaggggggataatgaagtattaattttataatatatgcttgaaaatagtacagtttggaaaatacactgtcaaaatttaaagaccctcttggttaaaaaaaaaaaaaaagg

SEQ ID NO: 1179 - DNA, 1907 bp, Homo sapiens
  SITE (24): n equals a,t,g, or c
aagtcatattactaaaagtttttnccgttcaggaggagttggtctcacttttttgtgttcagatagtggagaactgtgctcccgttctagggccctccctcctttctctttattaacttctccccacgggagaaagaatggcaaattggaaagctcggggcttgacattaatatgagtgaagtcactgtatttccacatggctttcgttcttttttttttttttttgcgggggaaacaaggggtggaggcctgcagaaaggtgccagctatcctctactttttgcctgctgtcttcaggcaataaggagattagggaggtgttcccctggcaggcctaatctggtctatacttcttctagtccagcctttgcctggacaggtaaatcagttcaggtttgctctgtgaacctggccaccttcaggtctggaagaagaacataggaagccctgctgacgtcaggcttaagctgtattctccagcacatttaccagaagcctctggggttgtgtgtgaccatgcctcgaataaagcccatgttctgatccccatctgtctgtcagatgttatttgtggatgttatttgtggttatgcccagttggttagaacctagaaagtgataaaagtgagccatgcagccgggcacggtggctcatgcctgtaatcccagcactttgggaggatgaggtggatggatcacctgaggtcaggagttcaagaccagtctggccaacatggtgaaacactgtctctactaaaaaatacaaaaattagctgggcgtgatggcatgcgactgtaatcctagctaccgggaaggctgaggcaggagaatcccctgaacccaggaggtggaggttgcagggagccgagactgcgccactgcactcaagcctgggcaacaagagctaaactctgtataaaaacaaaaaataacaaaaaaactagcgagccctacagctgcaggctgaggttctagttttggcaataagctaaagtgtaaataattttacatttaaaactatggaacaaatagaggtgggacatgggctgcccctgcccacctctccagccagttccccgactcttcgtcttctttctgctgcatgtggtctgaccatcttagttctcaagtttgmcaaactttttttcagccatgtgtcctttgcctatgctgktttctctgctaactttctcttttttttctctctcttacttgctgcttttatggtcaagttctaactcttcaagcgtacacttaaatagtaccttctytgaccccgtaggctaggttgattgcttcagtgtactaaggcaaaaataccctgagtatctgtgctcattaacctctgtgtttcccttttgtaagatttatcacaattgtaatcaaatatttatgctatgatatattggttgcctttctagattttctaacagtcttctttgcattgttacataaagtgtttagtgcagagctgggcactcatatttggtgcctgagggagatttgttgagtgaataaaatagcagtgtccagcagcgacatagactgctgagatatggcatgtcagagtctgaaaggctctgtccagttggcaagtggaattcattggatgttttacaaagaatagttttagtaaggkggtggggacggaagtgagtttgcaaagtatcttataaaaagctagacttaattactcatttacgcaacattggaacccttacaagtgatttctctrctgagagcaacttttcttgagttttactaactcagtagacactgtcagaatctgccagattacaacaaaggggtaaaaattcctgatcacttgaggkcaggaattcaagaccagcctgggcaacaaggtgaaacccgatctctactaaaaaaaaaaaaaaaaaaaaaaaa

SEQ ID NO: 1180 - DNA, 1639 bp, Homo sapiens
  SITE (1623): n equals a,t,g, or c
  SITE (1624): n equals a,t,g, or c
  SITE (1625): n equals a,t,g, or c
gaactgtcagactctcaagtaaaagcagccagaaaggggaaaaaaaggtaacagattcagcattgtccaaaagttccagaccagtgattaatgtgtaagataatggacttgggaaatgagtaaacactccccatgctccctgctttgtgcttgaacgacttgatgacaagggcagagcaaggtgagaatttaaacaggaccacaggaaaaaaaaaaaagacaaagactggcaacaacataatgcgagggagggggagtttactggtttgcagtctaaaaggtacataataactttcttcaaagcaggccttaacagtgtactaatttaaacttcaacatgggcatggaattacccgtagaaattatatgccactcagtcatcttttaatataccggatatttatatgtacttgttttcatttatttgttgttaacttccttcggcagacccattaagcatttagatacatatttgtgttcagatgtatcatcctcagggaaaggagatgctgtattttgattaagtggtgcatttcaaggtatttcaagctattcttaaataattatataggcacattttagagtattcctccataaaaaaatatttgaggatctggatgccttgctagctgtcgcactgcatttcttagcaatctgtcatcacttgaacttacacttttcttgatcacattgaagacctttyatatgtataaaacatttatttactttgaataaaacttgttttgtttccaggttctcactccctgtatttctttagacacctacagaggtgttttccagggatctctttttataggatcagtagcttaaacatgttaattttgtcagtgttttacataaaaatctatttctgctctgtcaatctgttttaaatgcacacatcacaactgacacccactgaggatttatttgkctctaaaaaaatcctgacaatttctctggacaaatgktacccattmccttaaacggtgcttaatgaactttgagcaatggccatggagagactgtgktcacagscctaaatctctatawtgttgtcaggtaatcaagtcttcggtggtcaatttaaaaatatttgaaattatcatattggttctgaatacaatattcatcatttttcttttaatcatagagaggtttgtaattatgtttatgtatattttgtaaattaagtccataatttaaaaaatcttgatattgcatcttcctaaaggcacttcagtgattcaaccctgaaaagcatgataatacagaaatgccattgtgattatcaacaactggattgctactttcaaagtacctttaaggccaggcgtggtggctcacacctgtaatcccagcacgttgggaggccgaggtgggcagatcacctgaggtcaggagatcaagatcagcctggccaacatggtgaagccccatctctacaaaaatacaaaaattagctgggcataatggcgggtgcctgtaatcccagctactcaggaggttgaggctggagcatcgcttgaacctgggaggcagagattacagtgagccaagattgcaccattgtactccagcctgggcgacagagcaagactctgtctcaaaaaaaaaaaaaannnaaaagggcggccgc

SEQ ID NO: 1181 - DNA, 1858 bp, Homo sapiens
aattcccgggtcgacccacgcgtccgctggtctgatctcagcgctccttggtctgcttgcctctcccaggacgcctgcacattacctctccatactgcagccctttatatggaaacttcctacatcactttgctgtgtgtgtttacacatgtgggttttgctgtacttgccctgacagcacacgggagtgcaggccacaccccaacccacaccaactgccactgaagacagagccttggtgggcacagaaccaagaaccccacccctgccagcacctaacccttgagctaatgctgtgcagataaatagggaccttcttataccctgagtgaccacagttgctttgaggggcacagagaaggcaccatggcctgcactggccagcagcccaccctgaaccaacactacctccagtgcaacacacacacagcaggggacccctggcccacaccccagctgtcttgcctccaccactgggtgaacgccctcagggaggcagggaattttgcatccactagcattctgccacagttgccacactttggtcccctcagtgcagtggactccaaacctccaagagccagggaacaaagttggggcccaagacaagttccccagatttaaagcacacagtccaggaattgggagccgcacattggcccccctaaaatcctccaaaaacaaagccagttagttgaatccaccttatcccacaatgaaactctcaagatcatcaaatacaataaaagaaaaatactctgtccgaaagtcagcaacctcaaagatggaaggtggataagcccataaagatgagaaagaatctgtgtgagaacactgaaaactcaaaaagtcagaatgccttctttcctccaaatgactgtatcaactctccagcaagtgttcagaactgggctgaggctgagatgtctggaatgatacaagcagggttcaggatatgcgtaggaacaaagttcactgagtgaaagaagtatgttgtcatgcaatacaagtgagctaaaaatcattgtaaaacattgcaggagctaacagacaaaatagcaagtataaagaagacataaccgacctaatagagctgaaaagcacactacaagaattttcataatgcagtcacatggtgattatgtgtgactggattatgaaaattattgtagtgtgtgtgggcacccgagattgccctgtaagcaggtgtggccagacaggggtcctgggagaggcaagcagactaaggagcgctgaggtcacaccagttccatctcatgtgcaagaccacccagcagaatagaccaagctgaggaaagaatcccagagcttgaaaactggctttctgaaataaaacaggcagacaagaatgggggaaaaaagaaggaaaatgaataaacaaaacatccaagaaatatgagattatataaacgaccaaatctatgactgattagtgtacgtgaaagagataaggagaatggagccaacttggaaaacatacttcagaatatcattcatgagaatatccccaacctatccagacagaccaacattccaattcaggaaatccagagaatctcagtaagataagccacgagaagatcatccccaagacatataatcatcagattctccaaggtcaaaatgaaagaaacaatgttaaaggcagctagggagaaaggcagtgtcacctgcaaagggaattccatcagacttagcagacttctcagctgaaaccctacaagccagaaaagatattcaacttcttaaagaaaagaaatttcacgtagtatggcagagacagatataccatataataacatggtgttattataaatgatttaaaaaaaaaaaaaaa

SEQ ID NO: 1182 - DNA, 1036 bp, Homo sapiens
aattcccgggtcgacccacgcgtccgagttgataattattgaatgtggataatgggactgttgtatatacttgtattctataattttaaaataagcataaactctcaaaaatgggagaggaaacggcaacaagattttggaagctggaggcaaatatattagtggtaactgatttaaccaacctgagagggctgaatcttaggtcagcagtgggaaaggcaaactgctttgctttacagatttcccaaatgtcttaggaatttgtgacatcaggaacctctggaagtgggtgtataaggatagaagctttcattcaaagcggtttaaaaaaaggccctaaataccctcttcagttccatgtagccaggatgaaaactgactcaaaattttttctctggaaagagtaaaatagaagtctggattgcactggtagttgagttgtagagctactaaatagggattaaataactgtgtgcattctggttgttctattactcaaggaataaaactaaagggcttgccccaaacctaaagataattacaggagaaaaaaaaaaaacccagccagttacccttcagtgagcccacaatcactatgctccatcccttcagtctccctatcaccttttttatttgtcacacttaaataagagcaaaaacagccaaggattatcaggcatctcaggaaagtctctaacatgaaagagagagacaaaaaaccattggctgggcacggtggctcacccctgtaatcccaacactttgggaagctgaggtggccagatcacttgaggtcaagagttcaagaccagcctggccaacatggtgaaaccccgtctctactaaaaatacaaaaattagccagccatggtgacatgtgcctgtaatcccagctacttgggatgctgaggcatgagaatcacttgaacctgggaggcggaggttgcagtgagccgagatcacgctactgcactccagcctggctgacagagcgagactctgtctcagaagaaaaaaaaaaaaaaaaaaaaaaaaa

SEQ ID NO: 1183 - DNA, 849 bp, Homo sapiens
  SITE (844): n equals a,t,g, or c
ccacgcgtccgtacttttagtagagccggggtttcactgtgttggccaggctggtcccaaattcctgacttcaagtgatccacccgcctcagcctcccaaagtgctgggattacaggcgtgagcactgcacccggcctcacttatcattattaaactctaacatgtgttgatcacttaaaactctcgagttgtactgtgtgacatgtgatagctaccttatttcattacttcatttattcccttgaggcttggagactgatgtgtgagggaggagtctgagggctcctgggccctcgcccatgggagctgggtgcgtggctgtcctgttgttaggacaagctgcaggagagactgtgtttccttggccatgtcccgtggggcccagcatgatgtcctgagtagcagaaagatgggtgagggatgggctgcctggatgatgactggctgatgcatttctgccctcagttttcaccatggccaggatctcttcagagtcatgattcaatggaatttataccaagtgtgccctgatttgggggtgtttctcagatgatgtgtagtgcccccactcagaggagccagaagccaaagaaactcagatacacttgattctctaattcattctctcacaggaattgtcttctaaactgcaaatattaaacagcgcagagaatggtctcacaagctcagaagggatctgggaggaaatgaactgctaagagggttattttcagctactttcacttactgctttaaactgtgcttctattgtttgaggtttttgcagtgagcacatacgacttatataataaaaaaaattccattttgaaaacaaaaaaaaanaaaaa

SEQ ID NO: 1184 - DNA, 1759 bp, Homo sapiens
ccacgcgtccgctataatcccaacactttgggaggcccaggcgggaggatcacttgagaccaagagttcatgaccagcctgggcaacatagtgagactcagcctctatttttaattgaaaaaaaaaaaaaaagcctgatgcagtttcatgttaaataatcagtattttttgtattattctgtctctcttcatcttacaaaaaaagtagctttgaaacaactaatatgctcttttttctttgcttctgctttcttcagctcttccatgtctataaagccaaccccttctgctcagctcactagaacaccttttccatgttatgaaattaagtgttgccacattctagagttgcaataaaaccaattgagatctttaatctaaatttgttgtaattttgtcctttgacactctgtaaatacggttttataatctgtgttttttccccactttatactatagacatctttcttgttaataatatatacttactaaatatgatgacatagaatttcattgtatgggctgtaccataatttaccaagccaaactcctgttagacatttagatttattctagttcttagctgttaacagtgtgctagaaatgctgtatgtgtgtgtaatttcacatatatataatcatttacttatattactagaatttattgttaaattctagacctggaatttccaggtttaagagtatgcacaatttatatttttaaacaccttgataaattgtccttcaaaagttgtatcaatttgtagtctgcttacatggagaaaattacaacctgctgtttttccactgatgtagtattagctttcactgagaaaatgaattggatgttttcttttttttcttcctaaatctcatatgtggtggaaagatattttcttttaaaaacacattctcagactgggtgcagtgtctcacgcctatgatcccagcactttgggaggccgagatgggtggatcatgaggtcaggagttcgagatcagcctgaccaacgtggtgaaaccccatttctgctgagaatacaaagattagccatgtgtggtggtgcatgtctgtaatcccagctactcgggaggctgaggcaggagaatagcttgaacctgggaggcagagtgaggcaagatcatgccattgcactccagcctgggcaacaagagcaaaattctgtctcaaaaaaaaagcggggggtattttttagtgcagagctccccaaagcctctaacatacttccaaatagaatgacttaagcaactcagaagaaaagtttttcagaaagacaaaagcatttatttgcaatagaggcaagagggcaacgggttttcccatgctcctgctcaatccctctcccagatgaacagatgatgtcttgccatccttaaacttcattgcaaagaaactggtttcatccacagctcccttcacattcccacccaatcccttagcttccattttggaccatgggacttgactcatagactggctatcaacctgtaacacagccaggtataaaaggatgacctgagcttgggcaacgcagtgagactctgtctctgcaaaaaaaaattttaaaaattagccaggtgtggtggtgcatgcctgtaatctcagctactcaggaggatgaggtgggaggatcacttgaattcgggaggtcaaggctgcaatgagctgtcattgcaccgctgcattccagcctggatgatggggagagaccctgcaaaagaaaaaaaaaaaaaaaaa

SEQ ID NO: 1185 - DNA, 2220 bp, Homo sapiens
ccgggtcgacccacgcgtccgcccacgcgtccgctaaaattaaaatatttctctgagcctccttcccttgccacatcagtggcctgggcttgcacttctaaggccaaaagcacaggcataaatattttgaggtgtcactttaaagagaacatgcatacatctctgttgccaccttaactttcctcctggcatgtgcccaggcagagttcagggcataccacaaatgcactcagcaatattcagggcctgatttttggaagcctgcttgaaaactcgcctgtaatttaaaatagtgagaccagaaattccagaaagtaccctagtttttgggaacgcctgatggcctgcacatggactcaatcctgattttcaaatggcaaaagctggggtggggggcatttaaaacttgctttttaaattgtgtgcttacttatactatctggtgttttatttgtttattttttctaacaatgtctcgaaggccatgagtctttaggcaaaagctgcaatttggaggtttaaagcaaagatgataaacagcatctaatcatcccattaacattttaccacttttctctctttttaacccaaagatccaacacagcaacaatactaattgatatggaagagtcaggccgcaaaggaggagagagaggtacagatagagcaaacctttgatgtaaggtcagggtcaaaaatgctggggctaggctgcacaggtgtaaagcctggcctggtcacttacccacctagtatgaccttgaacaagtcacttagtgtctctaggtctcagcttcctcatccatagacgtggatgtgatagtaatagactctgcctcaaagggctgtaggcagagtaaataagctaatacatgtgaaatgcttggaacagtgcctagtaagtacatggcaagcacaaggcaagttagcttggatcctcacccagtgctgcctcacttaattcactggccctgtgtccctgtttaacaatctatacacaaaaagtaagtagaatggcctaaaaaggcaaactgcctcctcaaaccaacaggctaacagagacagtgagaatggcacttatgggcatgcaaagagccatcaacgttgatgggtatacagcagatataattatgcaatattgccattaggatgccagaaagaaaaagcatgaataaattgaaatgttaatgacttcaagtgttcaaggaaatattccatttattatggaaaacaaatgaaaggcaagttaacctgtcatttctcctactcagagttagttcatcatgacttcatgtacggtaggatcgaaacaatttatggaaaatactaccaaagaaattaagataatgtcaatgcattacatattgccactggctctgagtttctcttcctaagctatcatccccaaagctttgatagttgtttgcacaagacagtttcagcaagaactcttcaaaaggaccctacgcccaagttctgtcagagaagtgaagagtgtcatctggaggaaaggttcagtgctggagagagcattctgctcagtcataaagcctgttaaaggaaggttaagaaggaagaccaggagtagcacagatggattctacagttctattcatctgcatttccaggacatgttgactggaccaccaggcatccagtttcgacttgttgggtcttgaggcttgttttccttgtttgtaaaatggggataagaaaataagaagacgaacaagcaggtcatggtgagaattaaatgagataatagatgtagagtgttggatgcagttcctagtattcagtattcagtacacagtattcaggaaagagtgtcaatatcattaatattaataagatatgtaaaataatttatattattaatattatcccaagcacttgagagtttccctgaaagataccaagaattctgagcagggggctggttcacaactataatcccagcactttgggaggctgaggcaagcaaattgcttgagctcaggagttcaagaccagcctggccaacatgacgaaaccctgtctctacaaaaaatacaaaaattagccaggcatgatagtgtgcacctgtaatcccagctactcgggtggctgagcatgagaatcgcttgaacctgggaggcggaggatgcagtgagccgagatcattccactgccctccagccggggcgacaaagtgaggctctgtctcaaaaaaaaaaaaaa

SEQ ID NO: 1186 - DNA, 2702 bp, Homo sapiens
ccacgcgtccgcggacgcgtgggtttttcgaaaatatgcagaaatttgtggtaattatgtatttgtgtcttgtgacaattatgttttatagacctacactagtgccaggtcactattgtaagatgttaaaatctcaagaaaatttcacagagctaaagaaatgatgtcaaattagtcacattaagctatagtagaaggaattggacacttctccagatatttggcttcaaaggagtacctttacttacatgtgctttatggtaagtacattgaattttactttaaatgcattttactacaaagcacaattcatttgtaatgcatatccatcttggattcaatccaaggtgctttagctatcagtagtaccaaaggatctttttacaaggcttcctgtggtattgactctgagaataacacatagtgaagatctgtgggcttttaaaattgttcacagccaatttaagaagacccctcatgaagtctcagttttcagtacagtacatcattcctcctcactaggagcactttgatgtaaaccagaatagctttaaaaagacaaaaaggatcgtagatctgatttttaaatggttggttgctctgacagatctgaacactttgcttcatgactatttcgtcataaaggtatatgtttaaaatctgaatggcagtactagctctatacttttaatactgctttgtattttatatgtaaagtagtattgctgacattttaaaaaaatacaaaatacaaaagaaaccattagaaattaataactgtggctcttccagttgaaataggaattggagagaaaggattagaatattttaattaggggagtagattattgtccaaaggcttttatttagagaaacgggtaattaaaacagcagctttagaatagcttcttactgaatatgcaaaagaataattccttgttatttcctaattgatccaagtctcataaatttagcttttgtcataattccttaccgaaaacaactgaaattgagagtcataaatactgtgggttagaataaaaaccagttgccaaagcaacactctacttagaagcacatgtacatacatggacctcattcagaagtccatgttgtagcagttagaatttgagtatcagccatttcattgtagtaacaaaaattgaattgcattttgtgctcagttgtttattgtaattttatttttgttacattaatattagttaagatatggtcacttgaattttttgtatttaagaattttctgttttaatgcatgttatacttttatgtaggattccaaaccttccctctaaatgggatttaacccacatctgcgagatcagcgttatgctaagaggaaatcactgaggccatatctttttacaatctgaaaaaaaagtagtaaaaaggtagttaaaaaaaaaaaaggccgggtggtggctcatacctgtaatcctagcactttgggaggccaaggcaggcagatcacttgaggtcaggggttcaaaaccagcctggccaagatggtgaaaccccatctctgctaaaaatacaaaaaaaaattagccgggcatggtggcacgtgcctgtaatcccagctacttgggagactgaggcaggagaattgcttgaacccgggaggcggagattgcagtgagccaagatcacgccgttgcactccagcctgagcaacagagcaagactccatctcaaaaaaacaaaactactttcattaattacccattatttattttagttacttaattttgagttcataaatggccaccctaatggaaagtttgggtatgatcttaggttttatggagatgttttcaatagagattatttttccctcaccctatttgtgaatatataaattaaagtaagacaatggagtaagtaagagggtagatccaaacacagtatgtctaaattctagcactctactggctgcttagaatacaccaaacctggaagacctttccaagagtaaaatcccagtctgccactatcaaaattgccacagtcacttttactacttgtgttcatagtagactcagcacttctttttcactggacctagtataactgagaaataaataactgtgtgcaaaatattggtatcattaaggacccagagctgcccattttctctttggtctaatagggaagcaattactgatagaaatgtgagattaaaaatagggtcctccctgctgctccaaacaaatgcctaaacacagtatgtatctcagtcctctgttcccagagattccaccctagcccaggaaagaactggcctgtgtaagcaaaacccaagtcatccccctccagaaatttctctggcagccaagcctgaccctaagggttccactttgctttaaaagctaggagtggcctctagagccaggaacacattaatacaacagttcaacctcagcaccaagtcaggtacgaagcgcttgatacgtggaatttttctctatatcaagtttaaatttctggaaatagactttggttgctaatgacaattacagttataccatagtctgtaatttgagaaaaggtgaaatgtatttaatatatatttagttttaataaaaagataaaattattacagaaataattgagagagagaaaatctattataatttatttgaaaaataaaacattttatccagtaaaaaaaaaaaaaaaaa

SEQ ID NO: 1187 - DNA, 1785 bp, Homo sapiens
  SITE (936): n equals a,t,g, or c
  SITE (1004): n equals a,t,g, or c
  SITE (1730): n equals a,t,g, or c
  SITE (1750): n equals a,t,g, or c
ggcagtatgactatagggaggctggtacgcctgcaggtaccggtccggaattcccgggtcgacccacgcgtccgaaaaaaaaaaaaaaaagagcagagaaaatgataaacaacttgcaggttgttgtgtggtataatggtcattcattattttctactctttctggtaaagagttggtgtgtcatggaaagtacctgttctatgtgtgtgtgtctgtgtgtataattcggtgtgaaaattaaagagaaaaaaacaataaaaaaccctttcctatacttatgtgtaaattaccatggtgtgctgcaaaaaacatatgtcaaggtgatagaattattttgactttcctgtacagttataaaatgactcagtgagtttggttagatatcctcgttctttgaatctatatccttgtctgcttatgatgaaaaaaaagaaaaaaaaataatggcgagggtcttccaaactctaaagaatatgtcaactatgatacaagtagcagttagccttataactaactgtaaacactgtctgtgggttttaagttttacctgagcattggatattaacagaccattagcccaactttcaaaaatatgaaccctatgaacttcacaactgaagtcagatctgtatgcctgagagaggtaaaatcatgtcatgaaatcaaacggtggctgatgcgcccaaattctggcctcatcctctaactggaggacatctggcaggacagcaactgggctgtgccttttttcagtccagcaacatcttccactcaacccacgccatttggcagtttccccattgcccctggcacctagccctccggtaccgggaactaaatatctttgamcatcccgcccgcggggtctgcctacttaacctgaggcaggtgaaagagcctcacgcagggttaggaactccgggggsgtggcgtancgtaacgcartgttggggaaacttgcggstgtggattgggggaccggaaagggaggggtgggccscangcgccggacgtgacgtaagccggaagcgactttccgccgagaaataaggggcgcgtgtttggaaattgatagaaaagataaagggaccgagctgctgtcagcctggcttactgatctgcgtccgtttcaccacggattcagttactaagcatttttttctttttttggttctttgcaacgtgagtggcattggctcagtgatttccatgagcatctctaccagaaaacattgcctcgatgaggtgtggtggaagcccggcagccccttctaatcggctaggcttgagaaagcgtgtacctctgcatttccgaaattaactcagcgtgatcggcaagattttcctcagcatctggtgtcaagacactcgtcactattaattcggaaaraaaaaaaaaaacaaaacaccgttttccagcatttctcttggtggagaactaaacaacaggaaaaatgtctattttccctaagatatctttgagacctgaggttgaaaactatcttaaggaaggctttatgaataaggagattgtgactgctttaggtaaacaagaagcagaaaggaagtttgaaactttgttaaagcacctgtcacatcctccatcatttacaactgtcagagtgaatacacatttagcctcagtacaacatgtgaaaaatctgtttacttgatggaactttcagaagtttaatgggttaagggttcccattttttcaacatccagacntcaagatgggttacctattncccgttatttgggccccgaagggtttttaaaacca

SEQ ID NO: 1188 - DNA, 1162 bp, Homo sapiens
ccacgcgtccgcccacgcgtccggtgagaagctagctgagagaatgctagcagtgttccttcggatcaagttgagactagctggtacagttaagcctaagtttctttttgtttctttccttgcccctctcatttttctagactttgagaaatttacagtttggtagttaaggactatgtttgcaagcctaattcaaagcttttggggaatgagttgttttgttgtgcaaaagacaaataggaagtatatgactgtatgccttataggaatagaaggcagcagatagtatagctattttccatatggggaaactgaggcatgggagggttacttaatgaagtccctgatctctcaagaggcaaacattaaaaaaaaaaattagagaaagacgtcattatttgaaaatagaggtgagccctcctaaagctggtcttgagctgtttcacgtgttagtgctggcaggaggtaaccaggacggcctaaatcttgctttctgaaactcgttcatcaggcatttcctgagtggatgtgagtactgagatacatcatcagttctcccatgtgccacgtcactgctgacacgtccttagaaatgtctgatgtggtgttggctgatcttggtattgatcagttgtgaaagtggaagaggcatgagaagagacacctcttggggcacgctaaaatgacatatcgtgggggtccctggacaactttttattaggactggagccagccctaggaatatgtgttttaaataagtcttttaggtgattctgacgtaggtcatccaggaactcactttggaaagcattgtactagacatgaaataggagtggctggatgaaaaacaataaggaaaatttgccccggtgctgtggctcatgcctgtaatcccagcactttgggagacagaggtgggaggatcacttgagcccaggagttcgagaccagcctgggcaacatggtaaaaccccatctctacaaaaaatacaaaaaattaaccaagcgtggtggagggcacttgtagtcccagctgctcgggaggttgaggtgggaggatcacttgagcgtgggaggttgaggctgcaatgaattatgatggcaccactgcactccaacctaggtgacagagatcctgactcaaaaaaaaaaaaaaaaaaaa

SEQ ID NO: 1189 - DNA, 1024 bp, Homo sapiens
tcgacccacgcggtccgctgacttccatttcccccgaattgaagagcaattagaagttgtccaacaggtggtactttatgctagaacccagcgcaggagtaaattgaaagaatcacttgattctggaaaccaaaatggaggaaatgatgataagactaagaatgctgagaggaactatttaaatgttttacctggggaattttatattacacggcattctaatctctcagaaatccatgttgctttccatctctgtgtggatgaccatgtgaaatcgggaaacatcactgctcgtgatcctgccattatgggactccgaaatatactcaaagtttgctgtacccatgacatcacaacaataagcattcctctcttgctggtacatgatatgtcagaggaaatgactataccctggtgcttaaggagagcggaacttgtgttcaagtgtgtcaaaggtttcatgatggaaatggcttcatgggatggaggaatttctaggacagtgcaatttctagtaccacagagtatttctgaagaaatgttttatcaacttagtaacatgcttccccagatcttccgagtatcatcaacactcactctgacatccaagcactaaacccttatagattgacatgctggcagaagatgattgttaaactctccaggaacttgtgctatgctgggaatctgtcaagcaaaagatgcccagaaagagaacttgcagctcaatccacaaatcaagatacatgtgtgtgaaaccattccaaaaatttatatactgcacaaactggtgatcaacccctaacttaaacacttaaagtctctttatgaatttctctttttttcttctctgtgttacctgtgaatattagtaatctaaaactttttatttatcacacatggacacttgggaaaggaaacttgattatatttacatggaggcatttgactttttcaagaggcttgactcgtctcaggtgcaatccttaattaaacatacaaacaaaaaaaaaaaaaaaaaaaa

SEQ ID NO: 1190 - DNA, 2191 bp, Homo sapiens
ggggtccgaccccacgcggtccgcgtgactttccatttcccccgaattgaagagcaattagaagttgtccaacaggtggtactttatgctagaacccagcgcaggagtaaattgaaagaatcacttgattctggaaaccaaaatggaggaaatgatgataagactaagaatgctgagaggaactatttaaatgttttacctggggaattttatattacacggcattctaatctctcagaaatccatgttgctttccatctctgtgtggatgaccatgtgaaatcgggaaacatcactgctcgtgatcctgccattatgggactccgaaatatactcaaagtttgctgtacccatgacatcacaacaataagcattcctctcttgctggtacatgatatgtcagaggaaatgactataccctggtgcttaaggagagcggaacttgtgttcaagtgtgtcaaaggtttcatgatggaaatggcttcatgggatggaggaatttctaggacagtgcaatttctagtaccacagagtatttctgaagaaatgttttatcaacttagtaacatgcttccccagatcttccgagtatcatcaacactcactctgacatccaagcactaaacccttatagattgacatgctggcagaagatgattgttaaactctccaggaacttgtgctatgctgggaatctgtcaagcaaaagatgcccagaaagagaacttgcagctcaatccacaaatcaagatacatgtgtgtgaaaccattccaaaaatttatatactgcacaaactggtgatcaacccctaacttaaacacttaaagtctctttatgaatttctctttttttcttctctgtgttacctgtgaatattagtaatctaaaactttttatttatcacacatggacacttgggaaaggaaacttgattatatttacatggaggcatttgactttttcaagaggcttgactcgtctcaggtgcaatccttaattaaacatacaaacaaaattttccttttactttctttgccaaaacaaaatgtaaaagcactgaaatatacattgcaagtacaaatttcctgtgaaaatctttttatagaaacacmaatgtataagacmaatgtgctkgtycttttaaattctcctgkttcagaatctctttttaatctactcctaaggatgtacaagttagagtcagaagacgttttggattttttccctctctctcatsctcccgctgtgcccttgcacttgcatattaataacatttcatggactgggaaatagtgttcttttttgcaagcttgatgtcaagttagtctaaaccagcacctggcagtattttagtgctcatcaacattgtgacaatcacacaaggaagatcatttctacatttctgtcctccctgcgttctcagcttgcttaaccattcctctacctcttgcatttttttgcggataaatgtatccccatttctgcttctctgtttcccctccttttccattgtttttccttatggtactactttctcaggtgctacatatcatatatttgtcccatctataacatatttaaatgctataagtagtaactccattaaacaaaggcatttacaaaagcacacaggtgtttagaaaagcaatagtttcatcaattccaagttatgtggatattgtaactggccacaagaatgaaatggagggcatttggtgtcataagatggcatgtcttgatgacaagaaacaaaacgcccttcattaatatgcctcagtgtaataactattatagaaactgttggcaagcagagtgctttcctataacagaatgtgtcttaattttctactcgagggaaaggtttgtccaggtaacaacactaaagacaaccctaagaacacccactccagcagtatgtccattagacactaaaactctccaaattatttgtcagggagcctggcgattctgccaagaaggcaggtgttttgcccttagagcctatacagttctcttggagaaattgtctttcaggcaccactgttaatcactgagactgattctaatgcaaagcagggaagacagaggtgacaaaggaagagttgggcagcagcattcaacaaacatccgtgaatgaaactttgctcctccattccgatatctgggctgcactgatctcgtgccgaattc

SEQ ID NO: 1191 - DNA, 1103 bp, Homo sapiens
gcattgataatattggtcctattaagtggtggtgtagagaagtattcacaaatttcaaaccaaaaaattatgtgaatagtaggggaattctttctgtacccttgagttattttatcactgttgtgwttacaccttataagamaattccactctgagaatgagcacaaggaacagataggaaatgtgcagctggtgctgatgtgtagccctgcgcccttcaaatccatgtgtgcaggcagtcacttcctcagtcattagcttttcatctgaaacaacaaagctagtggtaggcagcttctgagatggttcccagtgaagcctgcccgctggtgtgcactcttgtttaacctcctgtccttgggtgtgagctgcacttagtaacctgcttctaaggagtagaacatgggggaagggagagagcacacctgaggtttggtggcagaaaggctctggcttctgtctcctcgcccactcttaactttcatgctttcctgctcagaaggtgaggtgttctttggaaaggcccatgtgacaagaagcagaactttccagccgacagctamcatggaactgaggccctcattccaacggcctccaactgaatcctgccaacaagacatgagtttggaaggggatccaccccagtggaactcctgagatgattgcagccttgtgagagacaaaccaagatgtttgtttaagtgctaaacgtggggataatttttatgcagttacagataactaatacaaagctagaaaaagaaaaaggcataatacaaatttcagcatcttaatgagtctgccagcatctgaagaactgaaataaggcgaactggtcttcctcccgcatgagcacctgtcagctatcttagtcttaccttaaataaaaacacttaaccaaatacattatctctctcaaggacagcaaaagatattgaaatttgatgattctgtatttgaaatgtaaatcagattacaattaaactctaactcttgaatactgtcccttttaagtcaccaaatctcctttgagtaagatgaaattatctaaaaatgaataaaggataaaatttttaaaaaaaaaaaaaaaaaagggcggccgc

SEQ ID NO: 1192 - DNA, 1658 bp, Homo sapiens
  SITE (778): n equals a,t,g, or c
ggtccggaattcccgggtcgacccacgcgtccgagcacgtcatagccaccatacggagaagagtccagttccttttccctgggaacccccaacccacactcttcatcaggcaggtcccctggctcatgaatgcagaacaatcaccgcacccatggctgagcgtacccactggtagtggcctggagtttccctagggagaggctccaagaggcatatggctgtccctctgccactgccacagcaacagttctatccctacttccctcagcctggggaagaaacaaagagcctgaggcctataccaagtttacagcacaccacagtcaccatgtggagaagagaccaatctctcctcctagtgagccttcaactgcctttttccccagtaagtggaaccccacgcttcatgccagcagtgcagccatgccaaccccacagactgaacactcccagtaatagctgctctgtgtttcttgggggtggagcccccaggggcaactaaaagcctgtctgccattgcctctgatgtggtactacccctactactctcagactaacaaaggagcaagaaaataaatgccttatccacacttccaacaagctgcagtcaacccaaggagacgaggccagtctgtgtcccatgggtcctgcccatcccccctgctcatcaccaagcagggaacccacaacttgggcacagagcacacactctctatccttggctgattgcactgtgaaattgctgacctgcatctctctggggtggagcccccagganacaagcaaaagcccttggccacaaccattactaaggtccctttctctgtcctacttagggaggaaacataaaccatgagatcacctcaaagctgtagtgggcarcctgggagtgctaaactgcaatgtacagccaacattcatgtgggagargagcctacactttgagagctttgacagggagcatggttgcaactgtgaggaaatataggggagccacaagaacttaccagctgaccactacacctaagtgtcacctacaggataacattcgaaagcttcaacaccaaaaatatcttactgacatacacccctgcgaaaccaaagatgagaagtcagctacaaataaaggcctgcacgaagccatggccttgtgaaaacatccagaaaataagtctattgaaagtaaacaatttacactgtagttaaaggaacacctaaacmcagaagtgagaaagaatgaatgccagaattccagtamctcaaatgamcggagtgtcttatgtccttcaaacgaccacactagatctccaacaagggttcttaaccaggctgaattggctgaaatgacagaaatggaattcagaatatgactaggaatgaagatcattgagattcaggagaatggcaaaacccaattcarggaaactaagagtcacaattaaataatacaggatctgacatatggaatagccggtataaaaaagaacctaactgatttgatagagctgaaaaacacattacaagaatttcacaatgcaattgcagggattaacagcaaaatagaccaagctgaggaaagaaactcagaaattgaagactggctctcttaaataagacagtcagacaaaaataaagaaaaaaaaaaaaaaagggcggcc

SEQ ID NO: 1193 - DNA, 1167 bp, Homo sapiens
ccacgcgtccgcggacgcgtggggtcccgcccccctctcctcgctgcttaggctccgcggcctccaagctgtagctatgacggcgcgcgggactccgagccgcttcttggccagcgttctccacaacggactgggtcgctatgtgcagcagctgcagcgtctgagcttcagcgtcaaccgcgacggcgcctcgtctcgcggcgccagggagttcgtggagcgggaggtgatcgacttcgcccgacggaatccaggggtcgtaatatatgtaaactcgcgtccgtgctgcgtgcccagagtagtggccgaataccgtgagtggggccgggctcgggctggagggcgggatcaggggctcgacccgctatcctccttctcgcttggtcgcaccggccagcttccacccactctcacccctcttctgccagttaacggggctgtgcgcgaggagagcatccactgcaagtcggtcgaggagatctcgacgctggtgcagaagctggccgaccagtcgggcttggacgtgatccgcatccgcaagcccttccacaccgacaaccctagcatccagggccagtggcaccccttcaccaacaagccgaccacgttccgcgggctacgcccccgagaggttcaggatcctgccccagcccaggtacaagcacagtgaagagttgccccaccaactgcagccccaggctttggactgttactccggtaaaggtggttcttcccctttgggattccaagcccaggcaaatggaacccatcaatgggcaagttgacagagttctgcttgggataatgaagaactgcctgtttctttccagtgcctgcttctgggggcagtgaccttgtgaaccactcatttttatgcaagtggcatccctaaaacctgagatgaggaagacttcaagggttttacagggcccttgttttttaaatccaaattgataataatgatctcaaaacacagtgagaggtctgaaggctggcttctgaagaatccctgatgtcttattggaacaaccactgagctacggagagctctgctgtgatgggctaggcactttatatctgtgtgaatacagatttataaaacaggttaataaacttatccaaggtcacaaaaaaaaaaaaaaaaaaaaaaaaaaaaaaaaaaaaaaa

SEQ ID NO: 1194 - DNA, 1671 bp, Homo sapiens
  SITE (1050): n equals a,t,g, or c
  SITE (1478): n equals a,t,g, or c
  SITE (1541): n equals a,t,g, or c
  SITE (1632): n equals a,t,g, or c
ggtcgacccacgcgtccgctgacctccaaaacaactttgagacaccttctgagaaccgttagcctgccagctcacagtgtggaaaagccccacgttgaactgttgctcttttgcagcagctcatccctgggatcaccccaggccatgctctctctgctcagcctgtgccttcttaatcctcaggcacctgttttgcctgacagtggtacgtgcaccctcccgttacaaagtggtgtgctgagggcactcagaaccatgaagcatgcatggtgcatcttcctgagtgttaattttcctcactggctattatttaatccactacatttttatagtaaaagttaacatagttctaattatacaccataggttctgtctgtccttctcaacaaaatctttttttttttttttttttcaaacagggtctcgcttcgttatccaggctggagtgcagtggtgtaataatagctcactgcagccttgaactcctgggcacaagtgatcctcctgcctcagtcatgcaagaaagtacctagaactacagatgtgcgctaccgtgcccagctaatttttaattttttttttctggagcagggtcttgctttgttgcccaggctgatctaaaactcctggcctcaagctgtcctcccttctcagtctcccaaagtgttagaaacacaggcatgagccattgtgtctagccaacaaatttttttaatgaccctaattaaacatgttcaattttttatgccaaaagaaaatagatgtactatagtttagaatgtaacatttgtgtacaatttttaaggaaaaaaataagatcaagaaatttaaagtttccatgggccacttagggttatgtctttagtcttcccargattatttggtccctcagctctgaattaggactactttgatggaaaaggttagaactacctatttaagttgtcagatttgtaattctgtattttggttttgttcagtggagctattataacatttttattcagcatggaataagaactggccatgggttggtctctgaatcatcangcttttctggttaaaggtaaacatataagtattttttcttttagccatgtttaattttgaaaaatgtcattaaagtaagcattgctgcattataaaaatgattgacaagtccgggcactgtggctcatttctgtwataccagcactttgggaggccaaggcaggtggatcacgaggtcaggagttcaagaccagcctggccgatatggtgaaaccccatctctactaaaaatacaaaaattagccggttgtcatggcaggcacctgtaatcccagctactcaggaggctgaggcaggagaatcgcttgaacttgggaggtggaggttgcagtgagccgagattgagccactgcactccagcctgctgggtgacagagtgagactccatctcaaaaaaaaaaaaaaaaaaaaaagggcggccgctctanaggatccaagcttacgtacgcgtgcatgcgacgtcatagctcttctatagtgtcacctaaatncaattcactggccgtcgttttacaacgtcgtgactgggaaaaccctggcgttacccaacttaatcgccttggcagcacatccccctttcgncagctggcgttaatagcgaaaaaggccgcacccgattgc

SEQ ID NO: 1195 - DNA, 506 bp, Homo sapiens
aggttcactcgttcagcagacacgcatgggaactgatgctttgagttttcttctgtggggttttccctttctctggtctccgtgcagcccctgccctccctcgggtgctgctggcctcaaaggaggaactcgtggggggagggtgtgatttgcagacctgggtctctgctctgctctgggggtggggcttgctttcacagagaccctccttccctctcacccctcctctcccggcctcgccaggagtcttggctgttggcagctcagaggtgggggaggcctgtggtgtgaggtgccctgcacctgctcctgctcctgtcaccccttcctgctgcctcctccatgcccaaggaacacccatggtgcagtcctcaggcaaggccaggacggggctgaggccctgcgtggagatgctgcaccagcggaaggctgagacccgcttaccttagttcatctgttcactcgtaataaaaagaattctctcaggtcaaaaaaaaaaaaaaaaa

SEQ ID NO: 1196 - DNA, 1721 bp, Homo sapiens
cagacagccgagcctgcggaaggcggcggcggcggcacctgcgatcagcggctggggcaggttatggtagtgcggactgcggtgtgagcagagcggcmcacggggcccgccatgcgccggcggccctgacatgggcgccagcgggtccaaagctcggggcctgtggcccttcgcctcggcggccggagcggcggctcagaggcagcaggagctgagcaagctttggtgcggcctcggggcmggctgtgccccccttcgtattcacgcgccgsggctctatgttctatgatgaggatggggatctggctcacgagttctatgaggagacaatcgtcaccaagaacgggcagaagcgggccaagctgaggcgagtgcataagaatctgattcctcagggcatcgtgaagctggatcacccccgcatccacgtggatttccctgtgatcctctatgaggtgtgaccctgggaggtggcagacagaagcaccccctgccccggcaagaaactcccaggctcaatcaaggtgtggcttccattgaggagcccaggctggggccacaaccctgaataaactctgttggcccataaccttcagctgtgagcgggtcggtcccacagtattggttgggtgttggtttgtgtgtggacaagaggtggttggtgggtggtgaaggctaatggcagagttagcaccccactctcccaagccacccctgcaagcagcacagcagggcatataccagtcaggaatgcccgttacctggttccttgcctggtctgctttcttccaagtttgcctggggcctagccctgctagaggctacagcactttacaagcaaggtatgctttcttccagcccctaggctgtgggcactgtatacaagtaggaacttcctttccttcacttcccttttaacccctagtcagagcatttcagccgtttgctacctcgattcctcctgtgttggacagaggctgggggcagtgccagcctgattcttccgacctacctgccatttgttcccgccttcagatggatggacagtttgctggctattgataggagtggggactgggtgggggcttctccctctacccagggctgggctgatccccctactgcaactaactgttgccccccaaccccgaacccccagttgaggagttgagagagtgcaggctggggtcaggacaggctgcggatgcttgtgcctatggggagttactccaacccacctattctgtctaatctccatggctttgcaccaaatcctccacccctccaattgggaggggactgttcaccaccttgtggtaagggacaacaccctaaggctggtgccagtagttatgagtagcctaccaccccctcccttacagtaacccccaccccttcaggatcagtcaagggaaagcactagaacccctgggtagggaaagaaaggagggaaaaaccataaaaggaatacttataatgtgaaggtttgtaaatagtccatgatgatgtcgtggcagagtctgatttctatatagaggtgactttttttttaagtactgtgcaagctctgtgcttctataatgtgggaaatggcttggggaggatggcccctagcttaggaagactgttgtgttatttgttcaatttcaataaaatgatttgtagatcctgcaaaaaaaaaaaaaaaaaaaaaaaagggcggccgctcgcgatctagaacc

SEQ ID NO: 1197 - DNA, 1994 bp, Homo sapiens
ggcacagcagcgggctaaaaccacgaggggacacatttggcgggagcttgccatgcgtcgtacacttgaggtctgtatgtcagtgcactgtccctgcatcggcccatttaatcctcgcccaaggtcacacagctcacaagggacagatccagaggctgggctcctgttggaggagccacacaccctgagctgtgcagcgtagaccagctcttgcacaggattagtgctcagtaaatggcgatgtgggttgttgctgttattgcaagcagtgccactctgggtttagctaaaataactcatgatctccaaagcaccctccagctctgattgtaggaggggggctgtcaggagctccatgcacacaatatggcagaggagctttgggagactgttttgactggcatctccttttccagcacgttgactggcagctgtttcaaggtctcttgaaagagtccctactccctccctaagctccattctctcctgggtttggatatgctgagagagggtagggaaaactgaaaggaacattgatcaagtggactggatctgttggcaggcaatggagatgtcacccttctcaaagtaaatcactgcaggtcaccattgagacgggacacaccccaaatgaggcatctgagacttctctgccttggggtgaaccaggcgcctcccagtgaaacccctccctgcatcaccctctgcccctctttgtgaggcctgtctccccatccccgcattcctcttgcttcagggacccctgsctcactggtttattgctaccctyctgccttctcctccctccctttccttgggctcgcatccctttgatgtttttacaagccttttttyaaacytgcactcactggtgggtgaatcgcctccctctccttgggagcattagtgcccttcctggcctccgccaagggggagggcggcttttatctcccagcggaatctcattagctttgccgcacaatgggaccgaacctcggctgccacagagtggatttaaattagttaatagcagattttttttttttttttgccccaggcctgttttttccaagtcttggatgctgagcaaaaaaacaactttgttgttgaaaaatgtaaaacaaaaaaatattgaaggtggagtgctttgacaagacggaagatcactgtaggtgaagttctcctgtgctccacagccacccagaggaattccaaaaccagcagtggaggacttggggaggacaggagggaaaacatggcgagttcatcagctctgyttcctttattaaaatatttctgtaattggtggtgggaaattgaagaaatcaagtgattgcatcagcgctggaaaaagctgccagcacttggcagtggaagagaatatatgctttatactggactttttgaaaaagaggctgagtttggccagattgccgaccagcaatggaaaaactaattaggtgccttgcctgtgagccagacgcccagcagggctgtggcgcatggctcccgccgcctctgaagaggacactttctagtgaattcagttcgtgctacccttgagcagcctgtgctacagcaggcacatttgtgaatctcccaacctgtgcctggcgtcggaactgtagcttcccaaagacttacctgccctgggagatggcgggcagctgctggccacagccctgggcctgcacctttatctgcaaactgggagagcggggatgggagtcagtgggtaggaggtgggcagaggcctgggcctcccagtgttcgggctcccacactgctgccctcacccactatgtgcatcttcccaacttctggacatcctcactcctcctctgtccaatgtaaatcagaatagtgggccgggcgcagtggcgcacgcctgtaatcccagcactttgtcaggctgaggcagaagaatcacttgagccaggagttggaaaccagcctgggcaatacagtgagaccctgattctacaaaaaaaaaa

SEQ ID NO: 1198 - DNA, 443 bp, Homo sapiens
ggcacgagaaacggtagtatcatggagagatcataataaattcttagtattaaaagtggttttgctttcagttagggagaaaaattagattgtactatttttcctctatgatttccttcagttatcttccaaatgttgttttttccccacagcccccttaacattgttctctatgcacttctcaatacattttcatttgtttctcaagcctctttgtggatgactcctaaatataacttcttccactagctctagatccgtatttccaataaaatcccctacctgaatattcaagttaaacatgtccagaatacttactgattttattgttaatagccactattctgttgtctggaattaaaacctgtataactaatttgcatccctttatcttcttagtcaataaaacctacaatcctctttctaaaaaaaaaaaaaaaaaa

SEQ ID NO: 1199 - DNA, 1560 bp, Homo sapiens
ggcacgagggcagatggaccttgctttggtccagctcttttccttaccctggctctgacgtgggaaggcttggagggcccgtctcatcacccccgttcgccctcagctgtccctttcccttgtcgcctggccgctgcctcgcccgcctgaggcctcctagcaggcagcctgggtgtgagttgagcctctctcttttccctctggtgggaaagtggcctttccctcaacacctgctccccggccccagaggaacccacctgttttggagctcagcttggcccagcgtttccttggggaagggaaaggagggctggacagcactgatccgggcaggcagcgtgtgcagcagtggccagccagagtgccaaagatgcacggggatgtggtgtgtggctccgggccctcgacatctctgctttgggggatttttaccttgtctgcacacttgtcaggggagaggggacagcaaggtgggaagttgaagagctttgaggctcagcakcatgtytgtggcattcggtggacaccatggccttgggcggctggacaggtttttgtgatgtgagggacacgcatggggcacatggtaagcttggcaagggctccaggaacgctgacgaaaggttttaggacccccacccccatgcctgtaccaaggctggcctccagagcgggtgaggacagagcagctgtgggcttttcattctgaggtcttggcccccctggccaccgcaagggactctttgcttgtcagggcttgcaaaaaccaaccttcgagaaagaaaagggaactcttcacgttgaatgttgactttgtgtgtatgcgtgtgtgtgtgtgtgtgtgcacgcgcgcgtgtgcgtgttgacttcatggaattttgttttgtgaaattcccctccaatcgtgtcagaatttacctccatgccccagtcacactgttggttctgcgctctgaacctgggtgtagccatttgaaggactctcttctgcgtttcctaacagttatttggtggtctcaagagttgaggttgtggagggttgggagaaactgaagttctatacatttccatagagtttacatcctgcagttaaaaggcagggagggctcagcccgggccccacagctccaggccatcccctacgggctgcccacagtgcccccttttctctagccgaatctttttcgaacagcccgggaaaggaaaacggattcacttgctgattttgttcacggcggaagcaccatgttccgttcctttttcaggttcagtttgttgtgtaaatggcggttttttctggtgtgagctttggtgatggtggcagggctcctttgaagagatggttccacctcgtggtctgaagaacaaaccagagaagagtctggtttggccagaggcccctccggtccacgtcaccctgagtacacccctctgattgctctgctgtcaagaagcacgtttccaccagctgtattcaacactacaatgcattttttaaactatatttgcatccaagacaataaagacaccttattttttttgaaaaaaaaaaaaaaaaaa

SEQ ID NO: 1200 - DNA, 463 bp, Homo sapiens
ggcacgagctggtggcgtgttagtttctgcccagttctaccccctcatgtgcttcttctgaatactgaatgtgactgttgaaagctggtagaattcatccctcttactgtagataacactgcaaatcttggaattttgttttttgctgtttccagatgtatctataaatatctatacattatatgtgtgtgtgtgtgtgtgtgtgtgtgtgtgtgtgtgtacatcgggtcctcccatgtgtggtgttcttctggaggttgtctctttggtcaaggtgaacttttaatgtttattattttcttctccgcacaaagtaaagagcctaattttgtgtattctggtggctgctgtcatgagatgataaaatgtaaaacaaaactctagtcaacgtagaaagagttaactgtgctgaaaaactaataaagaacctaagaagaaaaaaaaaaaaaaaaaaaaaaaaaaa

SEQ ID NO: 1201 - DNA, 477 bp, Homo sapiens
cggcacgagaattacaccactttagaccctatgtgtagcaggtcacaacttacccttgtgtgtttagatgtgtatgaaatacctgtatacgttagtgaaagctgtttactgtaacggggaaaaccagattctttgcatctgggccctctactgattgttaaaggagttcctgtcacctgctccccccacccccgcatgcgtctgtccacttggctaacttttaatatgtgtatttttacattatgtatattcttaactggactgtctcgtttagactgtatacatcatatctgacattattgtaactaccgtgtgatcagtaagattcctgtaagaaatactgctttttaagaaaaaaaataacatgctgaggggtgacctatatcccaaaaaaaaaaaaaaaaaaaaaaaaaaaaaaaaaaaatgaaaaaaaaaaaaaaaatagaaacaaaaaaaaaaaatttctagggggggccc

SEQ ID NO: 1202 - DNA, 687 bp, Homo sapiens
ggcacgagggaaaacctgagactagaacccttgtcttcctcttacccaaattctaggatagctctgaagcctgctggaaacttggtggcatccaacctgcctcattcggcctgaccggtagaggcaggtggcctgtggacagaagtaatcctctttctgctcaccccaggcagacacaactgcctatgttcccccgatgagaggaaacaggctgagagaagaaaaatgactgctccaggattataccacagtggagagcgggtcacaggacatgatgcagggtccaggtttctgttttgatcaagtcttacatgcccattcagcttctaggcccccctcacctccctgccctcattcacaagtggccctgagacacgtgaacacctccctcctatgcatcacaaaccttctccaccgagctttggtgctttggcctctggcacacctaactagcattggcagaggagagtctacactctcttcctcattcagggaagatgctttaagaaatcctgcctctgtgcagcagaggagctggaggcagctccccaggcatccctccccaaataaaggcttatgtactggtgaaaaaaaaaaaaaaaaaaaaaaaaaaaaaaaaaaaaaaaaaaaaaaaaaaaaaaaaaaaaaaaaaaaaaaaaaaaaaaaaaaaaaaaaaaaaaaaaaaaa

SEQ ID NO: 1203 - DNA, 1877 bp, Homo sapiens
ggcacgagggggaatacgggctgtcagcaagacgctgcaggggtcaaggaggagagcaatgaaggacaggaagcagtgggcattcaagactcgctggccttttttccattttctcatgctttctttggcacttgactgctacaggtttttaacttcctgaactgtaccgtccatcatggaaggctctcctcacttactaaggctaaaaacacaggctccatagcctcttcattttatcacactaatggtcgaaaggttcttatcctattttgcatttgtttcttgaggggaacttgagaagcaaaactctggagccatgctccccacgtgcaaatctgagctctaccactccctgctctgtgaccatgggcaagtcacttagcacgctatgcctcagattcatttttaaaattaggatggtaatactagtatcttcacaagattttatgaggattaaattagctgttgggcactgttgtggttaatttcaggtgtcaacttggctaagctaagtgatacccagatagctggtaaggcattacttctgggcgtgtctgtgagagagtttctgcaaacattagcatttgattcagttgactgagtaaagaaaatcaccctcactgatgtgggtgggcagcacacaatccattgagggcccagatagaaagacagagtgaagggtgaattccctctctgcttaaactgagacatccatctcctcctgccctcaatatcagtgctcctggttcttgagccatcaatttgaactgggacttacactgttagcccctcaccccagtttctagccttaaggtctaatggaatttgactgtcagtcctgtctttcttttgatttctcccttttggaatgggaatgtctatcctatgcctgtcccccactgtattttaaaagtgcataactcgttttgtttaacgggtttatagctggaggggaatttgggctcaaaatgaatcatatcttaggtcccacccagatcagatttagacaatatttagatgagactttggacttagattttaaggttgatgcttgactttaaatgctattaggatggaacaaatgggaggacataaattttgagaaaacggggcgaatgctatagatggaatatttttgttcctccaaaattcgtatgttaaaacctaatccccaatgtgatagtgtttggaggtggagtcattggggggtgattaggttttgaggatgaaaccgtcatgaatggaattcatgcccttataaaagggaccccagagaacttccttgactcttacacagcaagaatgcagccatccatgaaccaggaagaggaccctcaccagacagtgtatgtgccatgcactttgatctaggacttcccagcctctagaactatgataaatacatttctattatttataagccacccagtttatgatattctattaaagccacctgaacaatgtaaggcaggaacatgataaatgctcagtaaatgttaagggaaaaaatcctccttgaaaacataacacatttattcagcatatgtctgataaaatccttgtagtatggagttgatatcagggttgtgcagttcatctccgtcctcacaccatgtccagcggcttcctgaagactctgcacagtgacttctatgtgaactgaagccagtgccacagtcaatacttaggaggtgatggtgaaaaacggtcatggttctgaaaataagccatgcatttgtatgttggaaatcttccctttgcataactggaaaacaaatctatgagtttttcagcaaaagtggagacataaaaaaatcatgcgggcctaaataaattaaaaatcaattaaaggcaaaaaaaaaaaaaaaaaaaaaaaa

SEQ ID NO: 1204 - DNA, 782 bp, Homo sapiens
ttccggcacagtrgggaaccacttgtttttctaaaaaatattgttctgtgatcctctgaagacaagctgtgatttgtgatgtttagtatgttagattgtggactggcatcttcttgatggagctgattctaaccttagaataatttttgctttcatcaatcttgtcctctgattatcaaattagggccatagctgtattttcatggccatattattaaccttcttagtttatgtaattattacatccataggaaaacagttacacaaaaagaatttgtatattttcaacttctagcagtttgtaattactcagctcctgaaattaaagaaatttaatcagttttagtcatcttgtcttggttgccatggtttggaaggaaataccaaatagatttgaatcagtagactagaaggctgctgtttaaacacatgaaataattttttaaaaagctttctgggttgggcgcagtagctcatgcctgtaatcccagcacttggggaggccgaggcgggtggatcacttgaagtcaggagtttgagaccagcctggccaacatggtgaaaccctgtctccactaaaaataaaaaaaaattagctgggcgtggtggtgcacccttgtatttccagctactttgggaggctgaggcaggagaattgcttgaactcaggaggcactctcatgaggcggaggttgcagtgagctgaaattgcgccactgcactccagcctgggcgacagagtgaaactccatctcagaaaaaaaaaaaaaaaaaaactcgag

SEQ ID NO: 1205 - DNA, 1003 bp, Homo sapiens
ggcacgaggaaaccttcctgagtttcagtttccttatttgtaaaatggagacaggagggaagaaagctaactcctgttgagtgcctgttatgttctcgggacagtgttagggaaatcagaggaattgttttatttaaagctgtccagtcctgcaagtaggtataattggcctcatttaatagaccagaaaatggaggcaccggagcctaacaattttctcggccccacacagctggtaagtgatgaagccggaattcaaatctgggtcattctgactgcagagccaatgcgatttttatggtgccagcctgttgcctccgtgtggggctcataacttactccacagcggtgtcttattcaagttcgtccagaagcagatcctgagatagactacaagtagtttatttaggaagcctgggaaacatcagtcaggcagtcaggaaatgagacagggaatgggaggcagcccctgaaaaagtgtgttatcaattcaactaccactgtaagctattagagcttgttcacactggggaggctctgggaaccagtggagtgcatgtacctctgaattttcccatctgaggaaaaatccgagggagccaaggtatttatacaccaattcctgagagtagttaactgagggctacttctgggaggtggagtgttctaataatttgtaggtgcatatgttgtatcccgtgcttggcaaagtaggactctagcagcacaagaaagtcctcagcagagaaattcaggtgctggcagttggaagcaagccactgtgctctgaaatggtaaggacaaaggagtgggagggatgccgaaagcacctgctatggtggttttaagaattagaaacaggccgagcatggtggctcacacctgtaatcctagcactttgagaggccaagacaggcagattgattgagcccagaagtttgacactagcctgggcaacatggcaaaaccccatctctacaaaaaaaaaaaaaaaaaactcgag

SEQ ID NO: 1206 - DNA, 1692 bp, Homo sapiens
ggcacgagctgccgccacccagctctcgcggcagcagtccccagagagacctgttttcacatgtggtggcattcttactggagagtctggatttattggcagtgaaggttttcctggagtgtaccctccaaatagcaaatgtacttggaaaatcacagttcccgaaggaaaagtagtcgttctcaatttccgattcatagacctcgagagtgacaacctgtgccgctatgactttgtggatgtgtacaatggccatgccaatggccagcgcattggccgcttctgtggcactttccggcctggagcccttgtgtccagtggcaacaagatgatggtgcagatgatttctgatgccaacacagctggcaatggcttcatggccatgttctccgctgctgaaccaaacgaaagaggggatcagtattgtggaggactccttgacagaccttccggctcttttaaaacccccaactggccagaccgggattaccctgcaggagtcacttgtgtgtggcacattgtagccccaaagaatcagcttatagaattaaagtttgagaagtttgatgtggagcgagataactactgccgatatgattatgtggctgtgtttaatggcggggaagtcaacgatgctagaagaattggaaagtattgtggtgatagtccacctgcgccaattgtgtctgagagaaatgaacttcttattcagtttttatcagacttaagtttaactgcagatgggtttattggtcactacatattcaggccaaaaaaactgcctacaactacagaacagcctgtcaccaccacattccctgtaaccacgggtttaaaacccaccgtggccttgtgtcaacaaaagtgtagacggacggggactctggagggcaattattgttcaagtgactttgtattagccggcactgttatcacaaccatcactcgcgatgggagtttgcacgccacagtctcgatcatcaacatctacaaagagggaaatttggcgattcagcaggcgggcaagaacatgagtgccaggctgactgtcgtctgcaagcagtgccctctcctcagaagaggtctaaattacattattatgggccaagtaggtgaagatgggcgaggcaaaatcatgccaaacagctttatcatgatgttcaagaccaagaatcagaagctcctggatgccttaaaaaataagcaatgttaacagtgaactgtgtccatttaagctgtattctgccattgcctttgaaagatctatgttctctcagtagaaaaaaaaatacttataaaattacatattctgaaagaggattccgaaagatgggactggttgactcttcacatgatggaggtatgaggcctccgagatagctgagggaagttctttgcctgctgtcagaggagcagctatctgattggaaacctgccgacttagtgcggtgataggaagctaaaagtgtcaagcgttgacagcttggaagcgtttatttatacatctctgtaaaaggatattttagaattgagttgtgtgaagatgtcaaaaaaagattttagaagtgcaatatttatagtgttatttgtttcaccttcaagcctttgccctgaggtgttacaatcttgtcttgcgttttctaaatcaatgcttaataaaatatttttaaaggaaaaaaaaaaaaaaaaaaa

SEQ ID NO: 1207 - DNA, 1274 bp, Homo sapiens
ggcacgaggtgaggtactgttaggttggtcagactgatagtttattgtacgtattgctgtaatatctttgtacatttagcttttccatgtttgtaccatatctttgggttttcagaagtctgtctctctctctgtttctctttttgtctgtcttttctatctctcaccttcatttggggagcattttgtgttctctttcacaggactaattaagttttattggatcttgaaaaacgggattagaaattttttcttacttatataattagaaamcaatgcttttggacttacattgccacggcagtttacacagttttattcccaaaaattgtagttttgtgactaggtgataaaaatgatctcctatatgtgccaaacttggtattctagacactcatacttaggatgtaaattgactgtagtccaataatttaatatgttgtgtttaattcttgtaatattttactcacaaattgaacttttccttaccaatttaatgtttgtaggcttaatttggcatctttgtcaggattattagacttctctgcattcttctgacttctccctaaactaatgtttagaactgaattgggtccagcaatttaagtggaaaatcagtatgactagagacttctagaaacttctggtgtcactgagatggtgaatttgatgattctgaccctacttgctcatctgtaaaagctattagaggattgttttaagcatttctattctatacaggtatatgtacaccatgtaataccactcagccataaaaaagaatgaaataacatttttgcagcaatttgggtggagctgtaggccattattctaagtgaagtaactcaggaatacaaaactgaataccatatgttctcacaagcgggarmtaagtcatgggwacgcaaaggcatacagaatagtaaaatagactttggagactgagacgcggggagaataggaagaagataagggataaaaaacgatatattgggtacaatgtatgctactttggtgatgggtgtagtaaaatctcagacttcaccactatacatttcatccatgtaacccaaaaccacttgtactycaaaagctattgraataaaaaagatatttaaaaaaaaagaggccaggcaggttggttcacgcctgkaatcccagcactttgggaggctgaggcgggcggatcacttgaggtcaggagttcgggaccagcctgaccaacatggtgaaaacctgtctctactgaaaaaaaaaaaaaaaaaaaactcgag

SEQ ID NO: 1208 - DNA, 1601 bp, Homo sapiens
  SITE (12): n equals a,t,g, or c
aaggaagagaantagaatcagaagttaggacatctattgcttgatgcttctgggatgggtaagacgtagttctggtgatagaagttgaagctgcagcataatgagagatgaaagagaaactgctcttctggtgattttaaccctagggatgtagctactgggacaggaggaagtgagggacccagtgctgcagggtccctgttgtcacatatgtcaatcctactttaaagtcaaataatggattctggctgataaagcctatcagaattatggtgttgatacgaaagtgtcacatagccaccaaaatgtgttctctactttcttgctttgctctgattagctaagtcttggtcacatggctttatagcactgggaaaaccaggatctggtcttttatagggtaggaagtgagccctatcttttgtgtagatttgtggcggggagtttcccaagcatgggaaatgggctcagatgatgtggttataaaatgtgaatgtccattaaaaggcagtcagtgttggctactctaagccttcaaattgttgcttttccccttcaacagggaccaaggggagatactggaaacctctgagcttcagctgttggtttttgggttttgtttttgttttattgagatacagttcacttaactatacagtttacccatttaaggtatacagtgttttttagtaatttacagaattgtgcaactattmcaattttggamcatttttgacacctcccccccaaaaaaaccccwatgccccttagcagtcatcctcagtctcctcagccctaggcaaccactcatctactttctgtctttatagatttgcctatttgggacatttcctataaatggaayctgtatgtggtctttscttggttttgtttttggggtggtgggggctgactacttagtcttgacaagccaaggtcccaacccagcagtagaaatataaggagtcacggctgtgaggatggcctcacaatgggctcagggtagtgaacttctgtcccctaagttatctcagaaatgaggccaactctctgccctctagaatggatggccctgagggagagaaaggttcatgtccttcctggctggtgacagaaggctggactgtgcctgaaatcaaagcttctcacctggatttgggcaaatcaagcagtcccgaatctcagggtggggtgagatgtgtgctgaagagggcaacacaggagctgcactgcagatggcgacatgcagggtttcaaggccaaagctggtgtgttcttcccttaagaattgctgtaggctaggtgaggtggctcacgcctgtaatcccagcactttgggaggctgaggtgggcggatcacctgaggtcgggagttcgaaaccagcctgaccaacatggagcamctctgtctctactaaaaatacaaaattagccgggtgtggtggcgcatgcctgtaatcccagctactcgggaggctgaggcaggagaattgcttgaaccccggaggtagaggttgcagtgagccgagatcacaccattgcactgcagcctgggcaacaaaagcgaaactccatctaaaaaaaaaaaaaaaaaactcgag

SEQ ID NO: 1209 - DNA, 766 bp, Homo sapiens
ggcacgagtccatgagaagcacccgggcaaacttgctggctatatatccagcctgctcaccctgacaggctttgctacagctatggctgctgttgtcctctgcgtgaatagcttcatctggcaaactgaaccctttttatacatcgacactgtgtgtgatcgctcagaccctgtcttccctaccactgggtacagatggatgcggcgaagtcaagagaaccaatggcagaaggaggagtgtagagcttacatgcagatgctgaggaagttgttcacagcaatccgtgccctgttcctggctgtctgtgtcttgaaggtcattgtgtccttggttccttgggagtaggtcttcgaaacttgtgtggccagagctcccagcccctgaatgaggaaggatcagagaagaggctactgggggagaattcagtgcccccttcaccctctagggagcagacctccactgccattgtcctgtgagccgccaaagaccccacggggtgcccgcatgtccctgtctagggcagcccagggcccccactcctggctcctcacacttgcctcccctatggccgctctccagaccctcctcctttcttctccccacatccgcacctgctgttcccactctggggttctcaagtccatgaacagatattgttgcattttccacaatgctgattaaacataataaacaatccagaaaagcagttttgcccagaaaaaaaaaaaaaaaaaaaaaaaaaaaaaaaaaaaaaaaaaaaaaaaa

SEQ ID NO: 1210 - DNA, 3237 bp, Homo sapiens
  SITE (1): n equals a,t,g, or c
  SITE (6): n equals a,t,g, or c
  SITE (32): n equals a,t,g, or c
  SITE (3237): n equals a,t,g, or c
ntccgnaattcccgggtcgacccacgcgtccngcaacaactatttttatgatgggatgggggagtatatacacgtatagaatctgtacgcgttgaacaacttggttcaagatggtgggggcatttttagagcggcaataattgaaaaaaaaggcgaactctgccttggagaggtagatgataagaaataaaaaggtgtttataactattttgtattataaagtgggccttagagatagsaagaagaatgatggattccttttggatcaatcagaaaggaaacacgaaagaaaagtcaggaaggtagagagagaaaaagggagggaaggagaaagaatgggaataaaataaggaggtaagagatactatttttgctgagcaaccagtgtgtttcaggatgatacaaagaaaaatatagaatagaaataagtgcaggcttggaatcagctacaaatcctaaagatggggtgtgtgtggatgtgtgtgtgtgtgtgtgtacaccattgtgtgtttgtaaaatgtgtatgttcatgagtaagggtgtgtgtgtgtgtgtattaaaattccagagtgaccgtggcacttgggtgtacaggtaattcctccagagctgtttgctggcttcaggagtggagtgagaatttcttttttatgaaaagggatataaaggcaccgagctgatgcagtatttgtaatattaagttgacctaacaaggtatttgcatgagtcacaattacaaagttttgagcggttttgtaatttgacatttaggaaagtctcctatttattctcatactttacattcatgcttagtatactatagaggatgccagctttaatctttctgtcatttaaagcaatatgataagggtattcaataattgggtgccctaaatttctggatgagaaaattttcaattctggccatgagaaagaaaaaaaaataaacagccttctttttttttcctttgttttaaaactgtggttttttaaaaaagcaataattaactcagacctcactaaaaatcatttttgtttttatattgttatgtcataagctctattatgttattctaacaagtagcaatttcacaaaatttgtatgtagatgttaacgcacatttcctttgcttcttttattagactagtgttgactttggggggggacatttattcacaaatgagaagtaggcacaaagtaaaaaatggaaccatctactaacaaggatcctttaaaactgccaagggagctctaacttgaagccacatcctacagatggcagcccaaatagcacatgggcaattggcaccatctttatatggttgagtctcctgaatattttgaatgaattctcaacaaaatgtgctagccactggggacgcaaaacaagtaagatccctgttgcaagaaattcattttatagtgagggaggttggcatggagactaaaattctcaggaaaatgagatccgtgttagattagaagtcctgatgtgaaatgggaggactcaggaaggaggatcgtctttacctgaggatttctagccagaggtcccagatgcctgggctgagaacccagcgataagggggcgttcccaaagcagacacagggataagaacagaggaggcagcagcattgcacagccccaggcacagtggcagttaggatggctggagagtaggatagttctatgggttgcccaaaaaatgtgatgygcttcatgttttctctgactcatggatctggtagagaccatagacatgatatagactaacttccccatttttcacaagaggaaaccatccttatgacttaccttaaagttttttgttctgttttgaaggaaaccatgtgcttcatgaaacctacagttgacaagagaatgtacagctaagagaaaagcttaagaggccacactattcgcggaatggctttagaggcagatgaagtggtctttgaccacagttgattgaaccagagcacttattgcttaaagaataacagagttctagagctgggggttcttgggccatgctccgtgtgtggataaggaaagaaatactgtttctgggactctcccacagtcacaaagctgttttcactgtggcccctacatctcttaacttttgctattactcctatgctgccttccggattactgctgtctatcttcttgctccactcactgaagatcctattataatcccatgaaaatgtaaattacagtttacttgggagagccagattttctctgtgctcttgagttttttattcattcaagaaaccttgggccaccgctttgtacatagcaccgtgctaggctctgggatcccaaatggacccttttaactttctgaagatgggaccgtcccctggaggaaagtcattcctgcctaatccatcgagagaaagaggcttacgaaaaactttgcctctgatgctcagccccacccccaaatagcacacaagcttgttaaccccacctcttacaaaatgtttagattctgtaggtgttaaaagcctttctggaagtattgcattctgccgtgtttataggtgttcactttcctccagagctgattaactactgacatgacttggctttctcatccagaaattatggaaacagggtctgtcagtggcaggaggccgtgctgtgttttacttggatgacacaatgcagtttacttgcctcttcatacccatgcatgctgctcaccctagacaatgacatataagccgtatatagatcaatgtccacatatatatacacacacacatatatatatataaagtgtaacaaggaacactaaaacagtgttgattcttgtctctgaagacaaataattaaaccttttttttcccaactaaagaatggatttaattaaactatgtattgaaaaaaaagtagcctaagtgttagagatggtgaatatattccattttagttaaagaacaaatttcctgaattttaagcattcagtgagctgccaattttgattttgtgttgctctttacccaaattattttttctttgtttttctttttttgggggaggaggggaaaaaagcagcaatactgtgtttggaaattatactctgtatctggttttcctgtgtatgttaaccacttaaatgttattatcctgctttggttttagagtgattgtgaggcattcaatgcaagtatacagttattttctcattaaaatccaatgtgtgttgagtttttataan

SEQ ID NO: 1211 - DNA, 2070 bp, Homo sapiens
ggcacgagcccagaagtaaagaaaagggagggttttaaaataaataaatacataaacagggtttttgttttcattttcagaaatatctctaaaagcaaatagttttacagcgatatcattatatgtgttaaacttccagctctctgagtatgacttctgcatttttatttttatttttagattcagttttgttcacttgggcatgtgtatggcttggagacaggcaggaatgccaaaaagctggtagatgatggcaactgtgatgagcagaagaactcactgcctcagttacctggatgtgggccattttctttccctggagttggagggcgggcaacaatgttgaaactggctggaagttgagagagaaactgaatttgtttcagggcctagtgatattttagtgcataattttataaaataacagctccatyccatgaatataggagaggaaaaagattattgagaaaataatttttttacaggcactggtacttttttttcatgttttgtgttgtagttgcattttactagagcagctgacaccattcctatgtggtctgattttgtagttcaaagaccaaaaccaaataaaaagatctactctttaaaaactctcttttccaatgagaggattatggaaaaagtgacagtgattgaaagtctgtgttctatttgccagagtgggggagggagtggtaaggcaggttgactgggatagaccagtcacgaaggagctggaacattcacccaggcccattgccatgtgamttgtagaaggtctgtggggaagacaccatctgccactgtttggcaggatttggccaccatggcacagagtgggcaattgtcctcaaccttggaggcagaagctggcagctggccaaaagtctgctttctcccagaagagataggcagtyactgagccgagatactgatgatgtctctctcttatcgtgcaacatggagagcgggagaaaatgagggaggacagaagagaggagaaggaggaggaaaataagaaaaggaatactaattaactcagcctgtctatccagctaagcttgagcttgattttgctctctagttgaatggaacatgcaacctgaatttctgaataacagaattaccaaattactgtttaagtgtttgagaaaaaaaggtgaaaagtgtgtgtactatatgtatagacgtatagattgacatatagtgaattggttaattgaatgtctgcatcagataagaaggtgttaggtcaatttccacaataatgccattaaaatcggttctttgattaaatccaattaacagatgtggaaactgaggtttgtgacaaggttcaatccctgatttctgtgactccaaagtatgtgctgttatttaatgtttatgtattctctattatgaattgttttcaagttttttaaaatatcactagctagcctgtacgtttcttaggaggcaaaaacaattgccttaaattttgttatattttagtgccattttgcacataggttataagcaacagataatttctgtaatctttagaatatcgattaaacttgttaaaatgtagatattttgaaatctcacacaggacacctaaattatgtraaatgttataaactttatgatttacaggggccctggagatggaagtyctgaaaaaatgtgcctttattcagtattagtgcattatcagggattccagatytcagttaaaatgagagaatctgaatctctagscaatgatgagtgtttctgaaattcagattcaccagaaagaaattgaaagcaaagagaagacagtgttgtcaaattatcatataattcagctaaaaaaaaaatcatggtacttaagtgggagctagagcacatcactgcctttaagaagatatttaggggaataaaagagktctgggacctcggaggtgaaactgagagaaagacaaagggacttcaaatcaagcatttgaaagagccaatgaggggccagatgtggtgactcactcctgtaatcccagcactttaagacgccaaggcgggatcccatctcaaaaaaaaaaaaaa

SEQ ID NO: 1212 - DNA, 1259 bp, Homo sapiens
tttttttttttttttttttttttaaagttataaaaatattttatttaaatgatacagaaaaaaatgtatacttaaaagtgattaaaacttcacattaggaaatgctaaaaacccagtaatgtacataatgataaaatctaaagtgatgagaaaacataaaatattttcatttggtcctgtcacctaacaaaactatcataaatatgagattatagtaattactaaagctggttaaaggcacatgacaacataattcctttatacacatccagtcattttatacaaggaactgctatcccttaaatggaagagtgaactacttgtttaaaatattaacagtgcactatgtacctacaatgaaaccactttctccaaagactcaaacagattaacattgcaaaatagtacttctgtatcactgacttctgaaaattttaataatttatgcatatgcaagtgaaatataatttattctggtttcaaccaacagttatacaaagtcacaattttccccaggaaaccattcacttcatagctgcaaaaacacactgtagcttttctgttagggtctgccatgctttcagctagctggatgtttaaccattcacttcaaatttacatgtccagccaggcacggtggcgtgggcctgtagtcccaactacttcgaaggctgaggcaggaggatcacttgatcccaggagttcaaagacagcctgggcaacatagaagaccctgtctcttcggaaatcatccaaggagtgtgataaacatgacaacccccataaactgggtaaacaacaacaatggagtgaaaaacgaccacacatgccataaagcaatgttgaagcaaattcctgctgcaataaaggaggcagtggtaatgggtatcaaggctggatacttgacatcatattctccaattccacaataccattccaggtagactatgcagtaaaatgcaattgataaactgacaagcaacaaggcactgccacagagaaaccagctgctagtgtggaagttttctttaagggttttaaagaagtcaacataataggtcacaacaatggatgccaaaatccagaatccagaatggatattaagtcttggaagaggtttctcctttttctcaacagctgtggaggtttccggcccggcgtcaccctcgcggtccagctgggcctcggcgtccggcaggaggaggaatcgccgccggagctgctgccgggcccgcgaggagtccatcttggctcgtgcc

SEQ ID NO: 1213 - DNA, 1905 bp, Homo sapiens
  SITE (846): n equals a,t,g, or c
ggcacgagaaaaagggcagtacagaaatcaaccagcacccagtcacagtcgaaggtgcttttacccttgaccctccaaacagagccaaacagaagcttgcacctattcctgtggagctagccccaactgtgggagtgtctgtggctctgcagagagaaggcatagactcccagtctttaattgaattaaagacccagaatgaacatgagccagagcattcaaagaagaaagttttaacccccataaaggagaagacacttactgggccaaaatcaccaacagtgtcccctgttccatctcacaaccagtcacctccaacaaaagatgatgcaacagaaagtgaagtggaaagtttacagtatgataaggacaccaaaccaaatccaaaagccagttcttctgtacctgcttcactggcccagctagtgactacattccaatgcttcagaagtagcttcagsacagaagattgctgtaccagcaacatcacatcatttttgcttttcaatagacttaaggagtatacatgccttggagattggttttccaatcaactgtatattaaggtactcatatccattctttggaagtgcagctcctattatgactaatccycctgtagaagttcggaaaaacatggaagtttttcttccccagtcttactgtgcatttgattttgcaactatgcctcatcagstgcaagmcmccttcttaaggattccattactggttgaactatggcmcaaggatwaaatgagtaaagatttacttctgggaattgcgagaatccagctttctamcwtcttgtcttcagaaaaaactcgttttttaggttctaatggtgancagtgttggcgtcaaacttacagtgaaagtgtgcctgttatagcagcacaaggatcaaatamcaggatagcagatctttcttacacagtgactgtagaagattatggactagtaaaaatgcgtgagatttttatctctgattcatctcagggtgtatctgccgtacagcaaaagccgtcttctcttcctccagcaccttgtccttcagagatccagacagagcctcgtgaaacgttagaatacaaagcagcacttgagctagaaatgtggaaggagatgcaagaagatatatttgaaaatcagctgaagcagaaagaactggctcatatgcaggctcttgcagaggaatggaagaaaagggaccgagaaagagaatcactagtaaagaaaaaggtggctgaatatactattctagaaggaaaacttcaaaaaactctaattgacttggagaagcgagagcagcagcttgctagtgtggaatcagagcttcaaagagaaaaaaaggaactgcaatcagaacgtcagcggaacctgcaagaactgcaggactctatccgtagggccaaagaggactgtattcaccaagtagaactagaaaggttaaaaatcaaacagctcgaagrggataaacaccgccttcagcaacagcttaatgatgctgaaaataagtataagattttggaaaaagagttccaacagttcaaggaccagcaaaacaacaaaccagaaatccgtctacagtctgaaataaatcttctcaccttggaaaaggttgaacttgaaagaaagttggaatctgcaactaagtctaaactgcattacaagcagcagtggggacgagctttgaaagaacttgccagacttaaacaggcagccaaggcaaaataaagattatactcacttgattgaggagcctttaacccagagcacctggcactggagaggacttctttcactaccctctaacttgtgtgtgtgtgtgtgattattattaatgccctatacttgattaaaaattcaaagcatttaaaggaaaaaaaaaaaaaaaaaaaactcgag

SEQ ID NO: 1214 - DNA, 1147 bp, Homo sapiens
ggacacgaggtggccgtcggttccgagtccatgcctgttttctccgccaccggggacctatgcaagggccagggctgggccactgccactggacttacaagtgactgctgaggctatacactagcttctagaacaagataaccactgctgctgatggatacttttccctcactgccatggcacaccagtcatggatcttgtaatcatgccaagagaatagatacattatggacctcttgttcttagatatgggcctctcagcctggcagatgtggaaactcaaatttctcgtcccactccaggttttggctagccaaccctgcaggaaagtggtttataggccattcatacttaagttgatcacttgcccatggtggacatttttgtggtggtgatgtccattaaggaaaccagattttcaattatttagtgagagaagagttagagcaaaagacagtggtaaatgttttattccgtctccatgaggaattgaaggagttggtctccacctagagatacatttgatttacagcttaagtaattcagaggctaagctctaagcttttttctcycattgctggaatgatttaagcagaagtccttttgkgtacttttaaaattgkatctttccaggagcccctcagattgtaccttgctttctcaccaatagacaccttcccgacacttttttaatgttgtagctgagcactttaacaagttgagcattccatgtttcattcttagaaccttctttaatagagggtcttccctcaacagcctgtgcctctggtctacctttgaccaccactgataactaatatattggtcacaatgactggaatgtgactagtgatctcaggagatggcactgtcctaaagtgctgtcagggtggcaccactgctctctgaacaacttaccttggtcagagggactcaggtttgggacagcacaagctgaaggctggagagtaacttgcatagtaggaccatacctcttcctttcccatcccacccacatatgatagacagcccctctgttgagatatggaggggacagatactggaatcgggggtgggacttgcagttacttaaaattttttaataaactgtgccctgaaacctaaaaaaaaaaaaaaaaaactcgag

SEQ ID NO: 1215 - DNA, 998 bp, Homo sapiens
  SITE (358): n equals a,t,g, or c
  SITE (481): n equals a,t,g, or c
aattcggcagaggaattttatgaataagtaatgaagtctaattttccgttatcatagccattggttaaaaatgcatgtctgttaggacattgtaattattttgtattacttaggaaaacttttatgattctactcttttaatttttttaataattactttatgacttcttcattagggattctctcctccagtgcgtacgcagatcttctgaaaaggaatctgacaaatttagttgctgcatttttctaaattgctttcaagactacccagcacttcagatacttttcatggccctttttcccaaagtgttctccaggatgcctttgatctgcacgggcaatcccattagcagtgganggcttaagttcccacagaaactctgccacagaggcactgacaccagaccaggcgtgatccctaacagcttgctgtaccgactcatatgagggctgtcttggtccgtctcatttaaggtttggncttctccaaagwttagacaccytgttttcgttcaacctttgtttggctttgaagcatcatgcacttgggtcttgaaatcttgggctcaccgctgcttgtaccagtatcttctaccctccggttgtttgtggccattatcaaacaaacaccatgccaactaggtgtaaatgcagactgatattctgaagaatccaggaagggctgggcatggtgcctcattcctgtaattctagcactttgggaggctgaggcaggaggatcgcttgagcccaggagcttaagaccagcttagggaacatagtgagacccctgtctctacaaaaagtaaaaaataaaataaattggctgggtatggtggcacatgcctgtagtcccacccactcgagaggctgtgatgggagaatcacccgaggctggggaggttgaggccgcagtgagccgagatcgagtcactgcactccagcctggacaacagagtgagaccctgtctcaaaaaaaaaaaaaaaaaaaaactcga

SEQ ID NO: 1216 - DNA, 810 bp, Homo sapiens
ggcgttcccgcaaggtcgctttgcagagcgggagcgcgcttaagtaactagtccgtagttcgagggtgcgccgtgtccttttgcgttggtaccagcggcgacatgacggggtacactccggatgagaaactgcggctgcagcagctgcgagagctgagaaggcgatggctgaaggaccaggagctgagccctcgggagccggtgctgcccccacagaagatggggcctatggagaaattctggaataaatttttggagaataaatccccttggaggaaaatggaaaaaccatatggcatagttgaaaagaagtccagaatattccctgtaagtcttaacacttctgattttycttttgtttattgtttttctctttccttttcctccctttccaagcaattattagattaaaatgttctttccttctcactttcggtttaagtccctgttttgtgtattcttgtaaaaaacaaaacaaaacaaaaaaaaacaggaagaaataccgtgaggtaacaattacagttcaaatgggaagtgagcacatttattttcaacctggctgtaaaacgtgttttgtgaccttgattttcctaaagggagttgaaagtaccaaaagtttttcactgtgtcctgtttcatgttgggtaaagagcttagggcatgagcctaagcaaacatccatgcatggtgacagcaactgaatttctgttattaattccaaactctcatgtcctatggctttgtacctcattttcaagatttgaccttaagttctccatctgtgaatttaatatccactaatgggtgttt

SEQ ID NO: 1217 - DNA, 436 bp, Homo sapiens
ggcacaggccgggcacacccacaggagagcaatggctggagggtgacatggactgcagggtgtggccgcggcagcccagctcttaaggggacagcctgggaaaacagacttagggacaatgatcttgagccatgaaatgatgtccaatgccccttgtgccacctgacatcagcctgattaatgaacaaacagaagaggaagcaggggacctgtgtgtccctctctctgcttttctgtctttctctgtgccccctctcttatgtctctcacgctgtctcttgtccttgtttttaactctgacacgccgtgggaacttggctcacttcctagggggaagctgtctggactggcccagagatgggcaccaccatttcccaataaacacaagataaaatcaaaaaaaaaaaaaaaaaaaaaaaaaaaaaaaaaaaaaaaa

SEQ ID NO: 1218 - DNA, 3714 bp, Homo sapiens
  SITE (2324): n equals a,t,g, or c
tgacttcacctgaacaagtagccgactcagtgaaacgtttcagagtgcattttrsccaaatggcattttagcagaggctgttccatgcagagataaaagtattcgaatgagaacaagagtagcaggaaaaacgaaatyacttgcaattatgccagatgagctgaagcacattattggggctgagacaacacggaaaggtattcttcgtgtttttgaaatgtttcagcacaaccaattaaataggagaatggtttatgtcttcttggaaggctttttagaaaccttatttccacagtataaattccgtgaacttttcaacaaactgcattcacggtcaaagcagatgcagaaatataaacagaaacttcaaactactcaagcgccttctttgcagaaaaggtgacactccactctatgaagctggtgttcattttgtccaggactaatggtatggacagatcttctggggcttaactcaaatactgttgtgtctgcaccagtcttttagtgtctcaaaatagattattaatacatccataagtctgtggttcttctcattctcatctataatccaccactaccaagagagatttctgtgtcttaaatgatttggtgcatattttgcaacattgagagaaaactgcccccatctcaagcaagaatggcgttggtttcttccatttcaaactaatcagcattctccagcaatgacaaagtgccagagtgtatatatgaaagctaaggaaagcacaaaacaatggttcagagataaattggctaatttgtttaacagttggagactgtgcaatgtacgacttggaggagtttgtttggcataatgattttgtaggtctgtcagcattttgatatattgtggattagccaggtgaatgatccttgaaacatctctttcaggtctggagaaagagacagaatgcccttaaagtgtgaaataaccttatacctgaattacagttttgtgatataaaataaagctgagtataaaataaaaccaatcaaacacagaatttgattggatttgttattcattggtatacaacaatttttattcttatgtgtgctttaagggctgtgttttgctcttagggtactcaattttatgtttccttttggcattctttgtgcaaaaagaagcatgtggtggctctcatttaaatttcaaaattattagttttatctttaacagattactgattatacagaagatataatttattggaagaactgccaaatacattttgtccttctaaaaatatggaaatttaaatagtagtctggaaagttaccatatgataatttttaattgtgtgatctagacatgccttaggtaactgcagaaatagcaaattaaatgattaatgagcttattagtcatagtaaacatacagattcctaattctatgacagtgtacatatatgaaaataaatgatgaaaaaagaactataatatttttaaaaatatgcttttatttatatttcacataatgtaaagttctacaaaataaagctagtaggcaagacccctcagtgtatacctttaaacccataaattaattttatatcaataaaataaaatactttctctagttttggagcttctgtatttcctatagttttctgactgtccattttatccatcttagaagtattcacatcccttctatgcaggatttctgcatagttttaaatactttcattgcctaagggtttgggtgtgtcagctttttttgttttaaaaatatttaacactaaaaccttaaaataatgaagctacttatcagaccactgagccaagatcctggtattaaaagaaagtctgggtgcttaagataaagggacagagtattggtatcccagttatttgggagctttaagattggaacaagatatcactgtcttgttttcacttagatcctacttacaaagtgagggttattaacagaataaagccttcctttaaagctttataataatcatatttattaataatgctgttgtgcatacttatagtatgcatatattcagcatatgttgcatgtcttcagaattacataaaatgaaatccctttcattgcaacttgcaagtgagaaaagatccttagtggctctggtggargaaatagtatttcttcttctcagggtgtctccctgccttggcccctccctgagccccaggctttaaaagtgaaaatgtttgaaacatgaaacatgtctgtaggaagcatcagcatggccataagtgcagtgattttcatatatgcctctgcccatttcaaatatatttttgacatgaataaatctancagtatacagaataattcatgtaagaccctaacgtgtacatgtgaaaaagcatttctatataatgtgaggagcactggccatcaattagggaaataaaggtcatgtaatattgcaaattttcaaaatagagccctgcaagataactgcaatcataccaaaaactatttgagtaaatggatttttaaagtaatttttgtttagaagagtttatatttcagaagcagaaaatgtcaaatgatagtctttgtaaatggtggtgcaccttctctatgcacatctgtcttttacatcagaaagagctgtggtcatgctaaaattagagataactttttgaatgacttggtcaagctgtgtgtaaaatatttaaccataagtcaagtacagtgtactatgtttaataaagttacatttaatgcatttattgcatatatgaatatatacatgaagaggctttatgtcttctggtatttgattttgaatgttttttaagtcagtggtgcctttaggcaagaactttcgaaattaatcattctttgtgttttctgatttttcaggtaacatgtacactatttagaaaccatcatagtttattcaccttaaaaaattgattgtattatttaaatatatcacttagatgggcatttcctataattaggatattccaaatagttgctgaaatcaattgtgccattgaccaatggatgcacttggttagccttaatttttttwaaaaaaaaaaaaacaaaaactttcttgaatatttcagtttgttcattttaagtttgtgctgctggtatttgggaagaaaaatcaatcagttaagtgctaccagaaagtgtaccaatttttataaaaattaagaatgatataaatttcacaatctaaaattttaattttgtgcaatattttcatttaatgcatgtgtatttgagtaattgtaagataaatgaatttttaattttttgagatgtagcttaaactgtcttcttaatccaacaacttacattccgttgttgctgcatccttttatttaaggacttgttttaaaagtctttttgtcactccttggaaaattcttttattagtagtaaattttgcttttargagcatggctcctgtattacaagggaaaaaatatgaagagcacattttaggattataattgttaaaagataatgtgtgcatatcattgtacagtaagtgtcaactgtgtgcctaactgttctatcaatactttctttctttaacaaagaagaaacaacaatcagaatgtcagttatttttattcaactaaaaggattaaaaaatttatttggtttgtgttctgtccattagaaaatactaataaagtattaacaaacaaaaaaaaamaaaaaaaaaaaactcgag

SEQ ID NO: 1219 - DNA, 1263 bp, Homo sapiens
  SITE (184): n equals a,t,g, or c
  SITE (1254): n equals a,t,g, or c
  SITE (1255): n equals a,t,g, or c
  SITE (1261): n equals a,t,g, or c
  SITE (1262): n equals a,t,g, or c
tggttactgagatggtgaaaaccaggggagacctgggggacatcacaagcttggttcctaccaggtttatggagccgtacatctttgggagccgcctggaccacgacatcatcgacctggaacagacagccacgcacctccagctggccttgaacttcaccgcccacatggcctaccgcaaggncatcatcttgtttataagccgcaaccggcagttctcgtacctgattgagaacatggcccgtgactgtggcgagtacgcccacactcgctacttcaggggcggcatgctgaccaacgcgcgcctcctctttggccccacggtccgcctgccggacctcatcatcttcctgcacacgctcaacaacatctttgagccacacgtggccgtgagagacgcagccaagatgaacatccccacagtgggcatcgtggacaccaactgcaacccctgcctcatcacctaccctgtacccggcaatgacgactctccgctggctgtgcacctctactgcaggctcttccagacggccatcacccgggccaaggagaagcggcagcaggttgaggctctctatcgcctgcagggccagaaggagcccggggaccaggggccagcccaccctcctggggctgacatgagccattccctgtgatgttcactctcctcccaaagcaaaccacagccaagcctgtctgagctgggagtccccttccccagccctgggtcagcggcatcctcagtcgttgttacttactcagctgatgtcacagtgcagacatccaccgttccaccacagaaccagtggctgagcggaccaacgttgccatgtgcgtttgctctgtggggaacagagcacagagggtgagcgacatgtgcagaacggccccttggctgcagttaggacctcagtggctggtatggccragctgctagaagatgctgctgtccctgtgatcccagcagccctcccttcaccgtgacccctgacctttgtcaggaaggtgcagtttttcttctcaatctaaatgcctttcaggtgggccgcttccttggctacctggttccagggggctgttttgtaatgagatgctgctggcaggccactcagaggctcccagctgggttggtgggacagccaggccagatgacctgattccagcaaaaataaaactcagatttgggcaaaatgaaaaaaaaaaaaaaaaaaaaaaaaaaaaaaaaaaaaaaaaaaaaaaaaaaaaaaggggggnncccccnna

SEQ ID NO: 1220 - DNA, 1476 bp, Homo sapiens
ggcacgagccgggcgcgaaaatggcggcggcggcgacggccgggcgctcctgaagcagcagttatggagcttccctcagggccggggccggagcggctctttgactcgcaccggcttccgggtgactgcttcctactgctcgtgctgctgctctacgcgccagtcgggttctgcctcctcgtcctgcgcctctttctcgggatccacgtcttcctggtcagctgcgcgctgccagacagcgtccttcgcagattcgtagtgcggaccatgtgtgcggtgctagggctcgtggcccggcaggaggactccggactccgggatcacagtgtcagggtcctcatttccaaccatgtgacacctttcgaccacaacatagtcaatttgcttaccacctgtagcacccctctactcaatagtccccccagctttgtgtgctggtctcggggcttcatggagatgaatgggcggggggagttggtggagtcactcaagagattctgtgcttccacgaggcttccccccactcctctgctgctattccctgaggaagaggccaccaatggccgggaggggctcctgcgcttcagttcctggccattttctatccaagatgtggtacaacctcttaccctgcaagttcagagacccctggtctctgtgacggtgtcagatgcctcctgggtctcagaactgctgtggtcacttttcgtccctttcacggtgtatcaagtaaggtggcttcgtcctgttcatcgccaactaggggaagcgaatgaggagtttgcactccgtgtacaacagctggtggccaaggaattgggccagacagggacacggctcactccagctgacaaagcagagcacatgaagcgacaaagacaccccagattgcgcccccagtcagcccagtcttctttccctccctcccctggtccttctcctgatgtgcaactggcaactctggctcagagagtcaaggaagttttgccccatgtgccattgggtgtcatccagagagacctggccaagactggctgtgtagacttgactatcactaatctgcttgagggggccgtagctttcatgcctgaagacatcaccaagggaactcagtccctacccacagcctctgcctccaagtttcccagctctggcccggtgacccctcagccaacagccctaacatttgccaagtcttcctgggcccggcaggagagcctgcaggagcgcaagcaagcactatatgaatacgcaagaaggagattcacagagagacgagcccaggaggctgactgagctcaaaggaacaggatggcacccagagccgcaggacggagactgggggcagccctcacccaactcacaacaggctggatgggtgggtggtaaaaagggaaggatgaggctcccccaatgtcacattaaattcatggttttcattcaaaaaaaaaaaaaaaaaaaaaaaaaaaaaaaaaa

SEQ ID NO: 1221 - DNA, 475 bp, Homo sapiens
ggcacgagcttggaggaagaggactggcagttatgacaggaaggctctctatacctggctccccagtgttctgcccctggcactgagcatgaggagccaggctttggggagactttgcaatcacccccccaacctggtccattttccacaggtagctttcttgaactcaccttgacccctcctcagccagcagcccccacctccaggggcaaaggagctgaaagacagtcctgaactggggggagctgggatcacatcagccaggccctgtccctcacaggaagtgagatgaggtgataccatggatggtgactaaggccccaaagtccctgcctctctgcctccccagaaacctcacagccaggccagcccccagagcagagcctgtgtaaacatgcccaggaggggaggaggggttgctacatatgagaaacagttaaaaataaatttaaaaagcaaaaaaaaaaaaaaaaaa

SEQ ID NO: 1222 - DNA, 2708 bp, Homo sapiens
  SITE (1953): n equals a,t,g, or c
agcctctttggctcaaaagggtgkgttatgaacgaacctccttcagtccaactatccagacgttcattctctctgccatttggcacggggtatacccaggatattatctaacgtttctaacaggggtgttaatgacattagcagcaagagctatgagaaataactttagacattatttcattgaaccttcccaactgaaattattttatgatgttataacatggatagtaactcaagtagcaataagttacacagttgtgccatttgtgcttctttctataaaaccatcactcacgttttacagctcctggtattattgcctgcacattcttggtatcttagtattattgttgttgccagtgaaaaaaactcaaagaagaaagaatacacatgaaaacattcagctctcacaatccaaaaagtttgatgaaggagaaaattctttgggacagaacagtttttctacaacaaacaatgtttgcaatcagaatcaagaaatagcctcgagacattcatcactaaagcagtgatcgggaaggctctgagggctgttttttttttttgatgttaacagaaaccaatcttagcaccttttcaaggggtttgagtttgttggaaaagcagttaactggggggaaatggacagttatagataaggaatttcctgtacaccagattggaaatggagtgaaacaagccctcccatgccatgtccccgtgggccacgccttatgtaagaatatttccatatttcagtgggcactcccaacctcagcacttgtccgtagggtcacacgcgtgccctgttgctgaatgtatgttgcgtatcccaaggcactgaagaggtggaaaaataatcgtgtcaatctggatgatagagagaaattaacttttccaaatgaatgtcttgccttaaaccctctatttcctaaaatattgttcctaaatggtattttcaagtgtaatattgtgagaacgctactgcagtagttgatgttgtgtgctgtaaaggattttaggaggaatttgaaacaggatatttaagagtgtggatatttttaaaatgcaataaacatctcagtatttgaagggttttcttaaagtatgtcaaatgactacaatccatagtgaaactgtaaacagtaatggacgccaaattataggtagctgattttgctggagagtttaattaccttgtgcagtcaaagagcgcttccagaaggaatctcttaaaacataatgagaggtttggtaatgtgatattttaagcttattctttttcttaaaagagagaggtgacgaaggaaggcaggaatgaagaagcactgcgtggcctccggtggaatgcacggggcacagccgcgactctgcaggcagcttcccccccatgccagggctctgcgccgtcatgtgagacttaaaaaaaaagttgaatgacttcgtgatactttggacttctaaattaaatttatcaggcataaattatgtagaattagaggctttgaaaataatactggtaggttgctcaaaggttttgaaagagaaatcgctaggtaggttactatctggctaatccatttcttatccttgacaatttaattcatatttgggaaacttttagggaaatgaaaaataaaagtcactgagtctgggtgacattttttaagaataatataaattcagtttcaaactcttctcacattaaaattttgctgtgaactcttactaaaatgagttttargttctgtaagtggaaaaatgtgcttttattttatgggccatttttaccacaactaatcttgccttggattactaagcatctcctgcgatcccacagaggactgtggtggccacaggagctraagcagaagagtgggatttratgccaggcagtggagtggcctcagccccagattgtacctcctgccctgtaggaggggagggggcaaagcnttctgaacttcacctttgtttgacctatgtatggaacttacttttactttttgccttaaatttttaatgaaagcaaattttctgtgatggggttctctctctctttttttcggggggtggagtcactaataaatttgcaaatgaagttaaagacaaggcaaccatctggcttatgctatataatacttcatttaaagaagaaaggaaaagcaaatgcacttgcagcttttgaggtctcagcaaaaatgggcatgtgtcttttttgaagtttagaaatatcctaatctatttttatttatctaaaagtaagtgttttccggctgataaggctaaccctacccaggaaaggattgataactaaataaatttcctctgttttcccatgcattgaaattatgttggctgagccactgcacccagcttttgctggaagtttgattagcttgggttgaatctgtagaacaagttaagaagaactgacatcttgacaatatgaagtcttcctattcatgaaaatggaatatcttttcatttatgtagttcttctttgataacatcagacttttcctcttgtaaatcttgtaggtatttcattcatttatacccatttcattttgagggggactaatgtaaatggtaattttgtttgtttgtttgtttttgaaacggagttcactcttgtcgccactgcactccagcctgggtgacagaggaagctccgtctcacaaaaaaaaaaaaaaaaaaaaaactcgag

SEQ ID NO: 1223 - DNA, 1314 bp, Homo sapiens
tcgacccacgcgtccgggtaattgtttgaaatctaaaatgtcaactttctatattttcatttttatgaacaacactgttcgtaaaggcagtaatgcttcgtgtaattactggtacataaaagtctgattttgaaagtcactgtaaactaagcctgttttctgcctttctttctagtaacaacccttcagcagcgtctgttacagcctgacttccagccagtctgtgcttcacagctctatcctcgccacaaacatcttctgatcaaacggtccctgcgctgccgtgtaagtattccattctgtagactgaccatttgtacaagaggaaagcaaaaataaatgtggctggtgtctgactaatgtcaaaacctttggaatgtattaaatacagaaaatacttgtagagaacatactaattgccaggcactattttaaatgctttcaatataaacagctcttacaactctgtgaggtaggtactactgttaaacctgttttacaaatgtagaaaatgaagtatctgaaggttaagtacatagggttaacccctaaaagaatagtgaaagagtgtgaacttttaggctagtgttcaggctcagggaggaccaataaaaaataatcaatttaaaagaaagcaagaaaaatcagcaaaatccaggctctggtaatctacagaacaaatgacagagtttcttcaataaataaattgtaaaaacaaaatggaaaagaaaccttttagaggagtactatccaacagaactttctatgggtgatggaagtatyctgtgtctgtacagtccccgcatgatagccactaggcacatgtggctcttgagcacatgaaatgtgatagtgcagctgaggtactgagtcagtctttaatttcatttaaataaccacatgtcgctagtggctaatgttacttaatcattctctagattagaagagacttaaagtttaccaaacacaatgtatagagtttacgtagattcggattcaaacaaaacagaaagaaagggcccaggggaggagggaagaagggaaagaggaaagaaggaaagaaaaatttgtgaaatctttgagaaaatttaaacactggtagcattttcgatgctattaaaaaactattgggcagggcacagtgacatgcacttgtagtcccagctactctggaggctgaggcaggagaatcccttgagcctgaggagtttgagactgtagtgtgtgatgatggtgcctgtgaatagccactgcactccagcctaggcaacacagaaagaccctgtctcttaaaaaaaaaaaaaaagggcggcc

SEQ ID NO: 1224 - DNA, 1022 bp, Homo sapiens
ccacgcgtccgggagcgcagactgtgtccctgacaatgggaacagccgacagtgatgagatggccccggaggccccacagcacacccacatcgatgtgcacatccaccaggagtctgccctggccaagctcctgctcacctgctgctctgcgctgcggccccgggccacccaggccaggggcagcagccggctgctggtggcctcgtgggtgatgcagatcgtgctggggatcttgagtgcagtcctaggaggatttttctacatccgcgactacaccctcctcgtcacctcgggagctgccatctggacaggggctgtggctgtgctggctggagctgctgccttcatttacgagaaacggggtggtacatactgggccctgctgaggactctgctagcgctggcagctttctccacagccatcgctgccctcaaactttggaatgaagatttccgatatggctactcttattacaacagtgcctgccgcatctccagctcgagtgactggaacactccagcccccactcagagtccagaagaagtcagaaggctacacctatgtacctccttcatggacatgctgaaggccttgttcagaacccttcaggccatgctcttgggtgtctggattctgctgcttctggcatctctggcccctctgtggctgtactgctggagaatgttcccaaccaaagggaaaagagaccagaaggaaatgttggaagtgagtggaatctagccatgcctctcctgattattagtgcctggtgcttctgcaccgggcgtccctgcatctgactgctggaagaagaaccagactgaggaaaagaggctcttcaacagccccagttatcctggccccatgaccgtggccacagccctgctccagcagcacttgcccattccttacaccccttccccatcctgctccgcttcatgtcccctcctgagtagtcatgtgataataaactctcatgttattgttaaaaaaaaaaaaaaaaaaaaaaaaaaaaaaaaa

SEQ ID NO: 1225 - DNA, 2820 bp, Homo sapiens
  SITE (68): n equals a,t,g, or c
  SITE (2818): n equals a,t,g, or c
  SITE (2820): n equals a,t,g, or c
aattcggcacgagccgcggtctccggaggctttatctgcagtgctgcctgcccgctgggtggtactgntacctagtgggtyttggggaccttcgaaatcgccgccgctctcacaatggcttgggtccagactgcgccacagcctctcgggagacgtgggccctcggaacctttttagtgccggactccgggccgcagagattcccgcggcagcaggtatcacaggtggcagggactcagctcggaattctgtatagaaaaagcacctggatcccagtctttcaatggcttcaagacaaccagaagtgcctgctcttgaggctagtgcgcctctaggcaagatgtccctgcccatcgggatataccgccgggcagtcagctatgatgataccctcgaggaccctgcgcccatgactcctcctccatcggacatgggcagcgtcccttggaagccagtgattccagagcgcaagtatcagcacctcgccaaggtggaggaaggagaggccagtctaccctcccctgccatgaccctgtcatcagccattgacagtgtggacaaggtcccagtggtgaaggctaaagctacccatgtcatcatgaattctctgatcacaaaacagacccaggaaagcattcagcattttgagcgacaggcagggctgagagatgctggctacacaccccacaagggcctcaccaccgaggagaccaagtaccttcgagtggccgaagcactccacaaactaaagttacagagtggagaggtaacaaaagaagagaggcagcctgcatcagcccagtccaccccaagcaccactccgcactcttcacctaagcagaggcccaggggctggttcacttctggttcttccacagccttacctggcccaaatcctagcaccatggactctggaagtggggataaggacagaaacttgtcagataagtggagcctctttggaccgagatcccttcagaagtacgattctggaagttttgccacccaggcctaccgaggagcccagaagccctctccattggaactgatacgtgcccaggccaaccgaatggctgaagatccagcagccttgaagccccccaagatggacatcccagtgatggaaggaaagaaacagccaccacgggcccataacctcaaaccccgtgacctgaatgtgctcacacccactggcttctagagccctctttccagggattctggtaaaggtggtttcttgcatcccactccccttttaccttggctttgacataggaaaggtatatttaaaaacttaatcagctgggcgtggtggctcacgcctgtaatcccagcactttgggaggccaaggtaggtggatacctgaggtcaggagttcaagaccagcctggccaacatggtgaaaccccgtctctactaaaaatacaaaaattagctgggcgtggtggtgggcgcctgtagtcccagctacttgggaggctgaggcaggagaatcgcctgaacccaggaagcagatgttggaccgagctgagatcatgccattacactccagcctgggcgacagaacgagacgccatcaataaataaataaataaagtaaagtaaaaaacctattaaattgaggctagagctggagatgtaattggtttttgagaaacattagtataaagcttgcccttgttgtgtggaagaagccattttgtactgctttaaagttagactaatattctcagcacgggtgtatggggacctcattacctatttttttcatcatttaccctaggtaagaactttgatcactgcttactaggtaaagaatgtttgtactgttccaaaacccaggcttctttattcctttaccactatccatgtgagcattgacaaatcatggcttagaggtgctcactgactcgctaagacgactttggccctgttgatgactggtgctgtgctccagccttatcagttaggggacccaaggtttgtttgggacctgggtacaggtaaaagccagacttggcagggacccctctttctaggctgaaccttgagtccccctgctttttggcagacctaatggatcactgtcttgcagctagttcttcatgtggggcctcttaggccagtgccggaggaggcatgctcctctttctatgccacagaacaaacactactctagcagagcctttcttgcactttaaagtgagattaatttagctgtaatttggttaaaaacttcctaagagagaaaattaagtctactgatttggtataggtaaatggacattaaacttttttaaagtaaaggagatggtagataccgttagattatagtcttgaggttcatgtgaagccagtggtgttaacttactttgatttccttgttcaggtcagggcctggaacgcctgtgcggggaggtcactcaattcaaaattttctgtatgaaagcatttttcaccaaaatgagcctcatccctttatgcaacacataaccttactgagggagggaaatacrgaagccacctttttatttctcttcactgtgtacaagttcacttgttgtcttgaacactgtctcaaatacctgctttttgttttggatagtaccttgtctgtataagaagctggcctttccatagagaggccctggagtctaaaattatgagaacaattaatttatttgtgtcttctattatgatctcgttttgacaataaaaatccttactactttctcaaaaaaaaaaaaaaaaaaaaaaaaaaaaaaaaaaaaaaaaaaaaaaaaaaaaaaaaaaaaaaaaaaaaaaaaaaaaaaaaancn

SEQ ID NO: 1226 - DNA, 787 bp, Homo sapiens
ccacgcgtccgcatacccaccaggcatcttataagccattgttgaagcaagttgtggaggaaatatttcatcccgagaggccagattccgttgatattgaacacatgtcttcaggcctcactgatctccttaaaactggatttagcatgttcatgaaggtgagccggcctcatcctagtgactaccccctcctgatcctctttgtggtaggtggggtcacagtctctgaagtgaaaatggtcaaagatcttgtggcatcattgaagccaggaacccaggtaatcgtgctgtccacacgactcctgaagccacttaacattcctgagctgttatttgcaactgaccgactgcatccagaccttggcttctgagcatccgctaagaagataagacctactcaagctggaaatgccgatgcaattttctgccaccactccaaatactcctccacaaccagcgtccctgtcactaattgcgagaatgatggaattctgcctgaagggtcttgatacctactcagtgaggtactttgcttggattgctgtgattcttaaaaaaaaaaaaaaaaagtttttttattttcctgaaggcgacagtctgtcttttggcgagtccaattagtgatcgtttccatttatccttaaccctctgtttgtgatcttcctgattccacctacaagttcattagttctaaataaaagcctgttggcaagtgaaaaaaaaaaaaaaaaaaaaaaaaaaaaaaaaaaaaaaaaaaaaaaaaaaaaaaaaaaaaaaaaaaaaaaaa

SEQ ID NO: 1227 - DNA, 2638 bp, Homo sapiens
cccacgcgtccggaggtctacagtatttgtgttggcatagtttttgtaaaaaaaaagattaaaaaatatcaggatggtggaaaaactagatctgtgtatctctgttttggcatgcatttattcagtatcttctagcaatggtttttctctgttgatctaccgtagtatcctatttttaagtttattttatttttaaggagtattgtcatcacttttcaaggtgtcttgacttctacacaaagtatatatattcaggactttaaaaaatagcagtacacatttaacagtagcgaattacaccaaaatgatttactttgagatttgaataatttgcatagcagtaaaatgtgttttgtgtaacatacaaatagaaaaatgacccagtatcttaattgatacttactggagagtatcagaattacccagcagctcttacagaatgccataaattctttaagactaaatattgaaatcaattatttgaagtaatgttwctgatttactgttaaaagttgctgagctcagtttttggagatatcatttatgcctgcctgttcccttatgacagtgaggccttctttggctccacctagtatgataatcatgggttctgttttagttgatgagaagtggctcctatgaatgcctctgctcaatttctttttattttactttattttatttttaggggtctcgccaactcctgggctcaagtgattctcctgcttccacctccccacagtgctgggattacaggcatgagccaccacgcctggctctctgttcttttcagtgtctccgtgccatcagtcagcagtgcttacatgtttagcatattgtcatgcagtttctcttctgttcccacgagatatttttggrcaaaaaattgacaaaagtacatgtgtttttccccacctatcccttagaaaacctaatgtgtactgctatttttaaaaccaaaaagagacagcgtgacgatgcgtaaagcatttttcttagcctttcctttgtcttgatctgttaatgagaacaaaactgccagactcaaaatactctactattgtgctgaaagaaatacaatttagattgcacaaaatttgaaaatataactcagctgtcttttaaaagagttgtgttgttatctacaagactattagcagtcttttttcagagcaaattttaacagctagttgtgagtggtttaaaatatagaaaattattaaaatcttagtttgaggggttttatagtgggagaaaaaacaggaccaaagtttatgtgccttcttcagtagtcttaattgaccttttcttcctatttgagactaaagtagtatcagtattctggttttcaggaaatatgtactatatagttttaaaagaatgttgtcccaccaactattcatccaagcaaagaattgtaactataaataaagtctcagttacacttttgcctttatcacataatattcattgtagagcattgtgcaggtccaagaatagagctgctcaaaatctttgtggtagtttccttagtttttgtaacctgaggcatatgttccagagaacagggatatttgtctggtccagtgaccttggtgatcatagtcataattgaaagatgcctatggcatgcttaaatcagcattgtcaactgatttgttgttgtattattttcacttcttggatctatgtagtagttgtaataacaaatatttaaatagctatttttttgatgccattaaaaaaatcatactctggccttttttcccccttactgttgtttcccagatcttttaaaaattcatcccatatccagaaagtaccagttataaagattgctgaccaagcaaagttttgcatcaaagtgtcacctcattgctctgaccaaagactgactgttgtggttttaactcctctctgtaaagcattttgcattttccccaagctcctttctgaaagaagacccagtgcagagcggcctttactttcaatttctactgctgaatagactacttagagaaaatgtgagtttcagtgtgaacagaatggattaggatgacgagtttgatgggcattttcagtactgtatctaagaaaaaaaaaatagcacagctaggagcctctgacattgtctggtgttttacgtggtctgttcatcaaaattccccttttcagtttttaagaatgttcgtctaacagaagaaaatgctgtaaatatttgtaacaacattttttttaacaaggccaaaaaagaaaaaaaggtttttgggaacaaatgaacttataaagtggttttatataaaacatcaattgtcttgtatattttggataagcagcagtaccagctttcatttgtaacagtctgtggcattggraaaaaaggagtctgtgattgttgaagtgaattatgttataaatgcaaagagaagataaaatattaaaaaacatattttctaaatgcgtagtgcatggttaattcaagcttctgtacactacagtatattccattttcgttcagtttgtatatttgctgactattacttgatatctctaatctcttttcctaacaaatatagcattgtagcatgccttttaataaatgtcatgacatctgtactctcttaaaaaaaaaaaaaaa

SEQ ID NO: 1228 - DNA, 787 bp, Homo sapiens
  SITE (4): n equals a,t,g, or c
  SITE (11): n equals a,t,g, or c
  SITE (13): n equals a,t,g, or c
agangggaaancntggtactccgtgcaggtaccggtccggaattcccgggtcgacccacgcgtcmgacagtccacagctgaagagcaaggtttcgtggcagcacggcccggcccctcaccctctgtccccacgaggggacccatgggggctgtctttgcagggcacagatgaccaaagtcccttcctgcttcctgttacctgtcttgctcctggggagaaagaggggcctgatgagactccactcaggtgcacacatcaccaggtgcatctgcaggcaccgggctggctgcttgcagccaggagaaggtcagcgagaaggagtgtatgagtgtgagtgtgtgtgcatggaagttggggcactgggcgtctgactccctccccacccaagagaggaaggacccctcaccacccccactggcgagacagtttactttgccgacttgccatgtttttgccaaaaccaagattttgaaggaaatgagtggccagcgccagggcccagccatgtggcctgcccagcctcaatgtcacttggyggcggggtggggtgggggtgggcagcagcatcccagccttgagatgcttcactttccttctctgtaaccagactttgaaaaattgttcgtttcatcaggctctgttcctcaatggccttttgctacgtgcctcccgagaaatttgtctttttgtataaatgacaaagtgttgaaaatgtatttcctgaaataaatgtttcaaatgcagaaacccaaaaaaaaaaaaaaaaaaaaaaaaaaaaaaaaaaat

SEQ ID NO: 1229 - DNA, 799 bp, Homo sapiens
  SITE (4): n equals a,t,g, or c
  SITE (11): n equals a,t,g, or c
  SITE (13): n equals a,t,g, or c
  SITE (779): n equals a,t,g, or c
  SITE (793): n equals a,t,g, or c
agangggaaancntggtactccgtgcaggtaccggtccggaattcccgggtcgacccacgggcgtcaggggtgcacagtccacagctgaagagcaaggtttcgtggcagcacggcccggcccctcaccctctgtccccacgaggggacccatgggggctgtctttgcagggcacagatgaccaaagtcccttcctgcttcctgttacctgtcttgctcctggggagaaagaggggcctgatgagactccactcaggtgcacacatcaccaggtgcatctgcaggcaccgggctggctgcttgcagccaggagaaggtcagcgagaaggagtgtatgagtgtgagtgtgtgtgcatggaagttggggcactgggcgtctgactccctccccacccaagagaggaaggacccctcaccacccccactggcgagacagtttactttgccgacttgccatgtttttgccaaaaccaagattttgaaggaaatgagtggccagcgccagggcccaggccatgtggcctgcccagcctcaatgtcacttggyggcggggtggggtgggggtgggcagcagcatcccagccttgagatgcttcactttccttctctgtaaccagactttgaaaaattgttcgtttcatcaggctctgttcctcaatggccttttgctacgtgcctcccgagaaatttgtctttttgtataaatgacaaagtgttgaaaatgtatttcctgaaataaatgtttcaaatgcagaaacccaaaaaaaaaaaaaaggggnggccgttttaaagnatccaa

SEQ ID NO: 1230 - DNA, 1726 bp, Homo sapiens
  SITE (1695): n equals a,t,g, or c
  SITE (1707): n equals a,t,g, or c
  SITE (1710): n equals a,t,g, or c
  SITE (1724): n equals a,t,g, or c
gtcatggcggcggccgccccaatgccggaggtckgcccctgagacagcgggttccgccgaagctccgctgcagtacagcctgctcctgcagtacctggtgggtgacaagcgtcagccccggctcctggagcctgggagcctgggcgggatcccaagtccagccaagagtgaggagcagaagatgatcgagaaggcgatggaaagctgcgctttcaaggctgcgctggcctgcgtgggaggatttgtcttaggaggtgcatttggggtgtttaccgctggcatcgataccaacgtgggctttgaccctaaggatccttaccgtacaccgactgcaaaagaagtgctgaaagacatggggcagagaggaatgtcctatgccaaaaatttcgccattgtgggagccatgttttcttgtactgagtgtttgatagaatcttaccggggaacatcagactggaagaacagtgtcatcagtggctgcatcacgggaggagctattggtttcagagctggcttaaaggctggggccattggttgtggaggttttgctgctttctctgctgcgattgattattacctccggtgagagtaattgcctgcagggaaggatgatgccagccccggatccgggctgctctctggaggacagtttctgtaccacaccagggccttgcttcagggcctgaagacattcattttccctcatgtcgttggtattctragggagctgcctggcttctctgcctccagcctttggggtagccacactttgctgctcctggactccagccagccttcacagaggacgtcccgtgccagattctctcacagcagatcgggagacaggatgttgacatataggaattcagctccacaaagcttcaggcctgaccacagctggccctctaggttgtttggtgttgtgggcacagaggtgacagtgtctctgcaggcactcaggaagctgttctaccttggaactccatgcaactatccgtctcgaataccagggcagggcaaggcggactgatgccgtccaaccaattatctcacttgttttgtgttctgtcatccttgttttttttttaaaaatacactcccctcccccaccgccacacaccttacagttcaaaaggttggtttatttgtattttattttcaaattccctattccaaaaatagtgccgggtggcccaaagataacatctgaagggaaagaatgagaaagctcccagggaagcgggggatggggcgctgaggcagggttgttagaggactgtgtcatcctcaccaagctcattacatctgccagggcctgcctcaagaagcccagcccagccttttcctgggatgcagtgaaatcccatccatgaactcgatgggcccctcctgtgccggccgagaggcacacactgccttcacgacgtgactgctggacctggccgagcttgaggccacatgtgaagggtcctgctgtggtcatcttggtgactcggtcacagcagctactggccaagatcagacgtcgctgaggggctgttcaccaccatcctcgttctccagggtcaaggaagtgttttaacatgtcgtgttttcgacttgaccttgtggtatttttcttggcctagttgtgtgccatggatattaaaaaaaaaaaaaaaaatccgtttacaaaaaaaaaaaaaaaaaaaaccngggggggggccnggnaccaaattcccccnaa

SEQ ID NO: 1231 - DNA, 936 bp, Homo sapiens
  SITE (168): n equals a,t,g, or c
gaaataatgtcatgcataatacattcttcaacactatactaattactaagcacctaatatattgttattttgtttgttttttaaactgcatattttgtcagtgtggcatctcttgtctgtgaaatattcctttaacacatgtggtgtattttctcacctacgtatgtntcctcttcctaagtagtttaaaacacacacacgcgcgcgcgcgctgtgcacatgcttattcattgactaagttatccatgaacctgtcatttctgtcttctggagcaacatggaatctcatatttctatcttaatcacatatgtttaattttgcctttgttttgtggtctgtgggtacatttgttatttttagtatcaagtcatttggctaaatcatattaaattgcaatcacctaaaatcccctggttattttgacttaaatgactgtcatctttggtttcccttacttagaacgtcacacagttaattttttttttcaacctaatggcaagtgtgtgtgtgtgttcttggagtagttctgctggctatgaagagtatgtagtaatatgctaaagctttgtaaactcttcttttgttgttttggaagatggagtgttgctctgttgcccaggctggagtgcagtgatgtgattttggctcactagagtctccaccttctgggctcaagcagtcctctcacctcagcctccctggtttgtggaactacaggggcatgccagcatgcccggataatttttgtattttttttcttttgtagatacagagtctcactatgttgcccaggctagtctcaaactcctgagctcaagcagtcctcctgcctcagcttcctgaagtgttgggattacaggcatgagccattgcacctggccctaaattttaacagatacaaaactataagtttatacttaaaaaaaaaaaaaaaa

SEQ ID NO: 1232 - DNA, 698 bp, Homo sapiens
gcttctttaagattcgtctctgggaagagatttacccagtagagatcagagccggacattttattgttttccaagtttgaccttttcatttcaggagcatcaagcatgaagagccaatccagtttaagtgtgggcatcttgagagtaacactgtgtcttgttccttcttgtgttcctgctattgactgcaatgctcagtaaatgtttcaggcatccacgaatgaatgattgaacaaatcaacaattaatcaattaataaatgaaagctatcatcatcaggtggaaataatgcttttaagtaagactaagggcttttatcactacagagcataatagaaaggaaacaagccaattaataagaaataattttgcttaaaaaataatttttcaggcctggctcggtggcctcacatctgtaattccagcactttgggaggccaaggcaggaggatcacttgagcccaggagtctgagaccaccctgggcaacatggtgaaaccctatctctacmaaaaatwcaaaaaattagccgggtgtkgtggtgcgtgcctgtagtcccagctactcaggaggctgaggtgagaggatcacttgagcccgggaggtcgaggctgcaatgagccatagtcgccaccgcattccagcctgggtgacagagtgagaccttgcctcgaaaaaaaaaaaaaaagggcggccgc

SEQ ID NO: 1233 - DNA, 903 bp, Homo sapiens
ccgggtcgacccacgcgtccgctgcatccaaggaactagcttctaaaaaatccctgcctatgaattattacacagtattctaccatgttcaagaacaactacctagagactgtttcgtggtaagtgaaggagcaaatactatggacattggacggactgtgcttcagaactaccttcctcgtcacaggcttgatgctggtactttcggaacaatgggagttggtttgggatttgctattgcagctgccgtggtggctaaagatagaagccctgggcaatggatcatctgtgtggaaggagacagtgcatttgggttttctggcatggaggtagaaaccatctgcaggtacaacttgccaatcatactgttggtagtgaataacaatggaatttaccaaggttttgatacagatacttggaaagaaatgttaaaatttcaagatgctactgcagtggtccctccaatgtgtttgctgccaaattcacattatgagcaagtcatgactgcatttggaggcaaagggtattttgtacaaacaccagaagaactccaaaaatccctgaggcagagcctagcagacacaactaaaccttctcttatcaacatcatgattgagccacaagccacacggaaggcccaggattttcattggctgacccgctctaatatgtaaataaagacgccagttggtggtcttgagttttctctttcttgcaagatgaaattttattttccacagcaaaattactctactgttaaaattgtgcaaaataaaataaacatttaaaatgaaaaaaaaaaaaaaaaaaaaaaaaaaaaaaaaaaaaaaaaaaaaaaaaaaaaaaaaaaaaaaaaaaaaaaaaaaaaaaaaaaaaaaaaaaaaaaaaaaaaaaaaaaaaaaa

SEQ ID NO: 1234 - DNA, 1971 bp, Homo sapiens
  SITE (4): n equals a,t,g, or c
  SITE (1270): n equals a,t,g, or c
taanccaagattgcatcattgcaatgccagcctgggaacagagcaagaccctgtctcaagggaggaaaaaataaaaaaataaataaaaatttaaaaaaagaacacttgaagttactcagatcaggactcatgcagagaaaagccaacaggagcaacaccccacattaggggaggaagacacctggggattcactgacttcagttgtgtgaattttaccctatgaccttgcttgctttatgagacagcagaggtggccaaggtcaatcctactgctctgtggtgaactctgcttttctctcgttaccataggtaaagggtcatgctcctatgtaagccttcctgttccccagtcatttgtgcacggggtaggccatcatctcctgcctattcaagggaatgactagtcctgtcttctgtatcctcagtcaccaacttctcagttagtgttgaaccaagcctatgttcaaaacatgactgagacagacctcaatccatagagatttatttagccaaggtccaaggacacatctaggaaaaaatacgggatcacaggagcatctgcgccttctamtttttccaaagagggttttgggaacttcagtatttaaaggggaaacagcaagcaggtgaggaaaaaaagcgaggaagtgtaggcagtgacagatgctcacattcttgtgaaactctgtttaccctagtaaatctgcattttacatgtgaaaagagggagtaaaggaaatagtcaataatgcattcctctcaggataggcccacgtggatttttaatcttgtccttgccctgtgaagataagctggtaactgacattgtcagggtgagattcagcagaactcagttttaggactaacttacagaggagctgtgtatcctgaagattcagcgactggcaaggaatttccttgggagcaatgtgtgagggaggccatctgaggagatctgtggctttcttttgttgtgggaatctggcttatggatgaatctacgacacaggattgtgaaattacagctctttgggaacaaaaggaaggcagtattgcatgacttagtttcccagcttcactttccctttggcatggtgagtttggggtcttgagagkctattttctttcacacccatcagcactgttaagtaagcaggaagacaacctgaggttggctctttactttgagktcctacataataaattgcagcctaatttagtacataaacccaaacctaatttaggagtaaattttttgtagcagatagncagatttcagccaatcacaggcttccagctaacaagactatgcccaaataaggcaaatgcctcatcacatgatgctcaaataaggcagccacctaggcgaggccaatcaggtaacttttctactttgcttaattgttcagcctgtacaaatttgctgcttatgactgctgagcagagctgtctaaacctcttctggtttggagtgctgccttatatatgaattgttctttggtcacataaaattggttaaatttaacttctctaaagttttgtattaaattgtatgtaaaacattggtagcacaatttggattcagatacccaaatattgactatgataatgtaaataatccttaagcagactgatttacaaaggcctgaacaagtttgatattctgaatattcacttcttctgatgaaaaaattgccaagaccttacaattggcaggaaaaaaatgtgtgttggttaaataagttatgttaacaacaagaacattaccacaattagaaaactcttactatgccaggcactattataaacacacctttgtaccttttttaatcctgaaaaatttctaataaatatgcatttaatattatttgtatttaatattaagtgtatttaatattgcccctgttttgtgaattaatgcagcaataaactggcttgcaatggaaaaaaaaaaaaaaaagggcgsccgc

SEQ ID NO: 1235 - DNA, 1086 bp, Homo sapiens
ccacgcgtccgcgagaaactggagagtgagaagctaaatgtggctgaggtcacccagtcagagattgctcagaagcaaaaactgcagactgtcctggagaagatcaatgaaaccctgaaacttcctcccaggagcatcaagtggaatgtggattctgttcatgccaagagcctggtggccatcttacacctgctcgttgctctgtctcagtatttccgtgcaccaattcgactcccagaccatgtttccatccaagtggttgtggtccagaaacgagaaggaatcctccagtctcggcaaatccaagaggaaataactggtaacacagaggctctttccgggaggcatgaacgtgatgcctttgacaccttgttcgaccatgccccagacaagctgaatgtggtgaaaaagacactcatcactttcgtgaacaagcacctgaataaactgaacctggaggtcacagaactggaaacccagtttgcagatggggtgtacctggtgctgttcatggggctcctggagggctactttgtgcccctgcacagcttcttcctgaccccggacagctttgaacagaaggtcttgaatgtctcctttgcctttgagctcatgcaagatggagggttggaaaagccaaaaccgcggccagaagacatagtcaactgtgacctgaaatctacactacgagtgttgtacaacctcttcaccaagtaccgtaacgtggagtgaggggctgccctgggcccaccactgcccaagagttcttgctgttggcgtactggaccctcctccgaactgccttaccctgcttattcctgtctcttgcactgtgctctcccacaagtccagctgcaacccagagatagtggaaactgaaattaggaaggaaatcatcaataactcagtgggctgacccatccctcccaggcgctggggaccaacctagcaatgaaggttgggaaggttgttcccttcccggtgccaggtccagatttccctcatgatttgggaaccagcttaggcaaaagagtccccacaagatgaaaataaagatcctagttaccattcaaaaaaaaaaaaaaa

SEQ ID NO: 1236 - DNA, 559 bp, Homo sapiens
ggcgagaagacgacagaagggatggtgatgaatccatttatatttaatgtaattactgatacagttcagtttaagtctagcatattgctacttacttttgcctcaatttttctctcttcttttcctgccttctcttattttaatcaaatagtcttgactatctcattacatcatgtattctagttattttatgtatctcaatattattggtttagtggctaacttagcaattacaacaaaactaactaatactaacatctcagacgctcaggaaatagaaaccgtctgaactatcctacccgccatcatcctagtcctcatcgccctcccatccctacgcatcctttacataacagacgmggtcaacgatycctcccttaccatcaaatcaattggccaccaatggtactgaacctacgagtacaccgactaaggcggactagtcttcaacttcctacatacttcccccattaatttcctagaaccaggcgactgcgactccttgacgttgacaatcgagtagtactcccggattgaagcccccattcgtataataatt

SEQ ID NO: 1237 - DNA, 1425 bp, Homo sapiens
gacggtgtgtcagaggtcaggtgaatatcgcagatgaggcaaaactttgtagcccaattcgttcaacttttgaagtgttggttgtgcgatgtgtggtcaggtgttgtcgtggagaagaattgggccccttctgttgaccaatgccagctgcaggtattgcagttttaggtgcatctcatcgatctgctgaacatacatctcagatgtaatggtttcgccaggattcagaaagctgtagtggagcagacctgcagcaaaccaccaaacactgaccataactctttttgggtgcaaatttggctttcggaagtgctttggagcttctcgatccaaccactgagctggtggtcgcccgttgtcacggttgtcatataaaatccacttttcattgcacgtcaaaatccgattgagaaatgcttcatcattgttcgatagaataaaagaaamcatttcaaaatgacttttttgatttttggtcagctcatgaggcacccacttatcgagctttttcacctttccaatttgcttgaaatgccaaacaaccatagaatggtcgatgttgagttcttgggcaacttctcgcatagttgtaagaggatcagcttcaatgattgctcacaattggttattgtcaacttctgatggccgacaactgtgcttctcatcttcaaagttcccatcccctttgtaaagcttcttgaaccaccactgccctgtacattcattagcagttcctgggaaaatgcattgttgttgttgcgaattgtctctgctgctttacgacccattttgaactcaaataagaaaatcgctcaaattycctttttgtctggcatcatttcaaaagtgtaaaataaatgtaaaataaacagcaagtaagaagtcattagcaaaaaagaataaagtgagaaacacacattgaaatgatgtataacataaccacatttatttaagaatgtattacaatatcaaatgacaaatttcaacaatgcaaaaacctcaattgcttttgcaccaacctaatatatgtatccctcaaacaactaactatacttagcatctctcaatgtgctcactgcccatttttatatcttccttgaagaagtctctctttaaatgtgttttttaaaggaattttcttgttaatattgaattacagttataggaatttttatatcttcaagatataagtgctttattagaaatatgacttgcaagtaatttctcccagtctatagtttatgttttcatgttcttaccagtaaaatattaattctttgtcatacaaacataaacaaattttattaatctagcaagtagaagtaacttggaagtcatacttgcaatattaaggagaacttactgtttcaacctagtccttcaagaactaaaatgtaaaaaaaaaaaaaaaaaatgatcctcgag

SEQ ID NO: 1238 - DNA, 2324 bp, Homo sapiens
ggcacgaggccaggccacttggaaaaactatggaattctttttgaatgagtctgcttgtaatgtcactctgctacttccttggtgagctatttgaactctctgcctttaacctcccctttgttcatagggctcgtcctccagtcactactgtagaggcaggaggggagctcttatatccatagctgcttgattccccctgtattttgtctttctgttaacgcacataagcacatcatagactacataacagcagtgtgaggagttcaatacatgcatgtagacatacatctcaaccaaacttagtgtcagaaaaagcaacttcaaaattcataattcagtgaaaagaagaagaacatggttggtccaaatgccacgacaagctcaacaatcacaccaggaatagaacctcataaaactcttgtgctaagaagcagttttgtgataatcaaagcatctctcttttcactcaggtctaggtactgaggttaagttagttatacaaggtcacaccaataattaggagtatacctaggagccaaactcaagtcttgtttacatttgtacatttcacaaaactttataaattctccatcattaaatatgtcctggattatctaatctacacacacactgtccagtaagaaagaattttctgcagaaagtctcaacttccagtgagcccactaatctctaaaagacatgtcttacttgatttaatgttaatttctccccacaatgcattctcttcctctttccacgcagttctattttgatggatcctgataagccttgtacctaggaaattcttccaggctagtttttccactacaggcgctggcgtttcccactgaccatcatcatagccggtgcataatgagcccaccaagctcttgaatatgtccagagccaaatgcagaagagaaaggactgacctgggccactgttcagtgttttactgtaacacaaaacaatagaaagtgctcttttattcactcaagtcctaaaggtgctgtactctggattaaagaggtagcttggggcaaacagaaaccccaaaagactcatgtttttctttggccttaggaagctcagacctgactttgtaggccaagtttggttatggtatgaggactttacacttaagcttttatcttaatcctcaattgcctaacataattacttttgtcttatacatatttctgtaagtcattgtttatttttcttgaagaacaaggtaaattactttcaccattttttttttattttgaaatagtcacccaaagttttcaagatatttaccagaggaaagttttagtgtgccctttacccagtttcactaaatggttacattttacataaataatcaaaatcaagaaattgacactggtgcaatatgtatatgtgtagttctaggtcatgttctcacatatgtagattcctgtaaccctggagcaccctgaatcaagatacacaactattccatccccacaaagatctttcctgctatctcttcatatcgtacccactcccttcaccccccgtgtattagtccattctcagaccactataaagaaatacccaggactgggtaatttttaaaggaaagagggctaattgacttacagttctgcatggctggggaagcctcaggaaacttataatcatggcggaaggaaaagcaggcgtgtcttacgtggccagctggtaagagagagagtgtgtaagagcaaggaaaactgctttataaaacccatcagatctcatgagaactcactcactatcatgagaacagcatggagaaactgcccccataattcaatcacttccctccctccacacatgaggattacaattcaagatgagatttgggtggggacacagacccagactacatcacctggcacccaccaacctgttctccattgccataattttgtcattttgagaatgcatataaatcagttcatgtagtatgtgaaggtaaatatatttttgaagtacatttattttttcactcatctttttttctctagatcattttcatttaccattttattaacatatccacttattcaagcagaagacttggctgggaaagccaccactggagagattcaaaatgttctaagaccactcttacttcactgtagcatataatttggtttagtaacttacacgtaaaaattttatagatgataggacagataactatatctttattctctgtggcagattcgataatggcttcccaaagatgttatccatgccttaatcccttgaacttgtgaatgtcaccctgtatggcaaaaaaaaaaaaaaaaaa

SEQ ID NO: 1239 - DNA, 2041 bp, Homo sapiens
  SITE (2017): n equals a,t,g, or c
gggtgaggggaaaggtatgtgtttgcatcttctgttagcgatttctgggattctgaatcttcactgtcacttagttctgtgcagttgtgggagatatacccagaagacacaggcaaatacaacctgggtaactagctaggggtttgttcccaagtccctatcttatatgtcctggcgagctgccctaaactacgtgtgaggaataaagactgtgttctttcagctcagacctgtgattcttgagtgttttaagagtcttttaaaatctatgaaccctctttccagcaagtcgtaaatgtacagaatagttttgtgtaggttttcagggaattcatgaataccactaaagctgttccagtagactgtattgggagtcttataggataattactggcaggcttgggcaacctcttggccccattcccttagctgtgtgtcttgatkytagccctgtgaaagagtccttcactcttaagatttagagcccagatgacctttgccagccgtttaccttttttcctggggtgtcttgttgatcctgctgggtttctatgggtacaagaccctcttaaacatgaagcagctctatatttgtcgttttaaaatttattttattatttttaacaaattggccagagaccgcctttttaaaaattttctttcctttccttttcttcctttcccttctgtttccttcccttccccttttctttttcttcctttttttccttttctttcctttttcctttccttccttcctttcttgcctttcttcctttattgctttcctttcttttctttctttcacccaggctggagtgcagcmcactgtaacctcaagttcctgggcttccaagwagtgggactataggccacaccaccatggccccataatcttttttctttttttacttttttttttttttagagacgggggtctcattatgttgcccaaggatgatctcagactcctgggctcaagcagtcttcccaccttgatctcccaaagtgctgggattatagatgtgagccaccatgcccaatctttgtttttttaattggcaagtaaaaattgtgaagacttatggtgtacaacatgctgtgttgataatgtgtatacattttgtaatggttaaatcaagctctttaacatgtgtatcacctcacatacttatttttttgtggtgagaacacttgaaatctactctcagcaattttaaagtatataatatgttgttactaactgtagtcacatcactatgatgtgcaatcgatctcttgaacttactcctatctacctgacattttgcatgctttacatctccccagtctcccaacccccagcttctgagaaccaccattctacttyckgcttcwatgagtccaattttgtttgctttagaggtggtacctcactctgtcacccaggctagagtgcagtggcacaatcatggctccctgcaatctctaactcctgggctmaagtgatcctcccgcctcagtctcccaagtagctgagaccataggcgtcsgcmaccacgcccccagctaagktttaaattttttgtagagataaggtcttaycakgtgcccaggctggcctcaacctccaaagtgctgggawtgcagttgtgagccactgcactaagcctgagtcgacttttttggatccacacttaagtgagatcatgcagtatttgtctttgtatgcctggcttatttcatttaagataatattttccaggtttatctgtgttgtcttaaatgacaagatttattttgttgttgttaaggctgaatagattctgttgtatatatatgctacattatctttatctcctcatctgttgatggatacttaggttgattccctatcttggctattgtgaatagtcttgcaataatcatgagagttcagatatctcttcaacatattgacttcattttttggggatatatacctagtagttggttttatatccatctcattaataactacatgaaagacaaaaagagnaaagaagaataatccagctatcta

SEQ ID NO: 1240 - DNA, 2054 bp, Homo sapiens
gggtgaggggaaaggtatgtgtttgcatcttctgttagcgatttctgggattctgaatcttcactgtcacttagttctgtgcagttgtgggagatatacccagaagacacaggcaaatacaacctgggtaactagctaggggtttgttcccaagtccctatcttatatgtcctggcgagctgccctaaactacgtgtgaggaataaagactgtgttctttcagctcagacctgtgattcttgagtgttttaagagtcttttaaaatctatgaaccctctttccagcaagtcgtaaatgtacagaatagttttgtgtaggttttcagggaattcatgaataccactaaagctgttccagtagactgtattgggagtcttataggataattactggcaggcttgggcaacctcttggccccattcccttagctgtgtgtcttgatkytagccctgtgaaagagtccttcactcttaagatttagagcccagatgacctttgccagccgtttaccttttttcctggggtgtcttgttgatcctgctgggtttctatgggtacaagaccctcttaaacatgaagcagctctatatttgtcgttttaaaatttattttattatttttaacaaattggccagagaccgcctttttaaaaattttctttcctttccttttcttcctttcccttctgtttccttcccttccccttttctttttcttcctttttttccttttctttcctttttcctttccttccttcctttcttgcctttcttcctttattgctttcctttcttttctttctttcacccaggctggagtgcagcmcactgtaacctcaagttcctgggcttccaagwagtgggactataggccacaccaccatggccccataatcttttttctttttttacttttttttttttttagagacgggggtctcattatgttgcccaaggatgatctcagactcctgggctcaagcagtcttcccaccttgatctcccaaagtgctgggattatagatgtgagccaccatgcccaatctttgtttttttaattggcaagtaaaaattgtgaagacttatggtgtacaacatgctgtgttgataatgtgtatacattttgtaatggttaaatcaagctctttaacatgtgtatcacctcacatacttatttttttgtggtgagaacacttgaaatctactctcagcaattttaaagtatataatatgttgttactaactgtagtcacatcactatgatgtgcaatcgatctcttgaacttactcctatctacctgacattttgcatgctttacatctccccagtctcccaacccccagcttctgagaaccaccattctacttyckgcttcwatgagtccaattttgtttgctttagaggtggtacctcactctgtcacccaggctagagtgcagtggcacaatcatggctccctgcaatctctaactcctgggctmaagtgatcctcccgcctcagtctcccaagtagctgagaccataggcgtcsgcmaccacgcccccagctaagktttaaattttttgtagagataaggtcttaycakgtgcccaggctggcctcaacctccaaagtgctgggawtgcagttgtgagccactgcactaagcctgagtcgacttttttggattccacacttaagtgagatcatgcagtatttgtctttgtatgcctggcttatttcatttaagataatattttccaggtttatctgtgttgtcttaaatgacaagatttattttgttgttgttaaggctgaatagattctgttgtatatatatgctacattatctttatctcctcatctgttgatggatacttaggttgattccctatcttggctattgtgaatagtcttgcaataatcatgagagttcagatatctcttcaacatattgacttcattttttggggatatatacctagtagttggttttatatccatctcattaataactacatgaaagacaaaaagagaaaagaagaataatccagctatctaaagtcacgaaaa

SEQ ID NO: 1241 - DNA, 4038 bp, Homo sapiens
  SITE (1764): n equals a,t,g, or c
  SITE (4030): n equals a,t,g, or c
  SITE (4037): n equals a,t,g, or c
caggaactkgcgctkaagaccctgggracagatggcctttttctcttttcctccttggacactgacggggatatgtacatcagccctgaggagttcaaacccattgctgagaagctaacagggtcaactcccgcggccagctacgaggaggaggagttgccccctgaccctagcgaggagacgctcaccatagaagcccgattccagcctctgctcccggagaccatgaccaagagcaaagatggcttcctaggggtctcccgcctcgccctgtccggcctccgaaactggacagccgccgcctcaccaagtgcagtgtttgccacccgccacttccagcccttccttcccccgccaggccaggagctgggtgagccctggtggatcatccccagtgagctgagcatgttcactggctacctgtccaacaaccgcttctatccaccgccgcccaagggcaaggaggtcatcatccaccggctcctgagcatgttccaccctcggccctttgtgaagacccgctttgcccctcagggagctgtggcctgcctgactgccatcagcgacttctactacactgtgatgttccggatccatgccgagttccagctcagtgagccgsccgacttccccttttggttctcccctgctcagttcaccggcsacatcatcctctccaaagacgccacccacgtccgcracttccggctcttcgtgcccaaccacaggtctctgaatgtggacatggagtggctttacggggccagtgaaagcagcaacatggaggtggacatcggctacataccccaratggagctggaggccacgggcccctctgtgccctccgtgatcctggatgaggatggcagcatgatcgacagccacctgccctcaggggagcccctgcagtttgtgtttgaggagatcaagtgggcagcaggagctgagctgggaggaggctgcccggcgcytggaggtggccatgtacccyttcaagaagtctcctacttgccgttcactgaggccttcgaccgagccaaggctgagaacaagctggtgcactcaatcctgctgtggggggccctggatgaccagtcctgctgaggttcagggcggactctccgggagactgtcctggaaagttcgcccatcctcaccctgctcaacgagagcttcatcagcacctggtccctggtgaaggagctggaggaactgcagaacaaacaggagaactcgtcccaccagaagctggctggcctgcacctggagaagtacagcttccccgtggagatgatgatctgcctgcccaatggcaccgtggtccatcacatcaatgccaactacttcttggacatcacctccgtgaagcccgaggaaatcgagagcaatctcttcagcttctcatccacctttgaagacccgtccacggccacctacatgcagttcctgaaggagggactccggcgtggcctgcccctcctccagccctagagtgcctggacgggatctgatgcacaggcccccacgcctcagagccagagtggtcctcagcccatttcagcactgcagatgccgcccactcccaccccactcctaggctgccttggagggtacaagatccactgagggtggccaccacagccttggctccatggtggcgggtagacaagggatgcctgggctgactgggcagaggaacctctagctctgactgtcactcggctctccctacccatttggctctggaagctgcttggccccccnagatcagggcctgggtgaactccctggacctttcctagccagccgcacagtctaggcccttgtggggtgaagaatggagggaggagcaggctaggaagacggggccaccaccctctccttgctttcagcccttcccacaggaaacatcaagaagccccagccaggaggggccaggctgccaaggcggctcccctgtttatctagagccttcgttcctggccataccccggactgccctcctgtgcctgatgtccccagctggggtcagtctcaacaggagccagtcttctggagcctctgggcagaaccctccatcagagtggaaatcagacgggaccccctgcagcttccctgaccacgccactgaccagctatctggggaagtttactgtgaaggggtttctgcctttagcaatggggttcactaagggggttcccgaggcccagggccaaggcactcccaccgcctaccttagcacagggtctctgcaggactgcgggagccagcgctcctgccgcccctcttgcccctcagaccttgcatccacagaagcacaacccagccaaacaccacagccttctccagagccggcactgtcccggcaaccaggggtgccccaggctagctcttctacctctggggcaccacggactccccttggccactcttgggactttggtccacgtcctgagccactgaccacggccagtctctctttttatatgtgcagaaaagtgtttttacacaaactttctcatggtttgtaggtatttttttataaccccagtgctgaggagaaaggaggggcagtggcttccccggcagcagccccatgatggctgaatccgaaatcctcgatgggtccagcttgatgtctttgcagctgcacctatgggaagaagtagtcctctcttccttctcctcttcagctttttaaaaacagtcctcagaggatccatgatccccagcactgtcccatcctccacaaaggcccacaggcatgcctgtactctctttcattaaggtcttgaagtcaggctgccccctccccagcccccagttctctccccaccccctcaccccacccggggctcactcagcctggcagaggaagaaggaaggcagacatctccgcagccactcctgggccttttatgtgccgagttaccccacttgccttgggcgtgtccactgagccttccccagccagtcttgttctcaattttgttttgttttgttttgagacggagtcttgctctgtcacccaggctggagtgctatggctcgatcttggctcactgcaacctccacctcccaggttcaagcaattctcttgcctcagcctcccgagtagctgggattacaggtgcatgccaccatggctggctaatttttgtatttttagtagagatggggtttcaccatattggtcaggctgatctggaacttctgacctcaggtgatccacctgcctcagcctcccaaagtgctgggattacaggcgtgagcaatcgtgcccagccttgttcttaattttgtatcatccagtcatcgctaatattacacgcaccttctcacttaatcctcacgacaagcctgtgaggcagatgctcattgttcccatcttgatgaaacttgagtctcagggaagtgaagtgacttgcccagggtcactcaggtagagttgagattcaaacccacatgtggctccaaagtctgcatctggatttgggggtgttttttggcatggcaccctcacctctctccctgcctgttttccccaaagtggaaaggaaggcctttcaaaccagagtgtctcactcccctctgacctccagaccagatggggcatgagccagccagctcagccaggctccctgtgtcctgggaggaagtgtccccatcccccatgccccttatggggagggagggcgtctgatgctctctctctgcctcccccccatcctgtcaggcacaggtgacgggggcagcccatgcgagcccttctcctgctgctctgggagggccagttccacattgagccagcctggtcccatggaaaatgatggcctgggctttctgaggccttatctgatgcctctgcagttcatgtcccccaccaggcctcgaggctcagggtgggagagggccccgggctgccctgtcactcctctaacacttccctcccctgtccccaacatgccctgtaataaaattagagaagactaaaaaaaaaaaaaaaaaaaaaaaaaaaaaaaaaaaaanaaaaaana

SEQ ID NO: 1242 - DNA, 1674 bp, Homo sapiens
  SITE (5): n equals a,t,g, or c
  SITE (8): n equals a,t,g, or c
  SITE (474): n equals a,t,g, or c
  SITE (505): n equals a,t,g, or c
  SITE (511): n equals a,t,g, or c
  SITE (606): n equals a,t,g, or c
ggcanagnatgacctttggtgaatatgtggcactaattttttttaccttaatcatattcttgtcaagtaggcaacccattgccccttggagaccacaccagccctgtaagttctcaccagcagcatggagattaggaagaggggctgctgtgaccaggagatacacacggctttaagtaactgagagcctaaagaaagtaacccagggagtccggtccagttttaatatttgtggatttgttgtcacacacattgtttagtcctgaaactaaaacctattttataaatagtagggttaattcctcgaaacaatttctttattaataaatgtcctgtgggtttagaaatatcaggtaaatatttgaatacagaatgatgattgcaattactgttacaagcgtgaaacacaaacttcagatcaaatctaaagttgctccatttaatgcatgctagcaacagccttaactttggatncagttatttgaaacactttcccggcatcttncccttnctaatgttgtggggtggaaaccggatggcaaatcactgtgagccggatacctcagcacagtccaccttgtgtgtgacttcacaaatgggggactncacaaatggggtaactgaatgttattactttcaaattttgacatggagcattatgatcaaggaaatggagctgccttatacattaaacccgtgatttaatcctattgacattttcatagccatgcctccagattttatctttttggcaaaattctgattccacagtttggtctgattgaaataaatattccctggacgtctggctaaaaattttgctaacaatcccagaggtgccattttcttattaataaatttcattggagccttatttcttactatattcaatttcgtttcaaacctgcaagtccctgggatggtcccacgactagggcctgcacatttcttacaatggcaaagcattttttaaaatttagggtcaggttgaaaaattctaggactaattctgtagagaggagggactgttaactaacgtgagtggggacagaggagtaggttaccacatttggagcagtaatagatgcaaacgatgtaaatttgaaatttgcccctttagttaaagaaggagcctgcaaagtccatttctctgttttcagccctgtcagtcacccatttaggatgttggcaaagtactgcttgagcagaatgtgtaagaaagtaataatgaaagcaaaagtatgtcagacagttacttcttccacatggttagaggcatgtgattttcagcactgtgtgttacagaaatgtcaggaatggtgtattataacgtgtgcaagataatgtcagtgtgcacagagggtcttttttccttatctgattagtactgttaatgttcaaagaataaaaatggttttacagtttagattctgagatagcaaaacctgatttttcaaccatgacctgcatgagagaagcatcctaggaagtcttagatcatacttttgagtttttaattttaatttatatagtgtttttttatgtcttaatatttttgtgaactggtgtaaattgttaatgcatataagcttgtgtatttttgtaaatagttttgtgatttatttcttgccccatatgtaaatatttagagtctcaaaaaaaaaaaaaaaaaaa

SEQ ID NO: 1243 - DNA, 878 bp, Homo sapiens
  SITE (5): n equals a,t,g, or c
  SITE (17): n equals a,t,g, or c
  SITE (28): n equals a,t,g, or c
  SITE (49): n equals a,t,g, or c
  SITE (60): n equals a,t,g, or c
  SITE (877): n equals a,t,g, or c
tcacncgggaaccgctntgaccatgatncgccargctsgaaattacccntcactaagggnacaaaagctggagctccaccgcggtggcggccgctctagaactagtgawcccccgggctgcaggaatycggcacgagctggcacacaccaccatgcacagttccttgttcaaaatgccaagaacctggatgactcatagtcaagaccctccaccagtaacatatattggcgagccagccaggagaccactacaggaaacactccatttattccacctgacttcccacttggctgcatcctcaaccattgaaatgaatttgaccctgataatctaaggaggaaacatttgatattcttttgcaataatacttggccccagtattgtttggaatctggagtttgctgttgaatgggaaagcgggatgacgttgcatgtatccaggctttggtgctgctgtcctaagaagggtcaggcctggtcagcatatggtgctctcctttggtgctatttggctccagtgtctttggagtctgaggaggtttggcctttaaaaatcaaactgccaccggaactgctttaaaaatgtttggttcacagccttcactggattacctattggagcaaacaaagtgtaaccatgtaaaacctgtgagcttgtattgatatctcatggctagagttccaaggtaaaagctattggatcttcgtttgtgtgtgtgtatacatgtctagatgtgtttatttgtatgtacacttattgttatatgttgtgtcaaccaaatcagcttataaataaaagagcactcataaattaaataaaaaaaaaaaaaaaaaaactccgggggggggcccggtaacccattccgccctaatagng

SEQ ID NO: 1244 - DNA, 1134 bp, Homo sapiens
ggcacgaggggcccagggcctcaacatgctccattctggtctactgttcccccacctcctttgcctccagcctccattgggagagctgttccccaacctaaaatggagtctaggggcactccagctggccctcctgaaaatgtacttcccttgtcgatggctcctcccctcagtcttgggctacctggccatggagctcctcagacagagcctaccaaggtggaggtcaagccagtgcctgcatctccccatccgaaacacaaggtgtctgccctggtgcaaagtccccagatgaaggctctagcatgtgtgtctgctgaaggtgtgactgttgaggagcctgcatcagagaggctaaagcctgagacccaagagaccaggcccagggagaagccccccttgcctgctaccaaggctgttcccacaccaaggcagagcactgtccccaagctgcctgctgtccacccagccccgtctaaggaagctgtccttcctgcctaccccacgtactcagggttctgaagatgtggtacaggctttcatcagtgagattgggaattgagggcatcggacctgtccagtctgctggagcagtttgagaaatcagaaggtgagggaacatgggtagttttgctccaactctttttttggtgatacttttttgggcccagccctgtagttgcttaaactagggtgagaggggacagccttagccactggagcagacccctaattgaagagagagacaagattgaactgtgacggtaatccaagccagggacggcagtgatacagtaaggaaggtattaaagagtagactgggaatccaggccaggcgtggtggctcatgcctgtaatcccagcactctgggaagctgaggcgggtggatcatgaggtccaggagtttgagaccagcctggccaacatggtgaaaccccgtatctactaaaaatacaaaaattagctgggcgaggtggcgggcacctgtaatcccagttactcgggaggctgaggcaggagaattgtttgaacccagcaggcagagattgcagtgagccgagatcgtgccattgcactctagcctgggccacagggtgagactctgtctcaaaaaaaaaaaaaaaaaaaaaaaa

SEQ ID NO: 1245 - DNA, 1260 bp, Homo sapiens
agcagacagtgcccccacctcccaccgccttgcctcactggcaatctggactcgatggagaacatccccccacctccatttggcactacccaagtggagtgtacccttgccctttccacctgtaccacccactccaacctcaccccagcttgcccaatgcttctggggaatttaatagctaccatgcaggccacagggaatttgtgaggcttcttttgtcatctttgtatctccagtttgtctttcttttctccatagccctgcctctactttccttccttggaatcaggggttcctttagcccatttgctttctctaccttggggaccccaggggccaagcagttctccatctagtcacaccaaaggcaaaaagcctggctacctcccccctagcacgtgagtccctactcccctcccctctgtttctgcccagctttgcttattttggggatttcaaggcagcagagggtagtgaggggagagcaggagaagcctctgtcctgtataggcaactgcctgactatgcggtgactgctgtaaccaagatcaggtccccagcccttttgtccattaacaccccttcttgatctttcaaaggcagctaattgctagcaaatccccccgattccggccttttccctctatttctttgttagaagttttctgtggagctgaaacccagcctctgtttgactgggtttcatttagcttagttgggttcttagagccccctgtttgttgttttgtgttgtttccaatgaaaagcaagtttaccctcagagttatgcttttccaaagaggctgatgtctttgtttttgttttttttaatgtttcaggttctaagtgaagtgagttggggaggggttgggagtgttagtaatcaaggtttagaacaccatgagatagttacccctgatctccagtccctagctgggggctggacagggggaagggagagaggatttctattcacctttaatatatttttacaaaaaaagcaaacaatttaaaaacaagcccaccgcttctgtacatgtctaaatatatttttagaagtgggtaggattgtgaatttctgatgcagggcctttttataaataggttagggtagcatcattcagacttctctgttgtttttgtccctgtctttttcttatgttgtgttactaatgtaatttatattttttttagatcctccctttcctatagagataaaagtgatttatcttggmaaaaaaaaaaaaaaaaaaactcgag

SEQ ID NO: 1246 - DNA, 1818 bp, Homo sapiens
  SITE (2): n equals a,t,g, or c
  SITE (16): n equals a,t,g, or c
gnaattcggcacgagnaaaagagtgattgtgagtgttagatatggcctttccctttcgtgcttctagccaccttgtcactgattttggaaacctcacttaacctctatgggtgggcctcaatttccatctaaaatagagaagtagggaggaattggatcaaaccagcccaagaaaatttaattaactatttcaaactctaatgaaaaatctctactttaaaaattgaaacacaaaaatgttctgggaggttctattcattgtctgctttcctacatttgccctgattacaagactgagttccttgataattgaaaccatgtctctttatctagtgccyagcatagtgccaagcacacagtgtatgcacagcctattggtatgaaagagaacacaacttcattaattctcatatctctccagttcacaccccttcatctcctgtaaaacaccccttcccctacaattatttctgttagtctctaggtgtttcttgtattcaagagtatgtccacagtttgggtgcctctgtgcattccttctatctgagcatctgccatcattggtgcctgccatgcactgctgggaacatttgacccctctgggagcatcttcctaatagatcccataaactgcaaagccttatggttaccaaaatgatggtgtatatatatacttggagccttgcaaagcccctaatgaaagtatttccttcaccagctagaagtactctcctttagcgatcagattaaaacacacacccaggtgtgtgttttaaagaaaaaggacccaagagggaaaaagtttccaaggcatgaatgaattaagagtggcaaatgctactgagatagaaagattaggacggagaaaacagcactcactctgacagtattctttccaactggatttggtaaataagagtgaagaggtacctckagtgagcactgggagaagtcatactggaagggataagcagtgattgacataagaaagtaaaataaattcaggttcatccagacacccccataatcttgccttgacccagaaacattgtgttcacaggactttcagcttcccacccccataagtaagcttcctaattatgatatcttggtcttgccaagcatttagagggccttactctgtggccctccagatagtgatttgaatgattaagtaaacctctttttagataagtgttctagtccagtctaacatcagcttgttggtctttttggcactgtcattgtccagtaccagcacattcttggctccttgccacatctctggcctcaatgtgggaggcaaagacagtgagcatttccagagtggtgagatgggtgcagcacataatgaggcgatgaccacacagcatctctgaacagcatgtccacacagggctcgaagtcattatgctgcatgtccacctcatgtccacaatagctgagcagttgagattggtggagtggaccttctcattactcatcatctarargaaggtcctcatcatctctacttctcaaaggggtagaattgaacctgaacctgcttgacagacaagagcccaagcctaaccaaggtggctgccatggtgacccttgccctgaaagccatttccattaatttaaaaattgtaggtatataggaactataataacaggcttaaaattaaaatttgctctgtttgttgggtcacacgtgtaatcccaatactttgggaggctaagccgggacgatcacttgagctcagaagtttgagactagcctgggcaacatagtgagatcccggtctctaccaaaaaaaaaaaaaaaaaactcga

SEQ ID NO: 1247 - DNA, 2154 bp, Homo sapiens
ggcacgagggcaggaatgtgggatcagcttagctggtggttctggctccaagttattcacacaaggctgcaatcaaggcgttgtctggggcttcggtctccgaagaccccaccggggctaaaggatccacttccaagctcactaatgtggctgttggcaggaggcgtcagttccttgctacatgcgcctctttgtattgctgctcatgacataacttccctggaaccagtgacccatgagagagagaaagcaaacccaagacagaagcagcagtctttgtataacctaaccacagaagtgacacgccatcacttctgccatatggttgttactggtcatacaagccaaccctggtacaatgtgggaggggcctatacaagggtataaataccgggagggagaatcattgaggactatcttagaggctgcctaccaaacaactcaagatattagcagcttaaacaagagaaaaatgtattttcctctaacgcagatatagtctatggaaacagtccaaagttgatatgatggttccatcttcatgtgagatccagacttcctccctcatctctttgccacttcatggtctaaggtggctactcaagctccagccatcacatctgcactccagccagtaggaagaaaaaagatctctttctttttacaaacacttcccagaacttgcacataccatgtctatttatattcccttggccagtaattcatcacaaggttacttccagcctgcaaaggaggctaaaaattttagtctttatttcacatgggttatgtgtccagaaagaattcagaggttctattactgagaagaaaggggggaaaatggaggtttggggataactagcaatctctgtttttgataacccaataaaggcaatgaactctttcacagaaaaaaaaaaaaaaaagaaatcatgtacatgcaaaagtgtgcatgcaacttcagagggtttacagatgcctgtgaagtcagtttatggatgtcacacaaagaacctctacacctctggccaggacctcagcctgttcctgtgtatgaacagtgttcacttagaccctttggacgaggtccctctgagagggcaaaggacacgcccagcacatttcctcaatggggcatgaaccacttcatctaatacctacgtggtaggctgtgtcaccccgggaagagtcgtcctggtgtctggcagattgtggacctcactttccttcagcgacttcatgcaaaacaagggctgataaggaagaaactgaaaggggttggtgtcacgggttatgctgcgggaccccccatttgtgttttcaagaatcagccaatagtgttcattggaattccagatcagcttttctctgctgacatttcaaatgccaggttacaagtacacaggcatggagccattctcaacactgttcaaattaaccatacttttcctagggctaaagataggtccaaggttaaaaccacaatgagataccactttacattgactagaacggctaaaataaaaaagaacaacaatgccaagtattaacgggagtgacaagcaagaggaactgtcgtctgttgctggaggtatgtaaaatagtccagccactttggaggacagtttgacagtttctttcaaagttatgcatgcacttaccataagacccacctatcccactcctgcaagagagaggaaagcatttgttcacaaaaagatttgaacatgagaccgggcgtggtggctcacacctgtaccagcactttgggaggctgaggcgggcagatcacctgaggtcaggagttcgagaccagcctggcctggtgaaatcctgtctctactaaaaatataggccgggcgcggtggctcactcctgcaaacccagtactttgggaggccgagacgggcagatcacgatgtcaggagatcgagaccatcctggctaacatggtgaaaccctgtctctactaaaaaatacaaaaaattagccgggcatggtgggtggcgcctgtagtcccagctactcgggaggctgaggcaggagaatggcgggaacccaggaggcggagcttgcagtgagccgagatcaccccactgcactccagcctgggcaacaaagcgagactccatctccaaaaaaaaaaaaaaaaaa

SEQ ID NO: 1248 - DNA, 947 bp, Homo sapiens
  SITE (423): n equals a,t,g, or c
gaattcggcacgagctttctagaggtaattactatgttcagattcctgggacctttccaggtatctgatgtataaatacctctctctctttccctctctttctaacacagatattagtattcctctgtgtcttactttatccccttaatagtatatcttggaaatcattgttttctttaaaaaaatgttttaattgaggtaagcattcattatacagtaaatgtcttgttccttttaactggctgcataccctgtcaacctatggctgtgccaacactggagagagtctgggttgagtatagtctttttgccattataaacagggttgcagtgaacattcatgtgtatacttctttgtacctatgtatgagtgtatcctggataaattcctaaaagtgacgccactggattggaggtcatttnttttttaaactttttattttgaaataattatagattcataagaagttgcaaaaacaggacagagaggccccagttgcccttcacctagtttctcccaatgatagcatcttacataacatgatacagcatggtatatcatatcaaaaccagcacattggtacaatctacaaaccttattcagatttcaccagttttacatgcccttgtgtgcatgtgtgtctgtgtctttgtggttttatgtgcttttatcaggagtagatttgtataacctcaaacaagatgcagaactgttctgtcagcacaaagatcccttgtgctacctcatagtcacaccaaacctcctctcctccttttgtcatcacggcattcctaactgttgacaagcagctaatctgttctccatctctgtaactttgttattttgagaatataattgaaatcgtatagcatgtaaccattgagatgggttttttcactcaccgtaattcccttgaagatcatccaagttgttgcatgtgtcaatg

SEQ ID NO: 1249 - DNA, 808 bp, Homo sapiens
agtccacgttctttaatagtggactcttgttccaaactggagcaacactcaaccctatctcggtcatattcttttgatttataagggattttgccgatttcggcctattggttaaaaaatgagctgatttaacaaaaatttaacgcgaattttagcaaaatattaacgcttacaatttgccattcgccattcaggctgcgcaactgttgggaagggcgatcggtgcgggcctcttcgctattacgccagctggcgaaagggggatgtgctgcaaggcgattaagttgggtaacgccagggttttcccagtcacgacgttgtaaaacgacggccagtgaattgtaatacgactcactatagggcgaattgggtaccgggccccccctcgtgtttttttttttttttttttccaggacaaaaaataaaatatttattgatctatcacagcgagacacaaaaagatgggcggggcaggaatgggaactgctctgaagttcagtggaccgagggagggatggggggtatacagtactgcatgtggggacaccccgggtggggaggagatgcctggcaccccagtctgcacagccccgcacgccctgggggagtgtaggatgggggtggaggcagggcacaggcggccatgacaggtcaaccaggttgatggtgggtgcacccagccagctagtggtgccgggcggtcaactggggacatggatggacggaccgatggatgaatggacggatgggcggatggattctacaagggcaaggtggctattcccagtgtggggtggtttctcgtgcc

SEQ ID NO: 1250 - DNA, 839 bp, Homo sapiens
  SITE (834): n equals a,t,g, or c
aagaagacattaaggaaatgtctgaagaaatggataagaacaaaaacttgttttcccaagmttttmcagagaatggtgataatcgaratgttattraagatactttgggttgtcttttgggcaggttatccttgctagastcagtagtgaatcaacgatgtcatcagatgaaagaaagacttcagcaaatactaaatttccaggtaagtaagatattatcaaaggatacgtgaccattctctaggtattcagtaatagtcagtcacgagtctgtgttacagacctggttgttgtttttctaaatgcgtaatgaagaacaagagcattgtagaaaatgaagggggttgaattaaaggattagaagctaaagattttttgctcctagaaatggaaggttgagaaaaccacccacttcaaactaaggactgaatagaattcaatcaataaaagtcaaatttatggatcattataattataatttttagttactaataccggagtttaaacacattgagaaagaatatgcmgaaaatggccgggcacagtgctcacgcctgtgatcccagcactttgggaggccacggcaggcaaatcatttgaggtcgggagtttgagaccagcttggccaacataatgcaacccatctctactaaaaatmcaaagattagcagggtgtggtggtgcaggcctgtaatcccagctacttggaggctgaggcaggaggatcgcttgaacccgggacgcagaggtagcagtgaactgagattgcaccactgcactccagcctaggtgacagagcaagactccgtctcaaaaaaaaaaaaaaaaaaaaantcgag

SEQ ID NO: 1251 - DNA, 971 bp, Homo sapiens
ggcacgagctcatgtttcctagtatatatgaagtgacatgtataaatgacatgaatgctttcaggcaaaatgtttagattgtgatttgaaaatgatgtgcatatgagaagtcgttaagatgttggccaaaacagtgtgtgtataaattgagctccattgtttatgcattttgctttgcttcctcttgcattgacccatccactttttcaagttcacaatgattcttttttgctgctgccattgaaggatgccactgatacctgtgagagggcactctttggcatttgcattctgaaagttttgcattttcttatttgtgtttactttttaagttcatccttgttctgcatgacagatatgccagggcctgcaggaatagcattaaaattctgttgttttttagataactttattagtttaagttttaaatgataaggaccgagagctacaattcctctgttttttattctgaagctgaaccacacaaatattgaaaaacaatgctttgactggagtgttatatatatttccacctaactagcttcacacaataaaatctctaaagtttaaattgcttgaacctgagaggcggaggttgcagtgagccgagattgccccactgcactctagcctgggggatagagtgaaactctacctccaaaaaaaaagaaaagaaaaataactgaggaagacagttttcacagtgggtcaggtgagcctagaattattgaatatcgtcctttaacctatagctatgactctaggttaaagctcctcctcagcttgctccagtcaagagtatctatgtatttgagccatttcctgaaaccagactctagtgtttctgatcaggaccagctcagtctttaagtttctgaagtttgtttgctattttataattatattcgtgaatactgtgcattgaagaaataataaatctattgttgctttaaaaaaaaaaaaaaaaaaaa

SEQ ID NO: 1252 - DNA, 2351 bp, Homo sapiens
  SITE (72): n equals a,t,g, or c
  SITE (141): n equals a,t,g, or c
  SITE (294): n equals a,t,g, or c
  SITE (303): n equals a,t,g, or c
attctacagcagaatatacttggaaaaactcaagtttttccacatacttggaaaaactctctagcatttgtnggaatttagtgtaattaagtgaaacctacctagcaactgtagtaattaaaagcgtggggtgtgcttttngttgagatccgtgaatgtttctgtaaacacaattttgattgtgttgcgcttcttaaaggttgtgatgacaacggtaattttaaccacttgaccgtatatcgttttcatccttgaagactgtcatatatttccaagtgtctttcctccctggtnattttaggntaaagatcgaggtccggaagccactaggagattttttaattggttttattggagcattaacctgggagcgatcctgtcgttaggtggcattgcctatattcagcagaacgtcagctttgtcactggttatgcgatccccactgtctgcgtcggccttgcttttgtggycttcctctgtggccagagcgttttcatcaccaagcctcctgatggcagtgccttcaccgacatgttcaagatactgacgtattcctgctgttcccagaagcgaagtggagagcgccagagtaatggatgcagacaacatatgttttacagagtcttcatttgaggattccagaaatttcaaatattacaaccactcctcacacgctccctgcagcctggctgaccatgtttgatgctgtgctcatcctcctgctcatccctctgaaggacaaactggtcgatcccattttgagaagacatggcctgctcccatcctccctgaagaggatcgccgtgggcatgttctttgtcatgtgctcrgcctttgctgcaggaattttggagagtaaaaggctgaaccttgttaaagagaaaaccattaatcagaccatcggcaacgtcgtctaccatgctgccgatctgtcgctgtggtggcaggtgccgcagtacttgctgattgggatcagcgagatctttgcaagtatcgcaggcctggaatttgcatactcagctgcccccaagtccatgcagagtgccataatgggcttgttctttttcttctctggcgtcgggtcgttcgtgggttctggactgctggcactggtgtctatcaaagccatcggatggatgagcagtcacacagactttggtaatattaacggctgctatttgaactattactttttccttctggctgctattcaaggagctaccctcctgcttttcctcattatttctgtgaaatatgaccatcatcgagaccatcagcgatcaagagccaatggcgtgcccaccagcaggagggcctgaccttcctgaggccatgtgcggtttctgaggctgacatgtcagtaactgactggggtgcactgagaacaggcaagactttaaattcccataaaatgtctgacttcactgaaacttgcatgttgcctggattgatttcttctttccctctatccaaaggagcttggtaagtgccttactgcagcgtgtctcctggcacgctgggccctccgggaggagagctgcagatttcgagtatgtcgcttgtcattcaaggtctctgtgaatcctctagctgggttcccttttttacagaaactcacaaatggagattgcaaagtcttggggaactccacgtgttagttggcatcccagtttcttaaacaaatagtatcacctgcttcccatagccatatctcactgtaaaaaaaaaaattaataaactgttacttatatttaagaaagtgaggatttttttttttttaaagataaaagcatggtcagatgctgcaaggattttacataaatgccatatttatggtttccttcctgagaacaatcttgctcttgccatgttctttgatttaggctggtagtaaacacatttcatctgctgcttcaaaaagtacttactttttaaaccatcaacattacttttctttcttaaggcaaggcatgcataagagtcatttgagaccatgtgtcccatctcaagccacagagcaactcacggggtacttcacaccttacctagtcagagtgcttatatatagctttattttggtacgattgagactaaagactgatcatggttgtatgtaaggaaaacattcttttgaacagaaatagtgtaattaaaaataattgaaagtgttaaatgtgaacttgagctgtttgaccagtcacatttttgtattgttactgtacgtgtatctggggcttctccgtttgttaatactttttctgtatttgttgctgtatttttggcataactttattataaaaagcatctcaaatgcgaaatmmaaaaaaaaaaaaaaaaaattggcggccgc

SEQ ID NO: 1253 - DNA, 2516 bp, Homo sapiens
  SITE (72): n equals a,t,g, or c
  SITE (141): n equals a,t,g, or c
  SITE (294): n equals a,t,g, or c
  SITE (303): n equals a,t,g, or c
attctacagcagaatatacttggaaaaactcaagtttttccacatacttggaaaaactctctagcatttgtnggaatttagtgtaattaagtgaaacctacctagcaactgtagtaattaaaagcgtggggtgtgcttttngttgagatccgtgaatgtttctgtaaacacaattttgattgtgttgcgcttcttaaaggttgtgatgacaacggtaattttaaccacttgaccgtatatcgttttcatccttgaagactgtcatatatttccaagtgtctttcctccctggtnattttaggntaaagatcgaggtccggaagccacctaggagattttttaattggttttattggagcattaacctgggagcgatcctgtcgttaggtggcattgcctatattcagcagaacgtcagctttgtcactggttatgcgatccccactgtctgcgtcggccttgcttttgtggycttcctctgtggccagagcgttttcatcaccaagcctcctgatggcagtgccttcaccgayatgttcaagatactgacgtattcctgctgttcccagaagcgaagtggagagcgccagagtaatggtgaaggcattggagtctttcagcaatcttctaaacaaagtctgtttgattcatgtaagatgtctcatggtgggccatttacagaagagaaagtggaagatgtgaaagctctggtcaagattgtccctgttttcttggctttgataccttactggacagtgtatttccaaatgcagacaacatatgttttacagagtcttcatttgaggattccagaaatttcaaatattacaaccactcctcacacgctccctgcagcctggctgaccatgtttgatgctgtgctcatcctcctgctcatccctctgaaggacaaactggtcgatcccattttgagaagacatggcctgctcccatcctccctgaagaggatcgccgtgggcatgttctttgtcatgtgctcrgcctttgctgcaggaattttggagagtaaaaggctgaaccttgttaaagagaaaaccattaatcagaccatcggcaacgtcgtctaccatgctgccgatctgtcgctgtggtggcaggtgccgcagtacttgctgattgggatcagcgagatctttgcaagtatcgcaggcctggaatttgcatactcagctgcccccaagtccatgcagagtgccataatgggcttgttctttttcttctctggcgtcgggtcgttcgtgggttctggactgctggcactggtgtctatcaaagccatcggatggatgagcagtcacacagactttggtaatattaacggctgctatttgaactattactttttccttctggctgctattcaaggagctaccctcctgcttttcctcattatttctgtgaaatatgaccatcatcgagaccatcagcgatcaagagccaatggcgtgcccaccagcaggagggcctgaccttcctgaggccatgtgcggtttctgaggctgacatgtcagtaactgactggggtgcactgagaacaggcaagactttaaattcccataaaatgtctgacttcactgaaacttgcatgttgcctggattgatttcttctttccctctatccaaaggagcttggtaagtgccttactgcagcgtgtctcctggcacgctgggccctccgggaggagagctgcagatttcgagtatgtcgcttgtcattcaaggtctctgtgaatcctctagctgggttcccttttttacagaaactcacaaatggagattgcaaagtcttggggaactccacgtgttagttggcatcccagtttcttaaacaaatagtatcacctgcttcccatagccatatctcactgtaaaaaaaaaaattaataaactgttacttatatttaagaaagtgaggatttttttttttttaaagataaaagcatggtcagatgctgcaaggattttacataaatgccatatttatggtttccttcctgagaacaatcttgctcttgccatgttctttgatttaggctggtagtaaacacatttcatctgctgcttcaaaaagtacttactttttaaaccatcaacattacttttctttcttaaggcaaggcatgcataagagtcatttgagaccatgtgtcccatctcaagccacagagcaactcacggggtacttcacaccttacctagtcagagtgcttatatatagctttattttggtacgattgagactaaagactgatcatggttgtatgtaaggaaaacattcttttgaacagaaatagtgtaattaaaaataattgaaagtgttaaatgtgaacttgagctgtttgaccagtcacatttttgtattgttactgtacgtgtatctggggcttctccgtttgttaatactttttctgtatttgttgctgtatttttggcataactttattataaaaagcatctcaaatgcgaaatccaaaaaaaaaaaaaaaaaaaaaaaa

SEQ ID NO: 1254 - DNA, 2556 bp, Homo sapiens
  SITE (72): n equals a,t,g, or c
  SITE (141): n equals a,t,g, or c
  SITE (294): n equals a,t,g, or c
  SITE (303): n equals a,t,g, or c
attctacagcagaatatacttggaaaaactcaagtttttccacatacttggaaaaactctctagcatttgtnggaatttagtgtaattaagtgaaacctacctagcaactgtagtaattaaaagcgtggggtgtgcttttngttgagatccgtgaatgtttctgtaaacacaattttgattgtgttgcgcttcttaaaggttgtgatgacaacggtaattttaaccacttgaccgtatatcgttttcatccttgaagactgtcatatatttccaagtgtctttcctccctggtnattttaggntaaagatcgaggtccggaagccacctaggagattttttaattggttttattggagcattaacctgggagcgatcctgtcgttaggtggcattgcctatattcagcagaacgtcagctttgtcactggttatgcgatccccactgtctgcgtcggccttgcttttgtggycttcctctgtggccagagcgttttcatcaccaagcctcctgatggcagtgccttcaccgayatgttcaagatactgacgtattcctgctgttcccagaagcgaagtggagagcgccagagtaatggtgaaggcattggagtctttcagcaatcttctaaacaaagtctgtttgattcatgtaagatgtctcatggtgggccatttacagaagagaaagtggaagatgtgaaagctctggtcaagattgtccctgttttcttggctttgataccttactggacagtgtatttccaaatgcagacaacatatgttttacagagtcttcatttgaggattccagaaatttcaaatattacaaccactcctcacacgctccctgcagcctggctgaccatgtttgatgctgtgctcatcctcctgctcatccctctgaaggacaaactggtcgatcccattttgagaagacatggcctgctcccatcctccctgaagaggatcgccgtgggcatgttctttgtcatgtgctcrgcctttgctgcaggaattttggagagtaaaaggctgaaccttgttaaagagaaaaccattaatcagaccatcggcaacgtcgtctaccatgctgccgatctgtcgctgtggtggcaggtgccgcagtacttgctgattgggatcagcgagatctttgcaagtatcgcaggcctggaatttgcatactcagctgcccccaagtccatgcagagtgccataatgggcttgttctttttcttctctggcgtcgggtcgttcgtgggttctggactgctggcactggtgtctatcaaagccatcggatggatgagcagtcacacagactttggtaatattaacggctgctatttgaactattactttttccttctggctgctattcaaggagctaccctcctgcttttcctcattatttctgtgaaatatgaccatcatcgagaccatcagcgatcaagagccaatggcgtgcccaccagcaggagggcctgaccttcctgaggccatgtgcggtttctgaggctgacatgtcagtaactgactggggtgcactgagaacaggcaagactttaaattcccataaaatgtctgacttcactgaaacttgcatgttgcctggattgatttcttctttccctctatccaaaggagcttggtaagtgccttactgcagcgtgtctcctggcacgctgggccctccgggaggagagctgcagatttcgagtatgtcgcttgtcattcaaggtctctgtgaatcctctagctgggttcccttttttacagaaactcacaaatggagattgcaaagtcttggggaactccacgtgttagttggcatcccagtttcttaaacaaatagtatcacctgcttcccatagccatatctcactgtaaaaaaaaaaattaataaactgttacttatatttaagaaagtgaggatttttttttttttaaagataaaagcatggtcagatgctgcaaggattttacataaatgccatatttatggtttccttcctgagaacaatcttgctcttgccatgttctttgatttaggctggtagtaaacacatttcatctgctgcttcaaaaagtacttactttttaaaccatcaacattacttttctttcttaaggcaaggcatgcataagagtcatttgagaccatgtgtcccatctcaagccacagagcaactcacggggtacttcacaccttacctagtcagagtgcttatatatagctttattttggtacgattgagactaaagactgatcatggttgtatgtaaggaaaacattcttttgaacagaaatagtgtaattaaaaataattgaaagtgttaaatgtgaacttgagctgtttgaccagtcacatttttgtattgttactgtacgtgtatctggggcttctccgtttgttaatactttttctgtatttgttgctgtatttttggcataactttattataaaaagcatctcaaatgcgaaatccaaaaaaaaaaaaaaaaaaaaaaaaaaaaaaaaaaaaaaaaaaaaaaaaaaaaaaaaaaactcga

SEQ ID NO: 1255 - DNA, 2127 bp, Homo sapiens
  SITE (72): n equals a,t,g, or c
  SITE (141): n equals a,t,g, or c
  SITE (294): n equals a,t,g, or c
  SITE (303): n equals a,t,g, or c
  SITE (1938): n equals a,t,g, or c
  SITE (2045): n equals a,t,g, or c
  SITE (2117): n equals a,t,g, or c
  SITE (2121): n equals a,t,g, or c
attctacagcagaatatacttggaaaaactcaagtttttccacatacttggaaaaactctctagcatttgtnggaatttagtgtaattaagtgaaacctacctagcaactgtagtaattaaaagcgtggggtgtgcttttngttgagatccgtgaatgtttctgtaaacacaattttgattgtgttgcgcttcttaaaggttgtgatgacaacggtaattttaaccacttgaccgtatatcgttttcatccttgaagactgtcatatatttccaagtgtctttcctccctggtnattttaggntaaagatcgaggtccggaagccacctaggagattttttaattggttttattggagcattaacctgggagcgatcctgtcgttaggtggcattgcctatattcagcagaacgtcagctttgtcactggttatgcgatccccactgtctgcgtcggccttgcttttgtggycttcctctgtggccagagcgttttcatcaccaagcctcctgatggcagtgccttcaccgayatgttcaagatactgacgtattcctgctgttcccagaagcgaagtggagagcgccagagtaatggtgaaggcattggagtctttcagcaatcttctaaacaaagtctgtttgattcatgtaagatgtctcatggtgggccatttacagaagagaaagtggaagatgtgaaagctctggtcaagattgtccctgttttcttggctttgataccttactggacagtgtatttccaaatgcagacaacatatgttttacagagtcttcatttgaggattccagaaatttcaaatattacaaccactcctcacacgctccctgcagcctggctgaccatgtttgatgctgtgctcatcctcctgctcatccctctgaaggacaaactggtcgatcccattttgagaagacatggcctgctcccatcctccctgaagaggatcgccgtgggcatgttctttgtcatgtgctcrgcctttgctgcaggaattttggagagtaaaaggctgaaccttgttaaagagaaaaccattaatcagaccatcggcaacgtcgtctaccatgctgccgatctgtcgctgtggtggcaggtgccgcagtacttgctgattgggatcagcgagatctttgcaagtatcgcaggcctggaatttgcatactcagctgcccccaagtccatgcagagtgccataatgggcttgttctttttcttctctggcgtcgggtcgttcgtgggttctggactgctggcactggtgtctatcaaagccatcggatggatgagcagtcacacagactttggtaatattaacggctgctatttgaactattactttttccttctggctgctattcaaggagctaccctcctgcttttcctcattatttctgtgaaatatgaccatcatcgagaccatcagcgatcaagagccaatggcgtgcccaccagcaggagggcctgaccttcctgaggccatgtgcggtttctgaggctgacatgtcagtaactgactggggtgcactgagaacaggcaagactttaaattcccataaaatgtctgacttcactgaaacttgcatgttgcctggattgatttcttctttccctctatccaaaggagcttggtaagtgccttactgcagcgtgtctcctggcacgctgggccctccgggaggagagctgcagatttcgagtatgtcgcttgtcattcaaggtctctgtgaatcctctagctgggttcccttttttacagaaactcacaaatggagattgcaaagtcttggggaactccacgtgttagttggcatcccagtttcttaaacaaatagtatcacctgcttcccatagccatatctcactgtaaaaaaaaaaattaataaactgttacttatatttaagaaagtgaggantttttttttttttaaagataaaagcatggtcagatgctgcaaggattttacataaatgccatatttatggtttccttcctgagaacaatcttgctcttgccatgaanttgaaaaggctggtagtaaacacatttcatctgctgcttcaaaaagtacggggctttttggcccaaaagccntccntacggg

SEQ ID NO: 1256 - DNA, 1105 bp, Homo sapiens
ggcacgaggaacagaaaccagagcacagaaaatctttaatgttcagactgcatcacagtgcttccgatacaagcgacaaaaatcgagttaaaagcagattaaagaagtttattacccgaagaccttccctgaaaactctgcaagaaaaaggacttattaaagatcaaatttttggctctcatctgcacaaagtgtgtgaacgtgaaaattccacagttccgtggtttgtaaagcaatgcattgaaggctgttgagaaaagaggtctagatgttgatggaatatatcgagtttagtgggcaatctggcaacaatacagaagtttaagatttattgtcaaccaagtcgtttctggaataccagcccttctatcagaactggatggagacctgtggacacccctaagtaagctgcagatttttcacagtggtcatttgacctccagagcaagccaataatttgtcacttcattaaactgaagagaagctgaatttggacgacagccagtgggaggacatccacgttgtcaccggagcactgaagatgtttttccgggagctgcctgagccgctcttcccttacagtttctttgagcagtttgtggaagcgatcaaaaagcaagacaacaacacaagaattgaagctgtaaaatctcttgtacaaaaactccctccgccaaatcgtgacaccatgaaagtcctctttggacatctaactaagatagtggccaaagcctccaagaacctcatgtccacgcaaagcttggggattgtatttggacctacccttctgcgagctgaaaatgaaccaggaaacatggcgatccacatggtctaccagaaccagatagctgagctcatgctgagtgagttcagtaagatcttcggctcagaggaagactgacagacaagacaagctactgaatacgttcacatctgtcttgatgcctaatatttttacatttctgtaaacatatttctgaaatattttttgcctttcaagcgacagatgcctcattttgtgaaaacttaatgatgattttgtgtttaagttccaaacatttgaataaaataattgacaataaaaaaaaaaaaaaaaaaaaaaaaa

SEQ ID NO: 1257 - DNA, 1274 bp, Homo sapiens
ggctgatctcaaactcctgarctcaagtgatctgcctgcctcagcctcccaaagtgctgggattacaggcatgagccaccgcgcccggcctgaaagcattttagaaggctcctgactgaaagaacgggataaagtaagggggtatgggaacagaagatgacagcctggtatatctgggtgacatgcgtaggcagtctgttgtagtggcaattgtcagggctctggagttagactgtcttctttcaaatcttgcaagctgtctgatctcgggcgatttacttaacctctctgagagttctgtaaagtggagaataagaataccaccctacagatgatgaggattcaatgagattgggctggatacaaatcagcttttgttggcatcagcttgagaggagggatggacttgggagtggagagggtggatttgggggagaggacgccacacagtggcaggaactcgcagcaggtgactgagagtggaaggcacaagagagcccagatgctgagccagctcagaatagaaacggtattgatagcagaatgcaaagcagtatcactcgaatgacggatgtttaattggatttctccagggctgactcttcattgtcacctaccctggcataccacacccattcctaatatttgtctcagctcccccttctctctragtgcctggaatcttttcctgacccctccaagttgtgccctcccctgtaagttgcatctcgatttgagcagccttctcccagactatcctgatctctgtcttccttgaactccagtcactggctggagctttcacagtcccagtcgagagcatgggctcagatcagactgcccgagttcaagttcctaccacttactctgtgacgttgaacaagttctttatcctgtctaagagataataataatagtccttacctcatagagttgctgcaagagttcactgagatgatttgtgtaaaatgcttaatccagagcctgacaccaatcatatgaaagcattcaataagtactagcaattatacttctgtattgkttgatgtttttatagtgagaccatatttatgtaatatttgtataattttttaaatagaccaagctgggtgtggtggtatatgcctgtgttcccagctacttgggaggctgaagcaggagaatcgcctgaacctgggaggtgaggttgcagtgagccaagatcccgccattgcactacagcctggacgacaagagcgaaactccatctcaaaaaaaaaaaaaaaaaactcgag

SEQ ID NO: 1258 - DNA, 1491 bp, Homo sapiens
ggcacgagattcagagcaacagcgggctatggcgccccggcgcttgcaccaacatcaccatgggtgtcgtctgcaagcttcctcgtgctgagcagagcagcttctccccatcagcgcttccagagaacccagcggccctggtggtggtgctgatggcggtgctgctgctcctggccttgctgaccgcagccctcatcctttaccggaggcgccagagcatcgagcgcggggcctttgagggtgcccgctacagccgcagcagctccagccccaccgaggccactgagaagaacatcctggtgtcagacatggaaatgaatgagcaacaagaatagagccaggcgcgtgggcagggccagggcgggaggagctggggagctggggccctgggtcagtctggccccccaccagctgcctgtccagttggcctatggaagggtgcccttgggagtcgctgttgggagccggagctgggcagagcctgggctggtggggtgccaccctcccacaagggctgggctgagacccagctgagtgcagcgtggcgtttccctttctgggggggcctgaggtcttgtcacctggtcctgtgcccccacaggaaccagaggtaggatgggagggggaacgagagcctctttctccccagagcccccggcccaggcctgttgatccgcgccccaggacccccttctttgcagagcccgaggagcctcccctgtcccctcgggcagatctgttgtgtctctcttcccacctggcagcctcagctctgtgcccctcaccctgctccctctcgccccttctctcccaccccttccttctgagccgggccctggggattggggagccctcttgttcctgatgagggtcagctgagggggctgagcatccatcactcctgtgcctgctggggtggctgtggggcgtggcaggaggggcctaggtgggttgggcctgagaaccagggcacgggtgtggtgtctgctgggctggagataagactggggagagacaccccaacctcccagggtgggagctgggccgggctgggatgtcatctcctgccgggcgggggagggctctgcccctggaagagtcccctgtggggaccaaaataagttccctaacatctccagctcctggctctggtttggagcaaggggaagggttgccagagtcctgggggccccagaggagcaggagtctgggagggcccagagttcaccctctagtggatccaggaggagcagcacccgagccctggagtggcccagtacccttccaagaggccacagtcccagccaggacaaagtatgcggcccatcctggtgcgacagcgtgggacaatgtgaacatggactcgaagacatggccctttctctgtagttgattttttaaatgtgccattattgtttttaaaaaaaaaggaaaaaagaaaagcaaacaaataaaacacctttaagaggcttgaaaaaaaaaaaaaaaaaa

SEQ ID NO: 1259 - DNA, 3045 bp, Homo sapiens
  SITE (128): n equals a,t,g, or c
  SITE (141): n equals a,t,g, or c
  SITE (739): n equals a,t,g, or c
  SITE (770): n equals a,t,g, or c
cccagaattgtccctccaaagcccccaccccataaaagccattgtcctcctcctccgacccttctggtatccttgttaagagagccttttccactgtgaggaagtgtggaaaaatagcctctgtgtgngtgtgtgtgtgtntgtgtgtgtgtgtgtaatctgttaggttggggataggttttctgctagccaatattaaaagagacctgcaataaaaaaattaccctgatctgatagaaagcaagtgtttttgtatgtgtgggtgaatgtgtgttcatgcccgtatatgtctacacacagatgacaaattatatttgaaatcgttggaaaataaattcagatcaaaatgcctttcaggcccattacctagaaatctatcttaaaacctgggtatgttcctaaggtcatttctttgcttatgctaaattaattacaattatgaatggaggatattctactgtacttttttaaaaagaaactatttttgtgtttgaaagtgaaaccaacatccagatctatagcagagtccttattcttctcataaatctttttactttggctacaaatagatgatggtatgattctattatatatttwatataaaatccatccaaattaagttttgggtaagtgtgttgtttaatctgaactatagtaacttaatactctaaacaatagttcactccatttggtcctttctccacagatgtaattatgttttcaactcaggaactatggncaaggaactttccccagatcaaattcyattnaacgctgagatacaagtcatccatgcacagccactatcataccctttattctcactgaaaggcagaactcagaacctgttattttatgtctgtaatcatgtactttggcatcttttggaggaaaggggcaggataactcactggaatgtacagtattttgctagtgcatttcaaggaatggaatcttctccagtaacaacccacaccgtcttccttcagggatttccaactggcactctgtgggtgctacacagaatgcaatttaatggatatttctcagcctggttcagaataaattgatcctttgatcccagaaagtatatactgaagtgtgggataaagattatgattaggggagggttggagacaaaagctgtaaattactatggctgatttatttctactatatacatatatattttttgcttttgtatatcctatataggaaactaagcattgtattttttttaacaaatctaaaaaagcactatgaactacaggtgtttgactttcaaaatatattttgtattgttaatatcttcacattgtgtgaatactggaagctgcagatctttgctaggacgcaataaatttatatactttttgaggggttcttctggggtgctaatcaggcccctgttatgcttagggggagccctggtgctacttgcttgaagttttcagtgtaagtaccctgatgccttttggaccttgggatcagatcaagagttttggagatcaggtaccaaggaaataaggacagtctagctgcctcaagtgaggggccctttgcatagctctccttccccctcactgaagctgggtagcctattggggttgagagggaaaatgtgaaatctcagaatttatctcccttagaagagagccagtaacttatgtacaaggatgaaagaaaggtcgcagcagtagctttggggaaagggaggaagatatggcacttctccaaccccggaaaacattgcttttgaaaactgctgataaaatatgagccggttattacttctgtttgggagactgtgctctctgtggtgcctctcttggctctactccacagataccagacctcttctaagaggatgagcagaccagctttgaggttgacctgtttctctttgtctgccttcccaaaacaccagcccccaggaagacattaagcagccttaagcttaaattcctactccctcttccaaatttggctcacttgccttagatccaaggcagggaaaggaaaagaaggggggtctctggctttattactcccctaagtctttactctgacttccccaaacccagaaagattttctccacagtgttcatttgaaagaggagtattttgtcccattttccccttcctcattatcaaacagccccagtcttccttgtctctgctaagaaagtagaggcatgatgatctgcctctcaactgccctaagtcctagctaagtatcaggggaaaaaaaaaaaaaaaaagcctaacaaatgggattagactagggctgcaagtagtgaggattttgttgatacctctgctgggatgtgtgctttcccatatcttgccttcaggaattacactgtgccttttccccagggatatgggctctgtctacccagtgctccagtttcccggtaactgctcttgaacattgtggacaagggcaggtcttcatatttttgatcatccctttctcccagtgaaatcccatagcccttacctagagtctagggcacaaagacttcggggaagatacactgagattgacctgaggagacatctacacacaccagtggcagctgccccagggcctgcttccccttcctaagtctgtcatcctctggaagggatgggtggtgctccaatctctggtgcctaaaaacccaagtttatttctctcttaacactggcaataaccagtccacaccactgttgccttttaaaacctcttaataatctcatgctgtgtttgttttgattccaatccaattatcaccagggctgtgtgggtaaatgcttttaaatgctctctcatcttgktcttccccctcaccccccactcttaggtatgtatgatgctaatcttgtccctaagtaagtttcttcctgctccttttgtatcttcctttcttgtctttcctcctaccttttgtctcttggtgttttgggacttttttttttttttttggccttttgtacaaagattagtttcaatgtagtctgtagcctcctttgtaaaccaattaaaaagttttttaataa

SEQ ID NO: 1260 - DNA, 880 bp, Homo sapiens
ggaaggagtcagatgggtatttaaggagtttgcaaccctcgtgtcctgctgtcctggacaatgctctgtaggtgcttcctctgccaaaaaggaactggtggccttgcctccctctcctggacacctggggtcaaaggtcactgccaaatagacagctagaactggggttcacctaagcatcccttgagatgtacaaccttctaggaggacattcctcctgcctgcccccctccccgcaagaggtcttttcaggaataactgaaaaacccatggggtttgtggtcctgctgctctgccaagtccctcttgggcagctgggctgaggactggaacattctgtggcaagcaggaggcctcagcagagatcaccaagacccagcacacctggtgcagacagccacggcatcctccttcctgcaggtcacccccacgagccacttaacctctcagagcctctgcttctcacctgtcaagtgtgtgaggtagggtaccagttagtcacggtacttgctgtctcacagaggagccgacaggtgagaacagtgtgcatgtgggtgtgaacactcagtgtggaaagcaggtgtgtgtgtattcaatcccccaatggtgtcaagggctcctcaaaatgccatgggtccccaggtcattgtgataaacactgtccccatcctgctgtggttgtggctggaaggtccctcaaggagtagactgtccctgagaacaagatggatgcagggtagtgacgagttcaagcatagctagagttactgttttttagcaactcaacctgattttttaagctgcctacttttactttttactgtgagcttctgtccatcaccatgtaatttgtaataataataaaaaaaaaaaaaaaaaa

SEQ ID NO: 1261 - DNA, 1154 bp, Homo sapiens
aagctgtctatagctgcttcctaaacgttttacctccacatcatgattctctgtgggctttctttcctggttctattactgcgtactgatggtggtgtggtacctatttcagattgtttcagcagtgagctgcatccataaagctggaatccttcatagagatataaagacattaaatatttttctgaccaaggcaaacctgataaaacttggagattatggcctagcaaagaaacttaattctgagtattccatggctgagacgcttgtgggaaccccatattacatgtctccagagctctgtcaaggagtaaagtacaatttcaagtctgatatctgggcagttggctgcgtcatttttgaactgcttaccttaaagaggacgtttgatgctacaaacccacttaacctgtgtgtgaagatcgtgcaaggaattcgggccatggaagttgactctagccagtactctttggaattgatccaaatggttcattcgtgccttgaccaggttcaagagccactgccctaactgaacaagtgaggaagatgcattataaacattctccttcatgtacaagtgttgattataatgaggatcctgagcagagacctactgcagatgaacttctagatcgccctcttctcaggaaacgcaggagagagatggaggaaaaagtcactctgcttaatgcacctacaaagagaccaaggtcaagcactgtgactgaagcacccattgctgtagtaacatcacgaaccagtgaagtctatgtttggggtggtggaaaatccaccccccagaaactggatgttatcaagagtggctgtagtgcccggcaggtctgtgcagggaatacccactttgctgtggtcacagtggagaaggaactgtacacttgggtgctctttttttctactgtttttcttcatatgaagttccattaaagatcagcttttggcatgaaaaattaaaacttcataagacctctcagccggggatggtggttcatgtctacaatcccagcactttgggaagccgaggcaggaggatcacttgagcccaggagttcaagaccagcttgggcaacatagcgagaacccatctctttaaaatttaagtttaataaaatgtaattaaaaaaaaaaaaaaaaaa

SEQ ID NO: 1262 - DNA, 1124 bp, Homo sapiens
agaccttattaaaagcttcaagatgttagcctttatctgttccatatctagcttacttggttgtttttgggggatcacatgtctgtcctccaaactggaaacgtctaactctccaggagatgcagtagcattatttgttggacagtggcacctactggtagtttgtaatgtttatagcctagtgtgaaaggcattgtaaatgtatacctagcaaaaaggggagtagagcaaaatttccagagttttacaaatgaaatgaaggatgatatgggggagagtcctttggggccaaggagagagagcacagactagaaagtaatacaagcagaaagaaggatgtcagcccatgtctgtgtggtagaggtcatctttccatctcactgggattgtccctgaaagtgtctcactgcttaggtctccttgcctgtctaaggcttggagaccttccagtatctcatgccttattctagatctgcttttttccccgaggtgaaaaaacctgttcaaatggtcactcacaacttttgtggccttactttttgtctccgaaaggacaaacatatcagaactaacatccacccagaagaagggctgatcagttcctttcaacacagcatggatgaaaacccaggttagcgttagtgcttcttgaattggaagtattctaacctctatgtacctaccaatgtaagaactgagggcccttttaagggaacttacattcctaaagttcaagtcaagttgtcatgaagagtacttaatgaggcatacttttaatctttgaatcgtagtgttgtagggctaaaagaaacctcaggccaggctgcatggtgctcacgcctgtaatcccagtactttgggagaccaaggcaggctgatcacctaaggccagtaatttgagaccagcccaaccaacctggtgaaaccctgtctccactaaaaatacaaaattagcctggtgtggtgatgcatgcgtgtaatcctaactactcgggaggctaaggcagaagaattgtttgaacccgggaggcggaggtttcagtgagccgagatcatgccattgcactccagcctgggtgacaggagccaaactccgtctcaaaaaaaaaaaaaaaaaaaaaaaa

SEQ ID NO: 1263 - DNA, 816 bp, Homo sapiens
  SITE (720): n equals a,t,g, or c
  SITE (735): n equals a,t,g, or c
gacacgaggtcactccaaaaagaaaccctgtacccactagcagtcacccatttcctccatccttccccatccccagccctaggcaaccatctgttttctgtctctacagatttgcctattcaagacatttcatataaatggaatcatacgatatgtggtcctttgtgactggtgtctctcacttaacatagcgtttttaagatccatccatgttgtagcatgtatcagtactacattccacttcattgtttaataataataataataatagttcattgtatgggaataccacgtttgtgactggcttctctcacttagcatagtgtttttaagatccatccatattgtagcattatcagtatacattccacttcattgtttgaataataataatacttcattgtgtgggtataccacatttatccatttatcagttgatggatatttgagctgtttccactttttagcaattatgaataatgcctcatctaacactttgattatactttttattatcatatgtgtggcttcaggtttttgtttggttggttggttttgcctgtgtctgtttttatcacttgattataaacttctggaaaaagatcattattttcactctgaaatttccatacagcaagtattcaataagtgtttggcagatggatgaatgggcagatattataggttcttaccatgttgattatgaagaagtacaaagtnttcagaataaaaacnctaagcacagtaataaaaaaaaaaaaaaaaaaaaaaaaaaaaaaaaaaaaaaaaaaaaaaaaaaaaaaaaaaaaaaaaaaa

SEQ ID NO: 1264 - DNA, 1232 bp, Homo sapiens
ggcagcctgatgggaggagctgtcaggtccgggacctttgcaatggcgtggaccatggctgtgagttccagtgtgtgagcgagggcctctcctaccgctgcctgtgccccgaggggcggcaacttcaggcagatggcaagagctgcaaccggtgccgggaaggccacgtggaccttgttctgctggttgatggctccaagagcgtgcgtccacaaaacttcgagctagtgaagcgcttcgtgaaccagattgtggacttcctagatgtgtcccccgagggcacgcgggtggggctggtgcagttctcgagccgcgtgcgcaccgagttccctctgggtcgctacggcaccgcagccgaggtgaagcaggcggtcctggccgtggagtacatggaacgcggcaccatgacagggctggcgttgcggcacatggtggagcacagcttctccaaggcgcagggtgcacggccccgtgcccttaacgtgcctcgtgttggcctggtcttcacggatggccgctcccaggatgacatctcggtgtgggcagcgcgcgccaaggaggaaggcatcgtcatgtacgccgtgggcgtgggcaaggcggtggaggcggagctgcgcgagatcgcctcggagccagcggaactgcacgtgtcctatgccccggacttcggcaccatgacgcacctgctggagaacctcagaagcagcatctgtccagaggagggcatcagcgcagggacagagcttcggagcccatgcgaatgcgaaagcctcgtggagttccagggccgcacgctgggggcgctcgagagcctgacgctgaacctggcccagctgacggcgcgcctggaggatctggagaaccagctggccaaccagaagtgagggtcacggacggcccagacccgggctggggcgcggcaccacggacggtgccccttgcgcgccatcggtgcgccggggccaggcagaacctgggcccgtccggcttgggctgtcggggcggaggcgctggcgggcttccggcattgagctgagttggcctcgcccggaccattaggcggactgcggcgtcagggggatagcgggtggtgagggaaggggcacgtgctagaccggcacgccctcgccgcgtgtgcgctcagttctttgttggatttcttgtttgtgttcttaaaaaaataaaaaaaactgatttccaaaaaaaaaaaaaaaaaaaaaaaaaaaaaaaaa

SEQ ID NO: 1265 - DNA, 854 bp, Homo sapiens
ggcacgagaagattagttggaatttttgagaaccaggagaggaagcacaggacgtatgtctatgtgctcattgtcactgaagtgctggaagactgggaagattcagttaacattggaaggaagagggaatggtttaaaatagaagacgccataaaagtgctgcagtatcacaaacccgtgcaggcatcatattttgaaacattgaggcaaggctactcagccaacaatggcaccccagtcgtggccaccacatactcggtttctgctcagagctcgatgtcaggcatcagatgactgaagacttcctgtaagagaaatggaaattggaaactagactgaagtgcaaatcttccctctcaccctggctctttccacttctcacaggcctcctctttcaaataaggcatggtgggcagcaaagaaagggtgtattgataatgttgctgtttggtgttaagtgatggggctttttcttctgtttttattgagggtgggggttgggtgtgtaatttgtaagtacttttgtgcatgatctgtccctccctctaaccacccctgcagtcctctgaagagaggccaacagccttcccctgccttggattctgaagtgttcctgtttgtcttatcctggccctggccagacgttttctttgatttttaattttttttttttattaaaagataccagtatgagatgaaaacttccaataatttgtcctataatgtgctgtacagttcagtagagtggtcactttcactgcagtatacatttatctacacattatatatcggacatataatatgtaaataaatgacttctagaaagagaaatttgaaaaaaaaaaaaaaaaaaa

SEQ ID NO: 1266 - DNA, 2092 bp, Homo sapiens
ggcacgaggcaatttgaagcaatatgtgggaattagtgacttaacaaaagactacacaaacatgaggatggcctttatttttaaaaggagctttaaacaaaaatgcctttctttaagcttaatttttataatatcttgcatatatctttattatcacattgttattgttacatgcactggtgttttctctctggattaagattgccatctttatataaaatggaatacatgattattccatcacaactagtgataataaaaacagctaatgtttgttggcacatctgtgccagcactattctaaatgcttaattttaatcatcacaacaaccctatgaggtagatattgttatccctgtttttcagatgaggaagccgaggcagagagaacttaagttgctggcccaaggacaaacagctagtagacagcagtcaaggcagcgtggctccatggtgatgtgcttggtcagagatctgaatatataggacttagatttgtagactattgagctgtagactcatttagacaaatggtaccaagatattttagtagataaaattctaggttagtagaacatagaccacatgttataagctgatatcagttgatggaagaaaaatggttttacaagttattttcaggatctctatcaaacctttacttctccctctaattacagatcccacttccagccgggcccctcatgtatccactggccgaccgcagagtgtccctacctcctctccagagcatcattcctttctatctgctgccagagccacggtgccatttactccaaggactcactttctaaaattccacacctggagtgacctctagtcgctcagcatccactttgtgtctccaaattgtgtaggactctgtaatcttttgattagtttctgagaaaacacaatgaagcacttcacttttttttattcaaagccatttaataaaacacagttggtcagcccagtgcaaagcttgtatctgccaccagtacataccattggttctcttcattccttgggccagcttctcaggtggctttagacctcaacaagccgtatcttcaccagtgttctatcttgttcccctaaattaataaaatgtttttctccaggattttggtgagggttggctgtggctgtcgttttgcacctcccagatttcaaagaattactggttttaccatgactcaaatcttaagatctgtttctactattcagttcctcaaactgaagcttattgaaaaaaaaatgtataatgttatttgttttattatagcaattattcctaattaaagcagtatttaatgcaatttccagttatttctttggagaattttatgtcattgttccattaccttgaatgttggaaagatatgatacgtgctgcttgttcatcacaaaaatcagtaagcacaataaagtggatgccaaaccatcagacacataaatgttcccgctgtgtccctggatatggaataagcaggtataaaaaatattttaattatagttttgttataaatataacttatgagaaaaaaatttgataggaataatactgtatattactaatttttaactatccctaaggcaaaccttatgacccacagaattttctcatatacagtattcagtgcacagaaatcttatgattggctcaagtacagtaagttacttctcagtaaaactctcaagtctgagtccatatttgtagctctgcttttggctgtacgttcctaggatcggggctgcttatgcctttcgtttatccttggggtttgagagcgctgtatttgggagagagtttaaaaatacattaggagagagaaaccattaaaagtttcactgtcagagatattgtaggtgctaatactggatttcgtctcagatttaatttcttttatgggtctgttagtcattcaacaaatcccataagtatgtgttaatattttaattgtgtaaaactcatttgttactttacagcctgtaatagtgtgtctgcattttcaacctgttgcaataactttgctgaaatattaacacattaataaaacttttcttaaacaaaaaaaaaaaaaaaaaa

SEQ ID NO: 1267 - DNA, 1352 bp, Homo sapiens
ggcagagaaatcattgagtgtaaatagtcagatgaagaatgtatattctgtttttaagctcagtgttaatcatgggtgcatttttaaaactaatttcttattttcccatttacatatgatgaaactcactgattttggcatacagctatatgagtattgacaaacagtcctagtcctgcaaccatcaccacagattaggaacatttccatcacccctagaaattccctcgtgcccctttgtagtcattccctgcatctgggcaactaccaatctgtttgctgtccctgtggtttctaggcattattggaaacctgttttgtttataaccccttttcacctcctcttctgtgttcctytctgagcctacagtctctgttttcctgctccacacacaagtcggcctgctttattatcccaacactcctcctcctggggtagaatttctcacatcctcaatgagatggagcttggctgaatgtgagggaaggaatctgttttaatgtttgcctttggttccttgctttgtatttagagaatctgtttagttccccagatgaatctctgtttttagggattgtgacagttttaacataggtggaaatgaaagatcactggtgcagggcgacgagcatgtttgacactgatacttttccaattcctgggtattttgaaggtccagagggagccaacctgttcatctaccacctgccaggagtttggtgatcaggacctgctgcagatgtttatgccctttgggaatgtcgtgtctgccaaggttttcatagacaagcagacaaacctgagcaagtgttttggtatgttggcttctctctggtgtcaggatgggattagtattttaccactgagaaagaaggagctcactgcagaaagatctgaatatgagtttgtggtgttgttttaacttggccatgggcaggtcattatgacctctttttgagccccagtttctcattgctgtagtggaggtaaggatttctacccacactgttgctccagagagaaaaataatatatggaaaatggtttgcaaaaaaacctttaaacagtccaggtttgtgcctgtaagtcccagtacttggggaggccaaggcaggaggatcgcttgagcctaggagttcgagaccagcctgagcaacagagtgagacctcatggctacaaaaaattagtcagacgtggtggcgtgtacctgtgttcccagctacttgaggctgaggtgagaggatcacctgagcccaggaggccaaggttgcagtgaaccatggtcacaccactgtactccaccctgggtgacagagcaagaccctgtctcaagaaaaaaaaaaaaaaaaaa

SEQ ID NO: 1268 - DNA, 1658 bp, Homo sapiens
attcggcagaggttgatcaatgttaggaagcttgctaatgacactctcatccagaacttttggagagtagggagaaactaacaaaataacagagagccgaggaattccacttttactaatcattcattttgaataatctcacttatttactcagtaaatatatgttgcttgcttaccatatatttatttcagtaagtatatgtcgcttgctgggtcctggtaatgacagtggtgagtttccttcccttgttagtgggatctacagccacctataacttaagattctcccccacacagcccagacatacacacaacgctaagatctgaatgcctgtgcccccaaaaattcataagttgaaatcctaacccccaaggtgatgtgaaaaatgtaccaaaccctgtccagaattttggaatcgcctcccagatactttatctagagactctttgtyctacttccccacaagtttttcattccagtatttaatcattgagtgtttctgcttgtgatacttgttgcaaagtcaatgatagtcaaagaagttcaaaaattggttactttggacttaacaagcaaatgcacttctaggtggcttttgaaaaccaaaagtacacctaagtagagagcttctgttttttatagtgattatatgaagagtaatgggtgaaaagcatcaaagctggaattggagctctggggtctacaccgtttccaatgaatcattcctaatgtgatgctttcatccatgctcttggctctgtctgggatgtctcctctccgccaggccctgatttcagtcatccaggccgagtttaattatgtataactgtcttcgtttatttggggcactaaaacaaaaataacaaaaatactatagactgggtgtcctaaacaccaaaagtttattactcacagttctgcaggccgggaataccaagattaggttatctgcagattctctggtgaggacctgcttcttagttcacagacagcatcttcttgctgtgcccttccatggtataaggggtaagagagctccctgagatctcttttagaagggcactaatcctattcatgagggctycactctcacagsctaatgacctyccaaagggcccagcttcaaacaccatcacgacaacatatgaatttgtgggagatataaacattcagcctatagccataaccagatgtttttgcaaccaagatggtgaattcttcctgagcacgtgccagtcagactccaggagagcagggatcccatgcacttatgtacttccatccatctcacagcctccatcgctttcagaaggttgagctgcccccaggtaccaaagcaaggactggaatatagctgagagatagaaatgttttgcaaaatgttgcttacagattcagaacttaaactgatttcgatctcttgggaaagaaatatgaattctaatctgatttcaatctctctggaacaaaaaaccttttgtatctatctttcttcaatgatgggaaaaagtaaaataccttccaagcctccactaatccttctactgatgtcttctatattcgtgattcagatgtgccttgtagacaagcacagatcttcactgctcacttctgccataaatgcttcacaaattaaaaaaaaaaaaaaaaaactcga

SEQ ID NO: 1269 - DNA, 774 bp, Homo sapiens
tttaagttacaggataattcctcccagtaaaactagcctccaaaggttttaatggcaaaatccaagtattcaaatctataatcagccttttaagcaggaacttaaaatgacatgacagttttaattatcttgttcttcgtccaagagtcaagtagtaggcatgagtacactttttacatggcttatggttttacgttatcttctaccaaacagctgttttgtacttaataggcctagtttctgtaacccatttggaacttcccccatcagctgtcgaaaggcttcaagttgagaaacactgcactgtggcttcttcaaatggcttttctttttttgagatagggtctcaatgtcacccaggctggagtgcagtggtgccatcatggctcactgcagcctcgacttcctgggctcaagccatccccctatctctcagcctcccaagtagctgggactacagctcgcgccactgcacctagctaaattttatattttttggagagacggggttttgccatgttgctcaggctgatctttaactcttgggctcaagcgatccacctgccttagcctcccaaagtgctaggattataggcgtgaaccaccacgccaacctcaaatggctttcctttaaaatttcttgagcctagtccgaagatagtgagttatctcagttgattgttcacagtcagttacagattgaactccttgttccactcttttccccattctcactactgcacttgactattctttaaaaaaaaaaaaaaaaaa

SEQ ID NO: 1270 - DNA, 411 bp, Homo sapiens
cccacgcgtccgacgtcttcctgcgcgatcaaccctggtacaaggcagctgtggcctgggccaaccagaaccgggcaccagtactcagcatagaccctcctgtgcatgaagtcgaacagggcattgatgccaaatggtcactggcactgggcctgcctctgccactgggggagcacgcaggccgtatctatttgtgcgacattggcattccccagcaggtcttccaggaggtgggcatcaactaccactcgccctttggctgcaagtttgttatcccactgcactctgcttagagggttcctgcgcaggcaggactctgctgtcccctgctgctcctgataacaaacgccttaaggatatgaagcttcatggaccttgttaaagttttttctctttaaaaaaaaaaaaaaa

SEQ ID NO: 1271 - DNA, 779 bp, Homo sapiens
  SITE (709): n equals a,t,g, or c
ccgaggagtccgcccggaaacaaacattccccagggcaatgtcacgacttggtcttcccgaggagccagtcagacagatacattgataactccatttgtgggtttaatagaccacaacttccaggcccagccgaatcctgctgaagttaaggatgtattcctggtgcctctggcctatttcctgcatccacaggtccatgaccagcattacgtcacacgtcttggtcaccgttttattaatcatatctttgagtacacaaaccctggagacggtgtcacttaccagatcaagggaatgacggcaaaccttgcagtgttggtggcctttatcattttggaaaaaaaacccacctttgaggttcaatttaatcttaatgatgtattagcatcctctgaagagttattcctgaaggttcataaaaaagctacaagcaggttatgatttactagagcaagagacaaagaactattcacgaggattctgtgtgtgcttattcgtagaacaacaacaatgccagctgttggaatttgacaggtgtgaatattttttctgcagtatgtagttagaatccttgcttcttttccagttgccttctattgtctgaaaaagtaaaagccattcaaaaatgaaaactatgttcatagtgttgcatattttcacccacaatatgttaataatatttttcttacacatataataaagaatatntggcacatactaggcccttaataaagattttttgaatataaaaaaaaaaaaaaaaaaaaagggcggccgc

SEQ ID NO: 1272 - DNA, 638 bp, Homo sapiens
  SITE (9): n equals a,t,g, or c
  SITE (38): n equals a,t,g, or c
  SITE (66): n equals a,t,g, or c
  SITE (625): n equals a,t,g, or c
  SITE (635): n equals a,t,g, or c
tgccagtgngcccttggaacatccccactgcatttcanccccggggggatacagtgagacccttgnctttaaaaaaaaaaatgcctgcaaaccccaaaaataaatagcccataatttgcccatctttggagagattatggagataatctcccttgtctattagcccactagcatggctaattgatcattgattggacctcattacataagggggctgtggacgtctttggaatttgttaggggaaggctatgtggtaagctctactaaatgtatctgtacaaggatgaagaaaaacaaaataactactacttttggaggaaacttggaacaagaagagtacatagtttgatccattcctacggtcgagtctaatcaattccatttcttagtgtatgcatctaatgaggcttacaacttgctaaccccaaaagaagcaataaatgttaagcaattttagtaaccagtatggcatgtatcttatttttgaatgcattcctccttatccccatcctcttaggaatatggacgttttactaagtaataaagatttcaaatgctaaaaaaaaaaaaaaaaaaaaaaaagggcggccgctctagaggatcccgsgaggggccccaggttantccaaagagntcc

SEQ ID NO: 1273 - DNA, 1055 bp, Homo sapiens
cgggtcgacccacgcgtccgagacttgtcattcagtaatattagcagatagctgcttcgataaaggaatttggagtttaaaaatcaacttgtgaaaacaaggttgtttttgtctttatcgtttgttagagttatagatttatgatttcataggcttgattctatgtgaaatatctttttacttttatgcattttaataagatttaaaaatatttagattaaagccccctttaatgagtacaagaaaaactcttggcttgttagaagaaagtatattctttctagaatttggtgcaggaatatgtgttcatatccaggcaaacgggtgtgtttttatcttcagacaatgaaaccttctcctctggggctttgttgccaggaagattagaactaaatttatttttttcatttctgtcatgaaatcattccagatacctcttttcttctttccaaatggttttcacatgtgtttgaaatatttgtacttcgaattgtcggattttccatgtcctcctttctcctttgtgcccagcctgagtcagcaccaatcccgcattcagaacctcccagtgaaagggcagccttcattttgagaaggtggaaggtgttagggtttgggagacagctcatccaatctcccaagtctcatggtggatttgtgactgtgagagtttccggtttaaaatctgaaaagccagatatgcctgtttccttttcccagcaccatgcctgtggaggggacagtcagacccagaggtcctttacgtgtggatggagttcacaggcgaatagaggagaggaccaggggacgtggcttgtcccttttgtccaacaaagcattatatttttaagaatggcagacctgtttgctgaagtgttcataagataacaataggcttgaatctccaattcaaatgaatgtcaaagcacatatctttaatatgctgaatgaatatttatttttgtatccattaaaacagtatattgatctcttttattctttattaaaataaaatgctcttttttaaaaaaaaaaaaaaaaaaaaaaaaaaaaaa

SEQ ID NO: 1274 - DNA, 1161 bp, Homo sapiens
ccacgcgtccggccttagcagctgcaccgccatccccatgctggttggtgctgccctgcctctcgtgccgggtgttgcttcagcccagagccagagggctgggtcccgggtcctccacaggtgaccccggtggacacacgcgttcccatcctggcctccgtctctgcttttccacttctacctgcgtgtgggtttgccgccttgtcatcggttgtgtgagtgtcgcagacctttccagagctccggttcactctttccaaacaggcctccctgtcggtggcactgcactcctagaaccttcagtttctacgatggtttgtttggtccttttgaaccaccccaaagaactcaacatggcaaagcaaatggtaaaagcttcccgactgttctactttgggtccgcgcgaagcccactcacgtgtgatctgtgttgcccctctcggtggtcccaggcgatccagccatgccccctgcccctctgccagatgcttcaggggcccggcttttcaggcttgccctcaccagcggccgtcagccgacactcaggatgtagctaacaccactccgccagtgctttcagtaggaagagctgaggctgcctggaaggcccggggcgaccggaaaagggctctctcaagttctgaaaagagaatctgccaccagatcgaatttcgacccctgagcttgttcggacgtatggtccaaattcagattaaggtggtcacccaacccgagatgtcaggaaaggccttctgcagagaaaatgtccccccacccgccatctgcagccaggtgtgtgccacacggcagccttcccgaaacatagtatggattttaaaaatgtgtttatttttgtttctcaaccactttataacgtattttttaatttattttgtaatgtcttgttttgaagtattgctgctatccttgttatccttcccactgtttttatcactgatttattttgtgaaagttgtacactaatgttctatgtcaaaatcaaaagtatttaatgaaatactagttctatttaatgtggttatggaaccagctggaaacacaaaacaaacagtgattgtacagcaggctgggcccaggaggtcaggttcattttgttacatatgcaataaactcacgactttaaaaaaaaaaaaaaaaaaa

SEQ ID NO: 1275 - DNA, 1681 bp, Homo sapiens
aattcccgggtcgacccacgcgtccgctcaacttctaccagttcctcggggtgcagcaggatgcatcatctgcagacatcagaaaagcatatcgtaagctttcactaactttacatccagacaagaataaagatgaaaatgcagaaactcagtttagacaattggtggccatttatgaagttttaaaggatgatgaacgaaggcagaggtatgatgatattctgatcaatggacttccagattggcgacagcctgtattctactacaggcgggtgagaaaaatgagcaatgctgagctggcattactcttgttcattattctcacagtgggtcattatgctgtggtttggtcaatctacctgggaaaaacaactggatgaactactaagtttgaaaaaagagagaaaagaaaaaaaagactggcagcaagagtgtggatgtatcaaaactcggtgcttcagaaaaaaatgaaagattgctgatgaaaccacagtggcatgatttgcttccatgcaaactggggatttggttttgccttacactaaaagcattacctcacctcatccaggatgctgggcagttttatgctaaatataaagaaacaagattgaaggaaaaggaagatgcactgactagaactgaacttgaaacacttcaaaaacagaagaaagttaaaaaaccaaaacctgaatttcctgtatacacacctttagaaactacatatattcagtcttatgatcatggaacttccatagaagaaattgaggaacaaatggatgattggttggaaaacaggaaccgaacacagaaaaaacaggcacctgaatggacagaagaggacctcagccaactgacaagaagtatggttaagttcccaggagggactccaggtcgatgggaaaagattgcccacgaattgggtcgatctgtgacagatgtgacaaccaaagccaagcaactgaaggattcagtgacctgctccccaggaatggttagactctccgaactcaaatcgacaggttcagaattccaggccatcaaaacggccaccaccttggcccgatgacatgatcacccagcgagaggacgcagagggggtggcagcggaggaggagcaggagggagactccggtgagcaggagaccggggccactgatgcccggcctcggaggcggaagccagccaggctgctggaggctacagcgaagccggagccagaggagaagtccagagccaagcggcagaaggactttgacatagcagaacaaaacgagtccagcgacgaggagagcctgagaaaagagagagctcggtctgcagaggagccgtggactcaaaatcaacagaaacttctggaactggcgttgcagcagtacccaaggggatcctctgaccgctgggacaaaatagccagatgtgtcccgtccaagagcaaggaagactgtatcgctaggtacaagttgctggttgaactggtccaaaagaaaaaacaagctaaaagctgaatattctgggagatgatgttcaccttcattttccaaaatgaatatcttaaaaatcttatgcagaaatttgcattttgtacctcaatatttctacgtcatgtgccttagtaaaaaaaaataataaataaataaaagataaaaaaaaaaaaaaaagggcggccgctctagaggatccc

SEQ ID NO: 1276 - DNA, 678 bp, Homo sapiens
cacgcgtccggatttttcactaattggtttgtttgaattatctagatactctttcataataattctatattgcttatgacttgagtctttgaacaagaatggtaagtggcctcataaaacatagcaattggctgtgtttcaccttagcactagtacatgccaaatgcagcatctctttttctttgttacattgtagctttgccatgctgttatgcagtggcttggatgtaatcttttagtcatagtggagtggtttggattaatttgttgcattttactaatggacacaaaagcatagtatcctgttaattaactggtcacaaacttataaagggacttcctttagagttaaagatttagagttaaaggttaaaggtttaggttgggtgccctggctcatgcctacagtcccagcactttgggaggccaaggcaggcagatcacttgaggccatgagttcgagaccagcctggccaacatggtgaaatcccgtctttacaaaaaatacaaaaaattactggtgtggtggtgggtgcttgtatcccagctacttgggaagctgaggcacaaaaattgcttgaacccaagaagcggaagttgcaattgaaatcatgccactgcactccaacccgatgacagaacaagacctatctcaaaaaaaaaaaaaaaaaaaaaaaa

SEQ ID NO: 1277 - DNA, 610 bp, Homo sapiens
aattcccgggtcgacccacgcctccgaaaaaaagaaaagaaaaaaagaaagagtgctttcctcttagaattgtgagatgggtataaaagtaaaataatttagcacagtgtcttgtacatagttaatgtgtgagacttattattaagttaaaaagcaaccacattttcacattttgcattttagaaagatattttaaacgtatttcacatttgcctgatgatacattattccttattatgtggtttctgtcactgctgttgtcattcatttgctttttaatatctgcagaatatgaaatatgtctcttttaagttcttattattagtgtgtgtgtgcacacctgtgtgtgttttttcatctgtctcagtaggagtaccgttcaatttggtttttcaaagaaagtaacttttgactttgttgactctgtctttttattatttctttcattaacttttattctaatctgtattacttccttccatctaatttatttttattttattttgttttattttttgagacagagtctcactccagcctggatgacagagtgagactccagtgagactcttatcaaaaaaaaaaaaaaaaaaaaaaaaaaaaaaaaaaa

SEQ ID NO: 1278 - DNA, 1264 bp, Homo sapiens
cggcacgagtcttttttttggcctgtcttacctacagttgtattttcctctttaatcataaggatttacatcaggaaaaataacctgagaatagatgtgttttgtttgaatgtcgtagttgtgccctttgtaaaattaccccagggcatgataagaaaaggagtaagcaattaaaatgcacagggctacggcaagggcaggcagatctgagtggaggctgctgtcctgtgaagtagacctggcaggggatggctgctccgggctggcctgggcctcgctctgcctctgttgttgctctgacctttgacaaatcattcccttgcctgtgtctcggttgccccatctgagcgagaggctggactaaaaggtcactaaggtcacttgtagcctgaccttccatggctctataattctctttgttatctttggccacttacatgtttgccatgatcattgccaatcaaactaggaatgtttagcagattttagacactcagactggaaaatacagacgaggccatagaagttagtgttgtcctagggatggctcctggttcacgcaggctcctcatagggtccctgccgctacacaccacgagcccaccgagactgctgcagcctcgctcatccagaacagaggcaccatggccaggaggcccttcctttgttgggtaggagctgcccccgtccatgttccagctcctcccaggcccccatggataaaatagggccacaggtgacaagtgagttctgtgaccctgaccggcagcagctgccagcgaaggaggaaggaaacacagacaggaggtctcagagcacagcacgccagacctctagtccacacagtcctgcacacattgccgtctttgtttaaagagaggcggaggcagaccccaggcattcaaatgatagaatgcttctgctgtgcctgcatccttccctcctccactaggagcctctggttccagcccagatgaacccactgggctgggaacgccacacaaaagcactctccaagccagccagaggtccctgagggccaagacagggctgaccagaggcagtgtctggacatcctactgggagctcgggaggaggcagtgacagctcaggccagtaatgggtattcttgagagcaatcccaggtcatcaagggaagaaaaggttatgcttcgtatactgtgttcaggggccagataagttttaatacgttccagaagtgtgctcaagcaaaaaaaaaaaaaaaaaactcgagggggggccc

SEQ ID NO: 1279 - DNA, 942 bp, Homo sapiens
  SITE (437): n equals a,t,g, or c
ctgcaggaattcgscacgagccagctcgaaaaaatccatgcttttgagaccgagaatctgggaggagttttgagtcatgggcgtgaatgcaaaaggagagtaagagaatgggacgagacggggcagagccgagaatattacaaagaagggctaagctatgggcttcctttctgtctggttcttgcttgcatcttgccatgctatcatttgctacttttcttgcctcggtggtttgtaaaaaataagagccccgggtgcatgtgtcccctcattcactctgtgtgggcaaaggaaaatgaagcccttatggtcacctggtgtttctaactttaaaacagcctcatatctcttatttaattcacacagaaatcctgtgtgcagagccaaggatattcccattttatagacaaggaaatggagaaaaaggttgagaaaankgatcttccagtcacatttacctmttcctgcctcccacaagtgcttcctgggtcctatcccagggtttttttgtactttactgattttaacaaatacagcctttgatcactctcagctacctgccacactggtgccatcactaggtgagttataaagactcatcatcatgatactctccatgattgggagcattctatgtgccaggaatttttctgggggcttttcacatcgtatttccttctgatccccacaactctcctttgagatacacagtgttatgatgcccattgtacagatgaggtgaggtgctttaggccacacagccccagccaacacatgcagacatcacatagctaggaaatgcgaatccagcatctgaatgtgttagcacagagggtcccctccctggataaaccttctggaactcccggtcatgtaagacaatgtccaaattcctcagtgtggtgtgcatgcacccctgcagccactgccctgcccctcgag

SEQ ID NO: 1280 - DNA, 1522 bp, Homo sapiens
  SITE (1): n equals a,t,g, or c
  SITE (357): n equals a,t,g, or c
nccccgggctgcaggaattcggcacgagagagagaacgcatgcaaactccatctcaaaaaaaatgtattgtttatctgcaattctgatttaattgggcatcctggattttccctggcaattgtattcctggagcaacaagaggactctcaacaccaaacaggccatcccgttcctccatcaggtccctacagcatttgaagtaaaatccaaaagtcctggcttcgcctgcaaggccctgcatggctgaaaggaaacagcagccagccccacagactttgaggagttcccagggtggatcaggcaggcaagtggattttgtggtcctggtccctcacggttgtctgttcccccacatnctcctagaaccccttgttcgtggaggctgaggagaaagtctcctacaactgctgccgccarggcactgtctgtttgcaaatccagatggaaaggaacaccttcacgccaggagagaaggtcgtcttcacaacagagrtcaacwwccakaccagcaaatgcatcaagacggtcgtattcgccctgtatgcccacatacagtacgagggcttcacgcccagtgcagagcggcggtctcggctggacagcagcgagcttctgaggcaggaggccaacacccccgtgacccgcttcaacaccaccaaggttgtcagcaccttcaacctgccgttgctgctgtccgtgagcagcagcacgcaggacggtgagatcatgcacactcgctacgagctggtcaccaccgtgcacctgccytggtccctgaccagcytcaaggccaaagttcccatcatcatcaccagcgcctcagtggactctgccatctgccagctgtcagaggacggagtgttacccgtgaacccagatcaccagaattaagtgcccgaacttttaaatattaaaagctttattagtctctaccaggaggaagccctctctcttgcacaggtgactctcagaggagtcgaggagtgggcaacaggttgtctgcaacctccccaagctctagcggtttaggtatctgtgtctcccctccctagaactatcactgaatgcctggaatggacaaaggaaaccgggaagktctcccaggacccaaacccggcataacctgccttttccaccctgaktctgccccagcctactggggtctcacagtgccaagaccaggggtcctacttggggagaattctcccctctgctaatgtctggtttattggctgtcacaactgcaggggatcgggggagaagagtcttattggcgtggagagggtggaggccagggacgctgttcagcaccctgcagtgtccaggacggcccccacaatcaggaattgtttatcctgaatgtcaacagtaccaagggggctgagcatggtggctcattcctgtaatcccaggactttgggaggccatggctggaggatcacttgagaccaggagtttgagacaagcctgggcaacactgtgagacccccatctctacaaaaaaaaaaaaaaaaaactcga

SEQ ID NO: 1281 - DNA, 1446 bp, Homo sapiens
ggcacgaggtagctgccagcaccattgttgttaacttggctctggtgtggtcgcacaggtacagcacctggtgcacaggaggctctgaaaccacaggcccttccccattgccctttcccccctgttctgggcttgacccttcctgtgagggcctggacctcctgcttccgctatctcccagtggctggctcagcatggctctttctcatttgctccttcattctcgcccactccttgaggtctgtctatctcacgtcctgctgtcccctcatgaacgcccccttcttctctttccctgcctcctttctggtctctctggggctgtcctcagagtccttcttgggtagtttcagggctgctgccaagtccacccwgwgcgcccctgcgctctgccccaagcagtctggagcaggcacttttcccagaacactggggtttggaaaacagaacgtccctttaggcctctgtgacctgctcccaacttttagatgagtttactcaacctttggcttccgggtgcaggctctgcctcctctggggccgtctcacctgtgcagggacagcagctgattctgatactggattccaartgggctccctggggccttccttgtgggcaccctgagctctttcaaggccattccccacctcacttccacaagtgagctgggctggctgcagggaaagggcgcatgtgtctcttgagagaagctggcasgcggccagcattcctgcctctggatggagagccagaaggctgagctctgaaaggcccaggagattgggcaatggtgggtggatctccccacctgaatctgatgtgggtgcagcaatgcctggaatgacttggtgactgctgactgtgtttgtccttgcctgggtcatgcagggcaccacccatccaggatatgggtcaggggaggtctctgactcacagtgcttctgggcgaattcaaaagcagaggctccttgggtgtcagaagtggaaaacgggagggagtgttttaaaaacccacctcccatcctccagaagggaaaccaggacccagaagagcaaagtctcatgcatctcaactacctgcttagcatcttagaggcagcagtagtgtgtcgccattaagaacacagagggccgggcgcagtagctcacgcctgtaatcccagcactttgggagaccgaggarggtggatcatgaggtcagaagatcgargccatcctggctaacacagtgaaacccccccatctctactaaaaatataaaaaaattagccaggtgtggtggcacacgcttgtaatcccagctactcgggaggctgaggcaggagaatcacttgaacccaggaggcggaggttgcagtgagctgaggtggcaccgctgcactccagccwgggggacagagcgagactctgtctcaaaaaaaaaaaaaaaaaaaaaaaaaaaaaaa

SEQ ID NO: 1282 - DNA, 1193 bp, Homo sapiens
ggctgtcgcccagcctggagtacaatggcgcgatcccagctcactgcagcctccccctgcctgggttcaaacaattctcctgcctcagcctcccatggtgtgccgccacacctggctattttttgtatttttagtagagacgcggtttcaccacgttgaccaggctggtctggaaatgcagtttttgcactgtctgcctgcttacctttatagagcatattttgccctcttccatcagaattacccatttaatggtcaggaaaagctgctgggaatatgactcatagctgggacattctctgcactgtgcatagttcctctctgccaccaccatggaggagattgatgggtttgaaacccaggggaagtcattgccctgcgagggtctccctcattgagaatctggatcccctcatgtgcacatggtgaggtcagagtcccctcctcacagtgtccccttccacctcccgtgaactgttctttccttccaggaggccagcaagcgcatctccagccacatccctttgatcatccagttcttcatgctccagacgtacggccagcagcttcagaagggccatgctgcagctcctgcaggacaaggacacctacagctggctcctgaaggagcggagcgacaccagcgacaagcggaagttcctgaaggagcggcttgcacggctgacgcaggctcggcgccggcttgcccagttccccggttaaccacactctgtccagccccgtagacgtgcacgcacactgtctgcccccgttcccgggtagccactggactgacgacttgagtgctcagtagtcagactggatagtccgtctctgcttatccgttagccgtggtgatttagcaggaagctgtgagagcagtttggtttctagcatgaagacagagccccaccctcagatgcacatgagctggcgggattgaaggatgctgtcttcgtactgggaaagggattttcagccctcagaatcgctccaccttgcagctctccccttctctgtattcctagaaactgacacatgctgaacatcacagcttatttcctcatttttataatgtcccttcacaaacccagtgttttaggagcatgagtgccgtgtgtgtgcgtcctgtcggagccctgtctcctctctctgtaataaactcatttctagcaaaaaaaaaaaaaaaaaaa

SEQ ID NO: 1283 - DNA, 921 bp, Homo sapiens
  SITE (773): n equals a,t,g, or c
  SITE (813): n equals a,t,g, or c
  SITE (851): n equals a,t,g, or c
  SITE (885): n equals a,t,g, or c
agatgctagtactttaaaaggaaataagggaaaagccggtcttaactatatagatttttttttaacataaatggctgctatttggcactttgctttttgcacttacctagatgtcctggacatctctccacgtccacttatagacaactgcccaggtgttttcctggctgcagagatgatgtggactgaattcatttggccaatccccaggcaatggccacttaggttatttcccaagttttgacaccacaaacaaagctgcagcgagtgaatcagcttgtctgggctcgtgtgtctgtgaaaactatgtggcaacactgaaacagattgcacacccaaagcctgacttctggctcctcttgggaatcagaagctctgcctccctggcccacacgccatacttttagaagccccactgccccagagccctatttgtccatgaattcctgactcattgtctggagcctgcttgagggaggctgggcagggtgtgagccaccaggattaaaggttgtttgtagcctctgcctccaaatagttacctgcaaaaggggacaagtgaagccacaaagattctactttaaaaaaaraaaaaraaractcattaaagttcccttaggtgtctccagagagagcccagaggggcccaggagaccagagttctggtcctgtctgtcaaagaattggtctgtcagagaattgggccactctctgaagggccccatccttggtttaatgcatccagccctgactgtttgaccttggtgaggggnctcagtgacgtcatctgtgaaatgggtacagactccttgngggagtctgtaagctcagctgtggttggcaatatagangcataaacaaagttgaaaagctcctggccagtgnggtggctcacacctgtaatcccagcactttgggagg

SEQ ID NO: 1284 - DNA, 1059 bp, Homo sapiens
ggcacgagcaccccaggtccatgagggcggggacttttgattggtttgctgttgcctgtcaagagctttatttactccgtgcacaaatgactgaatcagtccagccctcagtgattcatctgttttccctcttccttttcccatatcgggtgtgcgaacctctgctcaccaagtaccagtcgggtccttctcctgcccacgtgaaggaagaaggcgcagtggggctgaggcctcactagggcacccacacggagcgctgcgctcagcctttggacccggtacctccccaggctctgaggacagcagcagccccaggacggacgggtacgccaagtcctggggaccctctcccaagctctgtcagggcggcggggtggcgcgcgctcctccctcgggcgctagctctggaaatcgcgctaggcagaggtgggcttgtgtccgcacccgcagcctccgcgtcaacaccctaggggagagggacgcgggcaggggtgccgggcccaggctccccagccattctcaggccagaaccccctttttaacaagacatggccttggtgtgtcgcggactctgccggggacagtctggcagaactgggctccttgcgctccccagtataccggctaattccgtgccctttgcaaacttcatattttgatttcaaatttaaaaataatcaataggccgggtgcggtagctagctcctgtaatctcagcctcccaaagtgttggcattacaggtgtgtgctatcacgctggccttatttttattttttgaaatggagtcttgctctgttgcccaggcaggagcgtagtggctcgatcatggctcactgtagcctccgcctcaccctcccgaatagctgggactataggtgcgtgccacggtgcctggcccgaatggctttgttatacccacgtgaacagtactacgttttactaacagaaaagcatcaaatgagacttttcttccgaaactatgttcagagagtgactgcagtattgccttggcaatctagtgaatgtatcctcaccgcattaaaaaaaaaaaaaaaaaa

SEQ ID NO: 1285 - DNA, 590 bp, Homo sapiens
ggcacgagggtggatgcctgtagtcccagctactagggaggccaaggcaggagaatcgcttgaatctgggaggtggaggttgcagtgagccgagatcacaccactgcaccccagcctgggcaacgagtgaaacttcctctcaaaaaaaaaacactgcactgagaggcagaagacctaatctcctgaacctctgtgtatctcagtgtcatcatggacatgatgagactggataagcctcagagcctctggggaaggctgtttgcaaacatgaccacagtttctcccatccctataagttgcctctttgcagcttgacattgctgcttctcttgtcaagaagtggagatttttttcccctctccttgaatctgggctagctctgtaacttgctttgaccaatagacagaagtgacctgatgtgacttttgagtctaagccttaattgcctccactgtcaccgtcttggagcgatagtgtagccctgtgaagaagcctgggctggcttccttgaggataaaagaccaggtgccacagaaaggcagtcatgtgagtcagccccaggcaaaaccagcaaaaaaaaaaaaaaaaaa

SEQ ID NO: 1286 - DNA, 965 bp, Homo sapiens
  SITE (193): n equals a,t,g, or c
  SITE (643): n equals a,t,g, or c
gcagctctagaaatctttccttctggtgctctgatttgcctgcctctgggaggaagggaagggaagaccctgcaggactgaggtttgtcctggctgacaggcctgccaggcttgttccgggctgcagagaagagaggctatttttgttgtgggagctgaattgttggtctctctccaggagcacatgcttgtnggtgtggttgatgtrtcttgcctgctgtggccatctctaccactgcttccagaaaacacttgagaatacgtttgtcccaagaggttaaacctgagatcaggatcaggcatctgtgctcttgtcttgtgttccactcccttctggccattggaagggcagtagcagaacaggatatggctaacatgaacttggagagacttttctcctagagctgtgcttgaaaggggccctctctctgtaactgcggttgcagtgaactcagtccawtayctgggctttcttgtccttcagtaggctgatggagctgcccttgccctcaccagcctggtggggtttgcacagtgctgcagttcatctcacctactgtccaaatctccttttatcagcccagtccaggaacagtggtgtccttcttggtgtagggcttaacgtgagccttgcatgcacctngatccatatccagcattgcaggcaattctagtattccatgtcaagaaggctggcaagaaggctggtggggcaggtgccccagtccatcggcccttagtatatgcagagggtagctccaagtggggccactgtgatatgaaggaggattgtttgaattcaggagattgaggctgcagcgagcagtggtgcagtcatagctcattgcagcctccaactcttgggctcaagtgatcctcctatctcaacctcttgctgagtagctaggagtactggtgcatgccaccacatccagctaattaaaaaaaaaaaaaaaaaactcgag

SEQ ID NO: 1287 - DNA, 1175 bp, Homo sapiens
ttttttttttttttttttttttttttttttggccgagtcaatattttattaaaaaacacacaaacacatgcacactggtaacaaaggcagagatggagaggagacacaagatctccttggggacaggctgaccacatagtgtttctacaggcacgcctcacttcaggaaagagggtatctctaagaccggactgacaagctagataaattaggacagggctttgtttcttaaggcacttcactcccctgaggagtgaagtagaagggatttaggcgggagtattcacaaaccccttcagctgtgctaagtggggttcatcagtacctgaggtggttctagaagcaggaaggcagaaaacatttccctggaggctgctttcctttcccagaatgggagggatgttctccccggaaggctggaggaagagtttccggctggctcaggagctcagggagctggcttcctgggagagcaggaagagggtgcaggcctttcctggtgcccaccagcctgacaggactttggcacaggaacacaggtccagaggcctcgcctggagtacacgtcctcctctctgcaaagctcctgaggggcctaggggttgtggcctcatcagacggctgcatctgtggactgggttacacacgagatcttataggacagccatatgcttgccatgcagaggaaggtggccatgaaaccaaagatcgctccggctaccagtccgctctggttgtaactcttggaagctgccacaatggaggcgatgaggaggagcagggtaccgattaaatagtgcagaagttccgacaggggccagctgatacaggtgagcacgcggtagaagcggaagaggtggaccaggtaaaaggcgaggatcattatcaagtcgcaaatggtgaccacttcaaagtagctgtaggcgctgtagttggtccacagggagctccgcacacagatgaaggcaatcagcagggtgaccatttgcgccactttcagcagggccgcgtgggtgcgggggtagctgaggtccagcagcccctccaaggggctcgcgctgggctgggccgcgccggccccgggtccgagcgcgctgccgctgctgcacgtggtgcggacgagcccggctccgtgcgacattgcgcggccccagctcgccggacgcgtgggtcga

SEQ ID NO: 1288 - DNA, 1340 bp, Homo sapiens
ggcacgagcccactcttgacctcaaggtggggaaggcagcgcgtgggggctgccgtcaggaagttttcataactgggcacgaggaggcaggaggagctgcccgtcaagcttggtgtgggcagtaccgaggcccaggctggatgcagagccgggaaccgcctcctgtgtgcttcatggccatggtcctttctgcctgtgttttttctttttttctcaaccgtctcttttctggctcccttatttctctgtctgcctcccggtccctcttttgccttgggtgtttctctcctgccgtcccgtccacacgcttcccgggttcctgcccgcccagggcattgccacagggaagtaccacgccgcggtgctcaccaacagcgctgagtgggaggccgcctgtgtgaaggcgggcaggaagtgtggggacctggtgcacccgctggtctactgccccgagctgcacttcagcgagttcacctcagctgtggcggacatgaagaactcagtggcggaccgagacaacagccccagctcctgtgctggcctcttcatcgcctcacacatcggcttcgactggcccggagtctgggtccacctggacattgctgcaccggtgcatgctggtgagcgagccacaggcttcggtgtggccctcctgctggcgctcttcggccgtgcctctgaggaccctctgctgaacctggtgtccccactgggctgtgaggtggatgtcgaggagggggacgtggggagggactccaagagacgcaggcttgtgtgagcctcctgcctcggccctgacaaacggggatcttttacctcactttgcactgattaattttaagcaattgaaagattgcccttcatatgggttttggtttgtctttctggtcgtcagcgtggtggtggaaacagctgaagttttaggagacagcttagggtttggtgcgggccacggggaggggaccgggaagcgctggggcttgtttctgtttgttacttacaggactgagacatcttctgtaaactgctacccctggggccttctgcaccccggggtgaggcctcctgcctgcctggtgccctgtcccagccccaggtcccgtgcagggcacctgcgtggctgacagccaggctcttactccagccggggctgccagcgcatccagccagcccagccctgtgaaagatggagctgacttgctgcaggggacctgatttatagggcaagagaagtcacactctggcctctcagaattcacttgaggttcaattaaatacagtcacaccgccccctcaaaaaaaaaaaaaaaaaaaaaaaaaaaaaaaaaaaaaaaaaaaaa

SEQ ID NO: 1289 - DNA, 656 bp, Homo sapiens
ggcacgagcttaattagaaaatgcttcattgctttaaaaaaaaaaaaatgctaatgatcgtgctgggattacaagcgtgaccactacacccggcctgagtcacattgttcttaatagcatctagaatggtgaatccttcccaggaggttttcagtgtactttgcccaaatccatcagaggaatggctgtctatggcagctatagccttataaagtgtatttcttaaataataaaactagaaagtcaaaattactccttgatttgcaagaattactgcctggctgcaagaatggatgttgtgttagcaggcatgaacacaacattcatctccttatacatcttcatcagagctctgggtgacttaggtgcattgtcagtgagcagatttttgggtttttttgtttgtttgtttgttttgagacagtctccctctgttgcccaggctggagcacagtggtgcaatctcagctcaccacaacctctgcctcccaggttcaagcaattctcctgcctcagctacttgggaagctgaggtgggaggatcacttgagccgaggaggcagagattacagtgagccaagatcatgccactgcactgtagcctgggtgacagaaccagaccctgtctcaaaaaaaaaaaaaaaaaaaaaaaaaaa

SEQ ID NO: 1290 - DNA, 927 bp, Homo sapiens
ggcacgagcagtttttctccttttgcctattaatgtaatgactattgaaatagatttcccagtgggaagacgtttcacgctgaaggaccagtgtgtgcagaggtgaaggcaagagctgcggcagatgggcgaaatgggtgtcatgtgtttgatatcatctatgcagaaatcattagagttggctgcagctgcttggtctttttctgtaaacagccatcttgctgtcctcagatgctggacagtgttaggtctgggaaggtgggcagaggcatgatgcttgcccttttcattgtgctacttcttatccctcccagacaaaatgaaaatcaaatgccgtttccagaaggcctatcggagggctttggaccatgaggaggaggccctgtcatcgggcagtgtgcaaggtatgggaagggatgagcacaccattttaatgtgaagccctctttttccttctgatctctaagtgcatagttcccatgctttggcttacttccaaaacctctcttggaatgctgggaatgaggaactgtgggattcagcccagtccactgagggccagagaggttgattggcttacccaagcctgaccactgtgtcagctgaatgtgagttgaaggggtgggttaagcattcttttggggctggggggagatggaatggtgttttgctcttggtgtaccacctgttcttgcccccagaggcagaagccatgttagatgagcctcaggaacaagcggagggctccctgactgtgtacgtgatatctgaacactcctcacttcttccccaggtaaggtaacagagaagctgcgactttgccttatcccttcagctcgtggactcctgggtcacctccttcttgcatcattgctacccatttcttccatttgctacagaaaactctccaaaaaaaaaaaaaaaaaa

SEQ ID NO: 1291 - DNA, 1635 bp, Homo sapiens
ggcacgagctcgtgccgtggacttttaaactcagtgccctggacacgtgttgctcttctgcagtcagtggtgtggggacctgtgcctgcatcccatgatgctgtctgccactgcccaaaatgtatgggtctacaagtcacacctcccttgtcattcactgggctctggttcgtggtgatggcaaacatgggatggcagcgaaccatactgacaaaggttgaggcccttcagcatggtgtgcagcctctcagcatggacagtgggccctgaagccactgcagctcactgttcctctcccaccctacaggaggtagattgggaagtggagctggccgtggtcattggaaagaaaggcaagcacatcaaggtgaggtggaaagggtgggctcccagtccagagtgcagcagaggccccagctcctgcctctcctagttctgacctcactcaccaacacacggtgccagctgtccctgacactaggaagcagtcagcctccttgctccctgacactgcctttcccttcacccacctttggctggctctggctactaacatgggataacagcttagagatcccttgccataggtgttggtgtcacccatgatctaacctcctgtatggccaaatcccctgcccccataggccacagatgctatggcccacgtggccggcttcactgtggctcatgacgtgagtgctcgtgactggcaaatgagacgtaatgggaaacaatggctgctgggaaaaaccttcgacaccttctgccctctgggccctgccttggtgaccaaggacagtgtagcaggtaggtccctggtccctgcccccttatacctaccattgcacagatgaacagcgcttcagggaggagcatgggttcaggtacatgtggcacctgccctccctggccgccctttcactgctgactccatacagggcaagtctcttatcctcagccacgagttctcccatgggcttccttcccaagccccctagagggaacacaactgcagaggatgtgaaactgcatgcgtgaagtaaattacaaagaacactgagctgatgggtggatcgggcttcctgcggctgccacctctgaaacaatctaagttgagcatcatggagcatagttatcccaaggccaaggcattttccacactacaggagatgaaagccagtgtgactcacccagccactgtggaaatagaacagcactgaccacacacagtcaggatacagcgccaggatgggggcagtgccccagagggcagagcgcagcctcttacacagccacccacaactgtggtggaggtggggggtgtccacatgggccagccatgccaggataccaaagaccccagtgcctcagcaccccatgcagagtcctcagcaaagttaaattgtgtttcagctgctctacttaaggggggtagaacactaggaccaccaccaacagtaaaaagtgctggttagccaggatgttcttacagtaatccatcccctgccagcatccagtacacgaggcttctctgtcccggctagaaccattgcctcactgctttatagatgctgagtcttttttttgcctgggtgacagagcaagattccgtctcaaaaaaaaaaaaaaaaaaaa

SEQ ID NO: 1292 - DNA, 1246 bp, Homo sapiens
  SITE (1038): n equals a,t,g, or c
aggaaggaaccagggattaggctgtaggggggtgagaaggagagaagggaccaccccattcttctcaagcaaggattgccagcgcgcgctgacacagtgatgggctgcccagggctggaggggacgctgttcctcccgccgccactgcccaacctttcctgataatcgtggcatgcgccctttcctcttccctgccccaccccctggccgcagcaggccagcactgcagagtttgggtgctggtggtgtggctgtaggggaggggagaccacacccaaggtgggggctgtggccatgtgtggccgtgatgtcgatgatactcgttttccctgatccgtggtgttgcagtccgttgtcaccagccttgtttctagtggtgtatatatgtcgcccccgtgatgcatatatacacaggtattaaatatatcgctctatataatattatatatgtgtgtggtatccaaggaatcacttttatgagggctaaagataaagaatttggccagaaaatgcagccatccttgtgtgattaggaggtttcaggggccactggactatttgcaaggtgacagggactggagccatggctcagaggtgattcgggcagccagggacaggagccaccctccccaggcccaactctgctagcttcccagaccacccccatcgagtgcggagagagtgggagtgctcagggaaagaaggtgatttgtatttgtctccccgctgaaaagaacaggattcaagtccagagttttcatcttcagcctgtgatctgtccagggacccttgggatctggggcttcctggcctggccagagctggagcccccacagggtaaggaagagagagtgggaggcagagtgtgatggggaggagggacaggaagacccttttaatgatgagggtaactatttcagttgtgagccttctagggccccaggctgggaggctcagaggactgaatctgggacctgtgttccccccggcaggcagggacaagatggcatggcaagcatgggggcggggtgggtgggnagggatgctgcatttctcagctgggcagtaatcaatttaatggtcctttaaaatgtctgtgtattaaaaatttaagaataccacactttaatattaaatattcataaggtctagtatcttgataataatgtagatgttttaataacaatttttgtccttcttaaaataaaatgaaagaaacttgcaaaaaaaaaaaaaaaaaaaaaaa

SEQ ID NO: 1293 - DNA, 358 bp, Homo sapiens
ggcacgagaagaactgcccttttctctttgaaaaaaaatgaacactaaaggcagagattttcatttggctgtctttgtattcccacaaccaagcatggtacgtggttcaagaaatggctgtttaatcacagcagtaactcccagtaggaaagattctcaaaggaattgttctttaaaaaaaaaaaaaattcacaaagtaggctgtaccctcaaagtgctaaggagagcttctgtcctcgaaaatctccctgaaatactgaaagcatacaaaaaaggagaaagctcaaaactaaattttgactctcatggctggggtttgtatctctttctttaaaaaaaaaaaaaaaaaaaaaaaaaa

SEQ ID NO: 1294 - DNA, 779 bp, Homo sapiens
tgtagtccggggacagccagccgacgtgttcccaaggctgttcaaggtaagcgtgcagagccccagagaagacagtgagattctgtccctgagggtttccccacarcctgagtgatatgatattccgactgagggaatggaaacatcagggctggtctggctgttgctgctagagaagttgggagcaaaggcagccagttagcttgctcttggaatggaaactgtgttaaggaaaaaaattctgggaaaccagtgtcttgttggaaagctctcagctcagtccagacataggatgtggtaagtcattccactctggatgccactggcttccttcaatgttttcttggctcaagccagccagatttattagggttccttctaggccaagactttgagggtggggtttcatgtctagcaaggtacatttcccatcttgctttgctctgcttattgggaaaagtcagccttttctgccgggcgaggtggctcacgcctgtaatcccagcactttgggaggccgaggcaggcagatcacgaggtcaggagatccaggccatcctggctaacatggtgaaaccccgtctctactaaaaatacaaaaaattagctgggcatgttggctggcgcctgtagtcccagctactcgagaggctgaggcaggagaatggtgtgaacccgggaggcggagctttcagtgagccgagattgtgccactgcactccagcctgggcaacagagcgagactccgtctcaaaaaaaaaaaaaaaaaaaaaaaaaaa

SEQ ID NO: 1295 - DNA, 446 bp, Homo sapiens
  SITE (12): n equals a,t,g, or c
  SITE (26): n equals a,t,g, or c
  SITE (441): n equals a,t,g, or c
  SITE (446): n equals a,t,g, or c
gctgtttcccangctaaagttccgtngcacaatcacggctcactgcatcctcaacctcatccttccaagtagctcagactataagcacacgccccgttactttgatgctcaaagtttcccaggtgtggccatgggaggcgtcagtggcttctctgttgcgtagggccattggtttgggttgctcctgagtttctgttgctagatactctgtgctcgtcttgtatgttctcaaccctggaagcagccatttctccaaggagcccttgttccctttagtggagggtggtctggatcttggttagaagccaagatcaagattctgggtgtgctcacagctctaggttgttagcagacagagctggaaagtgtgtatgtgaatacaagtgcacagttgtgggtgcgtctgtgtatgtgcgaatacatgcgtctttgtatatgatnaaaan

SEQ ID NO: 1296 - DNA, 445 bp, Homo sapiens
ggtaccgggtccggaattcccgggtcgacccacgcgtccgggaactgtgacttccccaccccaaattctatggccggctaatgttttgctatggtgactatcacccatctacctggaagcaccagaatggcttagtacagctagggagctcagccagatctcggtgtctgctgtttgagattgtgtggaaggactattgctaagaagcaggagacagactgaacccagtgttggccacaagtgaggactgagacccaggtcacctcttggctgaacatgttagcttgttggtaaatggctctgcagtggttctgcattttagtggggaatttgttttggttcattttggcattcccgcaaccatcttgttggttttttggtaaaatgtggcaccccytccagacctyttagctgtggaamtgagrtattttagcagggtcccgtt

SEQ ID NO: 1297 - DNA, 1006 bp, Homo sapiens
aggtttaggggcaggtgcagtgtcaggagtcccccagccaggccctggcactagaggccatgcggccagacttggatgtggcagtggtcttggggcaggtgctgcaggctctaccactcttcaactgtgtcttcctgttctcctcttctcccatcagcaagctcaccccctggcttttgatgccagcctcctttgtggtgtggcaggaatgtcctgggaagagacaaggcttgaccacgtggatggagtgggaagacaggaggcactggggacagcatgtggctggggtgagctagtgggcggtggtactttccccaaagtccagagcactgggtgggagcagcgctcagctgtagggatgtctggtgtgaggttcttctgggcacctggcagagatcccaggtggcaactggcagaaggtccccagctcagagtgggccctgcatggcgttgtatgctggttttcttttgtgggcaggacacctgcaagagggctacagctggagaaatgggtggggargagtggctgttgacagctccctgggcccagagagaattgagtcagaattggggaaattgcagagcgagctcaaaagcagaaacccagttgggggaaagtactgagcccagggctctaaatgactaatgcagaaatgatgttaagtttacctccagtcagagtgaaactttgggcagcccccgctccctacacgcagctgcccttcaggggaagtgagaattggcccaagccacaggtgaccatgacaggaccttgcactagctgagacccgagggtttaggaaattatatgagaaatgaagcaagagatgattatcttttgacagccaagtccccagatggaatttagatatttgaactaggcctaaggaatgtctgtctattaagtgtctgtagaaatttctgtcatctgcttgcacttgctgttttactctgctaccattcttttctctctccatctcgtaaaaaaaaaaaaaaaaaactcgag

SEQ ID NO: 1298 - DNA, 1369 bp, Homo sapiens
ggcacgagggttcacacaactggaacccatctccaggaacaaacagctggaacccatctcccgttgaagggaaactgccagatttttgtaagattcttcctcctgggcacctctaagatactgatggctctgcagaggacccattcattgcttctgcttttgctgctgaccctgctggggctggggctggtccagccctcctatggccaggatggcatgtaccagcgattcctgcggcaacacgtgcaccctgaggagacaggtggcagtgatcgctactgcaacttgatgatgcaaagacggaagatgactttgtatcactgcaagcgcttcaacaccttcatccatgaagatatctggaacattcgtagtatctgcagcaccaccaatatccaatgcaagaacggcaagatgaactgccatgagggtgtagtgaaggtcacagattgcagggacacaggaagttccagggcacccaactgcagatatcgggccatagcgagcactagacgtgttgtcattgcctgtgagggtaacccacaggtgcctgtgcactttgacggttagatgccaccatgtagggattatcgcgagtggttgaccttacacttactccttaaatagcagtgagtaatgcatttgagctgtcccaggctctgtctcctcagctcatttcctactctttttctctatataactcattctattaaatacattgcaccaaagagatatggagacataaacctgtaatgaatgaggctgggcttttctgtaataagcttccttttataatactggtcagcttagctctctcagatcctatcctgtggaatttagttattatgtgtatttatgtagtatttcaaacatttcaaaatgctttcatctatgtttatcacattttaataccacagcacttataatgatgtcactacatatagaagctcaaagttaagggatttgctgaagactgtaaagttaatggaagaattgagacaaaaatccagtgtagctggccacttatccagggctttttctacttcatcacaaggaatgttttgaaagtgtctgctttttttatccttaaaattcacctgtcagggaggcattaaaaatttggaaatgtatgccagcaaaatgtgagctctgtattttttggcattcttatgtttgggtttaataagattaagaaaatgatactgggaattttctttttcctgaaactttgaatcaccctagtaagtcaaagtactaaaaaatgtactagatcattaagacttatgtgctcttactgattgaaagattttttgttttccttgtaataaaggacctaaaccgaaggtacctgaaaaaaaaaaaaaaaaaaaaa

SEQ ID NO: 1299 - DNA, 676 bp, Homo sapiens
ggcacgagtgagacccatgatcaggggatgtggcggggggtggctagagggagaaaaaggaaatgtcttgtgttgttttgttcccctgccctcctttctcagcagctttttgttattgttgttgttgttcttagacaagtgcctcctggtgcctgcggcatccttctgcctgtttctgtaagcaaatgccacaggccacctatagctacatactcctggcattgcactttttaaccttgctgacatccaaatagaagataggactatctaagccctaggtttctttttaaattaagaaataataacaattaaagggcaaaaaacactgtatcagcatagcctttctgtatttaagaaacttaagcagccgggcatggtgctcacgcctgtaatcccagcactttgggaggccgaggcggatcataaggtcaggagatcaagaccatcctggctaacacggtgaaaccccgtctctactaaaagtacaaaaaattagctgggtgtggtggtgggcgcctgtagtcccagctactcgggaggctgaggcaggagaatcgcttgaacctgagaggcggaggttgcagtgagccaaaattgcaccactgcacactgcactccatcctgggcgacagtctgagactctgtctcaaaaaaaaaaaaaaaaaaaaaaaaaaaa

SEQ ID NO: 1300 - DNA, 1061 bp, Homo sapiens
gctgggaactgcttgccacttccttggggcctctgattttaggttctattatatcttgtttaaattcctgaggtattgtgagtcagctaaaatgttataaaccaaatcctattttcccatttacattttcaccttaagatatttcgtcttcattccaaccctctctctcaaattggtaagccttaaacacttcagcggtctgggacagtttctatttaaagaagctctttgccatctatgtatagagagcgttgaatagccattgttatgtttcagtctgtctctctcacatatttacattttaaatatgggctttaaaaaatggggtgcagttttgtttcattcttctgcctttctaaatcctctccaaaattgggtggcccttcttaggttgaaagctgttttctcttgttcctttttttctcatctggattgcagatacatttcactagcaccatttctccttacttgggccttacgagggccttagccaaattccagcccgtgcctccctctaccagtggtgggcacaccatctgcgacattctcctccatcttccttttgtgagataagaaggtagaattccatatgacataagaattccacggctttcacctcctaaatgctcatctgtctttcctcctccctgcaaatgttgactttcaatggctttcaatcttcttttctcagtcactacttttttttttttttttgagacgaagtccagcctgggtggcagagtgaggctccatctcaaaaaaaaaaaaaaaaaaaaaaaaaagcactttgggaggccgaggtgggcgaatcacggggtcgggagatcgagaccatcctggctaacacggtgaaaccccatctctactaaagatacagaaggttggccgggcgtggtggcgggcgcctgtggtcccagctgtttgggaggctgaggcaggggaatggcgtggacccggggggcggagcttgcagtgagccgagatcctgccmctgcmctccagcctgggtgacagggtgacagagcgggactccatctcaaaaaaaaaaaaaaaaaactcga

SEQ ID NO: 1301 - DNA, 2046 bp, Homo sapiens
  SITE (63): n equals a,t,g, or c
  SITE (1670): n equals a,t,g, or c
catgtgaccctctgactcaggttttgtgttcttctagtggaagragcctgggagagccaggcntcccsggactgctagcctgcttttcctggggtccctggagccggagaagaaccaggatgttgctgcctgcagaagctcagctcaggaagacttccaggaacctgaggaggagctgccactaacagccatatttcccaatggagactgtgatgaccttggaagggggtcaaaagcctgtgatggagtcgtacacactcctgctgagcccaccggagactcaagatgaaggctggacccttgcgctgtccctggctctaacctacagactggggcctggctccgtcttactggcccccaggtctccatggagactgcagaaacccccgcctgctggaggcctgccacactcacagttaccagctagacagtggggcttactaagacaagcaggacctaaaacagtgtctcccctgggaacctactccccacccagcatttgctaagtctgatcacagggaggttattttgtctctctgtctcggtttctctgagccactgagacagatggctgtccgctttgaggctctgcagagytgtggcaccccatggtgtgtctgcagtgttctgggcacatgcatgggcacccatcgttgagagtgcagctgggaagaactctgaaccagaagtcatcagagctgaggcatggccttgaacatgtcactcagtctctggggcttctgtttcacaaatgcatgagggggccaccagcccagtggctttaaaccaggggcaggttgtccctccaggcagcattggaaatgtgtgtgtgttgagggggtcacagtgactgtgggggcaccctggcatctagtgggcatcccacaatgtgcagaacagtctctgacagcaaagaattggtccattcaatgccaattgtagtacctttgagacattctggctgagcaatgccttctccctgtcagagtcccccagagcagagagggtcaggcttccctggaccttggctcccagagcaagccaaaataaagactacactgttgccttgggggcttgtcgggccagggccaagacggtctgcgtgctgcagggccaggacagaaatagccacacatgccggtgagaacaaagagcctctttctttctcatgttgacatcgactttctgtgccaagtcctttgggtataaggatgctagggaattcctataggcaccaaacagaaggaaagctaggggcttggactactgggtataggacttgctctagctctcaggtcctagcccaagctcaatgcaaacacagcccctccggctctctgtttctgtgaggttctggaatcccttcctctgtgtccgtgagtctgacagaatcgatgatgttcccttagagctgggaaatccatgtgtttattcacggagggaactcaccattacctcccttgtcttctttgcctgccttggagaaatccagagtcttcggaatggcaaaggcagctcctggatttccctggaggggaggcactagctgagggaagtagctcccttcattcatgatgcacagtttacgcagcagacacacaactgtgcctactatttgctcggtgccctgcaaggtgctgcctaactttgatttgttatttcaasctmtnctcccataatagggagtctaatccctattccttccctgcctgatgaggatgktgtgaggatgaggaggacggcatctcatttggggctttttggcagtgggcctcattttaatcctgcagggctgcctgccagtggatctatccagctgcttccttgtagccaagaatgagttcaatgaattgtgattcactgattttattgattttgttttaaaacagggagactggtatttttgaagctgctatcattttctatttctttattaatttctttgtaatcatcttattaaagttttcttatttagtgggagagggaaaaaaaaaaaaaaaaaaaaaaaaaaaaaaaaaaaaaaaaaaaaaaaaaaaaaaaactcga

SEQ ID NO: 1302 - DNA, 577 bp, Homo sapiens
aggttatgcctctatcccttttttttccttagtttttatgttgaagaacccagggagagttaaccaaagtttgaattttactgattgtacactcatgttgcatctttcttcattccttgtatattttgcaaattggttactgaactcagagacttggtcagactctggttcggtctctttagcaatactgtaggcagtgttgtgttctttcatggggaggcagaagtctggttttctcttttttttaaatcatgtccgcagttgttgggctcagtgcccagatccattaatttatcaatggtttaaaaatagtgacattctaattgtgtgggtttttttaaaattttttgttggaatacttttattaagagatgcttctgcttacctgctgttcagttatccagtggcacagttatataggaaaggtaggatatatacttgattctttgcctttatttattcttttttcaaaatagtgacttagttccctattattctctaagagaaccagctatttaatttaatttaattaattaatttttttgagaccctgactcttaaaaaaaaaaaaaaaaaa

SEQ ID NO: 1303 - DNA, 2108 bp, Homo sapiens
  SITE (5): n equals a,t,g, or c
  SITE (34): n equals a,t,g, or c
  SITE (41): n equals a,t,g, or c
  SITE (2045): n equals a,t,g, or c
  SITE (2075): n equals a,t,g, or c
atccntaatccggcacttgtagaagtcctccatngagttgnccaagttcctagattagatttggttagcacctttgcagacttcaggcctgatgtgtgtttttcttagtacaccatatcaggaggcacagatatggatcagttctattactggttatgttaacttcagcttggttaagatggtgtctgccaggtgtctccattgtaagttattcattttccctttacaattaataagatcttgtrgggwagaaagtaatctttctttaaataaagcagcaatagaatgagagatttttaaacatataaaaagcagaaaaatataaatgaatcaggagtaaagtaacattaaaaattggaatacatttaaagaaccatctactaatttctaaccatatattatttttaataatggtcttaaaatttctttttctatagacaccaaatctggctgaatgaaataaattggtgataagtggaaaaaagagaaaaaccaatgattcataacaatgtatgtgaaagtgtaaaatagaatgttactttggaatgactataaacattaaaagaagactggaagcatacaactttgtacatttgtgggggaaaactattaattttttgcaaatggaaagatcaacagactatataatgatacatgactgacacttgtacactaggtaataaaactgattcatacagtctaatgatatcaccgctgttagggttttataaaactgcatttaaaaaaagatctatgaccagatattctcctgggtgctcctcaaaggaacactattaaggttcattgaaatgttttcaatcattgccttcccattgatccttctaacatgctgttgacatcacacctaatattcagagggaatgggcaaggtatgagggaaggaaataaaaaataaaataaataaaatagaatgacacaaatttgagttttgtgaacccctgaacagatggtcttaaggaygttatctggaactggagaaaagcagagttgagagacaattctatagattaaatcctggtaaggacaaacattgccattagaagaaaagcttcaaaatagacctgtggcagatgtcacatgagtagaatttctgcccagccttaactgcattcagaggataatatcaatgaactaaacttgaactaaaaattttttaaacaaaaagttataaatgaagacacatggttgtgaatacaatgatgtatttctttattttcacatacactctagctaaaagagcaagagtacacatcaacaaaaatggaaacaaggctttggctgaaaaaaacatgcatttgacaaatcatgttaatagctagacaagaagaaagttagctttgtaaacttctacttcatttgattcagagaaacagagcatgagttttcttaaaagtaacaagaaaaggaacaaaaaaaatgaggtttgaaatcttttaccatggcaaaacattaacatctttctcaaaaacatagagaaatctggaaaaatcaagaagataaaattctggaccagttagtgacattctttcaagcatacttgtaaaatgtttccttaaagtgttcttgggatgaaaatgattgtcatgtctccaacaacagtgaactgatgttgttccttggaataaaagtcaatccccaccttaaaaaatgtatggcttctttgaggaattcttatgtcttaaagactttttacattctagacaattaaattgattgaggtcataaattaagaagtgaatagttaccactacacggtaaggtaagcagcctgaaagcatttgtatcatatatgtgtgtgtgtgtgtgtgtgtgtgtgtgtgtgtgtgtgatatataaaataaaaaamtycttctacttgtactttggcattcaatttttagaaattcagtctcaaatgccattatggtatttttcaaatgatacctttaagtcaatggtttctttcgactgcaatagagaagatatggcaagaaaaatgttgcagtaccatcttctgggagaacattcatgaaatccttcagttntagttccacagcaacaattgacaatgtttnttttaatgatgacaggtagagttgatacttctc

SEQ ID NO: 1304 - DNA, 1026 bp, Homo sapiens
  SITE (971): n equals a,t,g, or c
  SITE (1003): n equals a,t,g, or c
  SITE (1004): n equals a,t,g, or c
  SITE (1007): n equals a,t,g, or c
ttccccactttctcatcctctttcctgtgcaccataacttccccagcagtagtctccagtgggaatttgggagggcaggacagaagccaaatccaggccctgagcaaacagaacgctagatgatatcgtcagggagcagcaggtatgcagagacctgggacctactcctgtttctgcgactgacatgctgtgcacactgtgcatggaccccatggcacgatgcaggacggggctgcagaacccacacaagctttgaggtcagacagtccacgaatcccagctctaccacccacagcttttcctcttctcagctgtgtggccttgggcaaattgcataacctctctgaaactactgtcatatctttaaaatgagtaggaaatgagacctcctttgcaaggtaattgtgaggattaagttgtgagggttaattgttctaggtgctttcacccagaacaatacaccagcatataaaactgacctccaacaaatatgaagtcactttatccttgtctggcctgttctgcctcttcaattctatgcaatgaggcataaaaactcggatgtcctgggcctccacgttttacatgtataaaactggggtatcctgtaatcccagcactttggggggccaaggtgggcagatcacctgaggtcaggagttcgagaccagcttggctaacatagcaaaaccctgtttctactaaaaatacaaaaataattcgccgggcctggtggcatgcacctgtggtcccagctactcaggctcctgagtaacttggattgcaggcacatgccaccaggcccagctgattttttcaaattgtctcactatgttgcccaggctggtctcaacttctgggctcaagtgatacttccaccttagcctcctattagtttttcccttacagcaattcctgcaatatataaaaggtctttacttcaagtgagctgtgaatgcaccactgcaatntccagcttggcagaggatgacagagaccctgnnttncaaaaaaaaaaaaaaaaaa

SEQ ID NO: 1305 - DNA, 1103 bp, Homo sapiens
ggcacgagtgaatttttttaaaacaatctagccatcatcaaggtgctataagagttgtataaaagatatttttggcatttctaggcaagtatcagccaataagtatgttagtgatatcacagattgtaccaactattaactatgttaaataagtattcagtttcatgtgatctctgggaaaaaaatatgctgccttggtgctaatattgtatgtatttaaatgatcatccgactcagaaatataaacacttttaatgaaagggaggaacggaaggacaatttccagtgcacagaatcacttggatgaaataagaccagctctttacccttatttttggatatgccttttttggaagagacttagactttatccttattgttgttagtgttgttaatattcgttgcttcagcccacggtgccttggtctctccacaatcaaatggaggatcccccaagcagcttcattacagagtgatattgggaaagtgagatcctctcaccattttgccaagatactctaaaatgacatccaagtttaccagtagaaagacacaggatgcacagaatgggcatgaccttcagctcacgagcacacctggagaaattcagaaccaggttctgaatcatcacgattgccttttgcatgaaaacatcggctggtgatgtgacttctcttcaggccatgagcctaacaccctgccggttttcatgcccgctgcagtaatggacgtttgtgtgaagaaatgaactgtggagtacaaaatgctttgagtctttccgattgctcattaattcacttttttgttacttctttccaaaatggaagtgctgaagccatggtctttctgcccctccaagctgatgaagggaagcctttgccaatggcccatggaagacacttggtttgagaaaccctgcccacttccaaagaccaaagagattaggaaaagcctggcagtattctccaactccaaacaagctctagagtgctccaggaaaagttatattcagtatatgaataagtgttattctccattattaatgtgttctgaaaatatattatgaataaatacatcaccacacccaaaaaaaaaaaaaaaaa

SEQ ID NO: 1306 - DNA, 1421 bp, Homo sapiens
  SITE (1267): n equals a,t,g, or c
  SITE (1297): n equals a,t,g, or c
gcacctgactgcccacacagatggaaaggtggcaatgaggaaggcagaagttgggcctcatcaggtgtgtccaccatatgggcacaggaagcacaagagagggcaggccctcctaccacccaactgcaaagaagcaaggaagtggggggaaggggatgggatacaatgactgactagcctgttgaggtgtagtgatcctgccccagagtgaggaaaggacacagagattctccttccacaggtaggggtgtcttccagtcctgggtgaagaaaacatttatgcatagcaccctgctcatagcaggggttccacagttccagcagtaatgtttgagataaggactgctctgtcgttgaggcttatccccctctttgtgtctacatgtggagttacccagaaataagaacatctgggttcttaaaaagtagcatcccaacacaccaactttgatgcccactccctccttcgatgctcaactttgccctcagctataggagatccgagaacagtgactattccaagactaaaacctgactccctccttggtacattctaattctcctcaacagcaccactgagtaacaaggacactgcctaaggtaagtaagggtcctcaattccccccaagtttactagcacatgcataaaatattattaacaccatgaatggaagaggatgacgggataaaagaaattaggcttaataaagtgaatgtctataaaggaagaccagatcctgaaatgaaaaggcaaaacttatttgtgagctttggttaaatttatcatgaaaattacacttattaatgttttattgytattaacagcatccgaacaatcctcatcttttgaagatgccaggagcaattcggaatactatctgattgaatgtgaacctgcctggttaatttattacctgatttgatgaaccaaggaaagccatgcktttaaacaaatatttacatttaatatgggaacataaaagagctttaaatattatagactttgtacctgttatatatatgaatattccctatgttaaataataataataactagtgtttatgaatagaatcatatcatctttagaaattgtttaaaattagttctgggaagttgaaagtggggaatgaagagataataaataaaactagattggccatatgtttataattttttwagattgggtaatgaatacatggagtttcattatacttttctctccacttttgtctatgttgaaaattttctgggagctaaatgatgagnacacatgggacacmtgrtgggggacaacanacactaaggcctgttgaggcagggagtcggcagagagagagcatcaggaagaatagctaatggatgctgggcttcatacctgggtgatgagatgatctgtgcagcaaagcaccatggtacatgt

SEQ ID NO: 1307 - DNA, 845 bp, Homo sapiens
gctgttttgggttccccagctacagtcggaaagacatcagagtgttcaaggcggagtccaggcctgagatctcagcaggccagacaggcagcagatgcttgttgcttttcttgtgttatatttttcgttcccttacttagcatttgtgggaccaaagccaacaaacaacaggttgttaaaagaatgagagtaatttgacttccgacagtgattggggctcggggttgttgggtgttttgttttctgatttgaaactagctgtatggtaaccactaactctcgccttattctttaatggaattttggaaaggcctcactccagtgactctttggatctttcttcyctaagtagatgggaagcctgtaagaagagacttggaggcaaagcaaagggaatcagcacttaaccctcacccaaagggcccaagagaatctttagtaactggaggcagagcagactggagcctctayggggcatctccccatattggagaattcagtctttgttttggaaatcttataatgtctttggagaggctttaaataattttgtttttcttagcaatgttatgctctattttgagacatggattttttttttcttctagtgtttctctcctgaggcaaagcccaacacacctgtcttttgtccacttctccagcaaattagatttgtctctgggaatgtgtttgtaacataccaacctactgcagaccagcagagggagctcccatgttgaatttgtttgttagctattttcccccctttcacaaaaactatttcttgacgacctttgagagatttcaataaaaattttaatcagagcaaaaatgaaaaaaaaaaa

SEQ ID NO: 1308 - DNA, 1781 bp, Homo sapiens
  SITE (1363): n equals a,t,g, or c
  SITE (1377): n equals a,t,g, or c
gttttaatggataaatttgtgtgttgattttggaggaataaactcagaatactccctaaagatagtgaattttggtctgggtaatgaaaagtaggaatataattgattggaataatgttgtcatatgttgttttaatgtttatcttaaaattagtaacttttccaaggaaaattttatttgatagcataacttctctggatattattttaaatcagtctggtaaagagaaaaaatacagaaagtattataatttgtgttttcatcataaaatattttgcatcagtatcttattgcagtacggtaggagactatgagaaatattttgaatcttaaaagtaccagataaagacacaataactaatgattttgtctttaggagggccagaactaattgatcctgctggtctgccattacctcagccagctcagtcctgggtatggcttgtggatctagaaagamcaattgctctccttattgggcggtgtcttggtggcatgcttcagggctcccctgtgtctccagaggaacaggacactgcatattggatgaaaacgccactgttcagtgacggtgtagaaatggacactcctcaattgggtaatgtgcttctctgcagcatttaaaatacatgcctgtttgtacctcagttggagatttctctattctgatttgctaaatagagaactgacaggcaccaattgcaacattagcagtgtagggaatctggggctatgacttggagccctaagaaaaatggttaaatcgtgcagcacaatatggtgaaaagagcccccagaggaaatagaaattgtaggtctggtcctactctgtcatatttatcactcattttgagcaagtcatctaactcaatgcttcatcacttattttccgaggcttggaggttatgaaactgcttcccagaatgtaaagcactgtaagagtacttmaccatgacttatcagtgcmgcacccctgagatgtgagtggcagcctcttttcctcccagcctgtcttgctttcatgctgacattatattatgtcctaattttttcttcgccacttaaagtgcctttagaatttcccttctgcagcatctcccatttgtatatattgstggcaggctagwwcctagactgarcatgaagacttatctggtaccccagataatccagttgktttatctagaattggtcctttaatctctctaggcttctaawtttgattctataaaataatgatttggattagacaggctacatgatattattagatctaaaatttattatttctctgataagacaaagagactcaacatgtccctgaaggaaagtctaagagagactgagaggaaagaaggagancggaaaagaaaagnaaaaacaaaacaaaatgagaaagattatactttgggatttggagggttggagagtgggagtgagggaagcagttgaggattttcctccatttccaaatatgagtgtacattcatcatttcatttatgaaccagaaagtgattttggccatggctggtgaatgttggactggtgtttatgaaacattttgttaaagaaagtaaaatcatggtttttcaaggggtytttaacatgataaagataattccactgctgtcagtgtttaaccttgtgacagtcctaaaggacctcctgagaacaaaagtatctctatctctaccctcttcatatttctgttatatttattcaattaaactggcctttaatatgaagaaaaaaaaaaaaaaaaaaaaaaaaaaactcgag

SEQ ID NO: 1309 - DNA, 919 bp, Homo sapiens
  SITE (11): n equals a,t,g, or c
ttacttaattntactgtcataccatgctattacctacactcctgtgtgcagtgggcattcagtaaatgtgtgttgaaggactgggacgtacgtggaggctgctggacctggtcagagactgatgtgccttagcggcaatggttagagcttttcagtgcatcccacctccctgtcgcccccatgctcggcttcctcacattcaggagcctgacttggatcagacttggggctgcacagtggagcaggtgggttcccgtgtcattagtaataaggagagggttgggggtgggcagggctccagaaagtcagcagtgtgcctgggcacccaccccatcctctacctgccacacctcagagggttcctacagctgcacacaagcagttgagagttgatgaccaggcccatagggctcccacagctggttcccaggccagtgagtgctgtgagaatacagtagcacaagtccttgttctctgaagagtgggaaggagaggagtgagtgaagtagcctgtcccctgcaggtcctctgcgatggcattgtctcggttcccgcagtgctgcagtgtggaagggagtgccccatcctcattacagatgacacactggagtgtggaggggtcgatgacttgtgcagggtcatatggtacctaaggggcagatctcagacttaaacacaattgatgtctaacccctagacagtctttttagtgccctctgctctcagtcttgttgccctagtatcaagcaatcttagacaaacatcctgaattcttacaaacttacctctaaactctgaggataaagttgccagtccttttaatggtcagcctaatcattctgtcagcctaatcgggtaattgctttttttaataaatacacataaaaaccaaaaaaaaaaaaaaaaaatccaagggggg

SEQ ID NO: 1310 - DNA, 495 bp, Homo sapiens
ccacgcgtccggtagatcttaactgtactcacccctccaatacacaccatacatgcacaaaatggtaactgtgtgtggtaatggctgtgtaatctgtggtaatcacaaattaatgtatatcaaatcaccatgttgtgcatgtttaatatatgtaatttttatttgtcaattatgcctcaccaaagcttgtgggtggggggaataatgaactctgatgtaaggtatggcctctgggttatgatgtgtaaatgcaggctcatcagtcccacaaatgtcccactctgggggaatgtgagaatggagactgtgcatgtgtgggggcatggggtatatgggaactgtaacttcccttccattttctgtgaagttaaaactgcttttttaaaagtctgtttaaaaaataaaaataaaatgaagaatgatgaccgtgctgaaaaaaaaaaaaaaaaaaaaaaaaaaaaaaaaaaaaaaaaaaaaaaaaaaaaaaaaaaaaaa

SEQ ID NO: 1311 - DNA, 1483 bp, Homo sapiens
  SITE (508): n equals a,t,g, or c
  SITE (711): n equals a,t,g, or c
  SITE (1021): n equals a,t,g, or c
gaattcggcacgagcaaacacagtttcacactgattcttaacattttgttcaacttttactcagagggcaggctgagccagggagcaaaaaggcaaaggactcctactcacatacccacttagcaaaaccaaagcaccttgggctttgaacccacccttcttagaaggcaggtttgggggttgaggccccttgagaagctcacttcaccctctccccatgccatcccattcctacccatcccaagatgcttctcttgtatttctttcagcacatccagccatctccctggggagcgtttcatatctgactctttatacttccagtgatgttttggcatccctaatagactggctcccaaggcagtctttaatcaggagtcttcccctaatctagctcctcaagaacccaagggaagaggcacaaagagaagtatgaataggaagatagaagggtaacccagtcagagagggagtggcagatgacactgctgaaaaggagtttccaganagttgcacaccatgagccacgctgtctgtccctgaccacaacctccactggccaccacctcctgggcttcccctccctccacccacagaaaccattgctcaatctcaactggactcttgmaggcctatytctmcctccaaacagagaytcctggacacagagctgcagacctctaaccactcctggaacataaaaaaaaccanggtggttctacagcatttacacctccagtttccctcagacagaatccagaagagaagaacctcgctgatctctgagcggagcatgtctccaagctcaggccagccccaaaactccaatggcctcaactggagtggaaatccctcaaaggcacaaacccagttcctaccatctccctcagtgcctggcaatgtttgtggttggttgagtgagttaacaggagaccatcttttggccttttttctacctctgttttctcttactatacttgcctacatctcatcttctggtcaacaccaggtactcaccccntgagcttcttgtgaacttgtctggggcccaccggcctaaacatcatcttttttgtttggaattaagctttgttgaacttttcacaggtttcatttatgcaaatgcctgtgatgggacaaaaaggtctgcaaacatggaaacctggtctaaagatgtccaaagtaaactgtctgtggagtcgaatgacatttgagccctggacctaaactccaaatccaagctctttcccactgtgaccttgggcctctcaaggctcagtttcctcacctataaactgtagagaagccaatwacagactcatccacactatgaggctgtgcataaggtcatgtatgtaaaactacttgctttgttgatcattctgtcccagataagtatgaattattatgcatcatttcattaaacaagaaagcttcactgtgttaatatgcacaagtaaaaaaaaaaaaaaaaaaaactcga

SEQ ID NO: 1312 - DNA, 1332 bp, Homo sapiens
ggcacgagaaaaaacattaagacagaacttaaaaacaatagattgactataatccaaagacgagtgtacctctaaccacaattttcatttatttttaaatgtttccttcatggcctttcttgtggctcaccctatgcagtttgtgtatttgttgacaactttatgtgtttttaatatggtttttgccaaacttggtttttccgagaccgtcttttctcagaggctcagttttaccgtcctatctgcagtcggctactttcagtgggcagaagaggccacatctgcttcctgtaggccctctgggcagaagcatgcgctggtgtctcctcctgatctgggcccaggggctgaggcaggctcccctcgcctcaggaatgatgacaggcacaatagaaacaacggggaacatttctgcagagaaaggtggctctatcatcttacaatgtcacctctcctccaccacggcacaagtgacccaggtcaactgggagcagcaggaccagcttctggccatttgtaatgctgacttggggtggcacatctccccatccttcaaggatcgagtggccccaggtcctggcctgggcctcaccctccagtcgctgaccgtgaacgatacaggggagtacttctgcatctatcacacctaccctgatgggacgtacactgggagaatcttcctggaggtcctagaaagctcagtggctgagcacggtgccaggttccagattccattgcttggagccatggccgcgacgctggtggtcatctgcacagcagtcatcgtggtggtcgcgttgactagaaagaagaaagccctcagaatccattctgtggaaggtgacctcaggagaaaatcagctggacaggaggaatggagccccagtgctccctcacccccaggaagctgtgtccaggcagaagctgcacctgctgggctctgtggagagcagcggggagaggactgtgccgagctgcatgactacttcaatgtcctgagttacagaagcctgggtaactgcagcttcttcacagagactggttagcaaccagaggcatcttctggaagatacacttttgtctttgctattatagatgaatatataagcagctgtactctccatcagtgctgcgtgtgtgtgtgtgtgtgtatgtgtgtgtgtgttcagttgagtgaataaatgtcatcctcttctccatcttcatttccttggccttttcgttctattccattttgcattatggcaggcctagggtgagtaacgtggatcttgatcataaatgcaaaattaaaaaatatcttgacctggttttaaaaaaaaaaaaaaaaaa

SEQ ID NO: 1313 - DNA, 1676 bp, Homo sapiens
  SITE (1669): n equals a,t,g, or c
tattaagattgacaggtttttscacatttttggaaatgtttaatttgtacactgatttactactctraccaataattgttgatgagtgtatgagcatcatgaatgcgtgcattgaactactgtctgtgtctttatgttttaacttctttcaagatgtagccatcagttactgcactgctattactgacttaaatggacctttttscttttacaaactatacttatctatggttctttgttgaagaactcaggagttcgacattaatagaaattagaaaattttataatgtattataaaatccattactaagttgaaagtatgcttttaactctgtgtatcaggggatgtatgtttgtgtggagatgtttttttctgtctgtaggcacatgtatatatcccagtaagttcttattttcatttcatttctacatttttatgaacttgttttataagggtactgtttagttgtgataattaaatatatataaaagctttctgagagattatttactatatgaatatattttcagctggctgatcaaaagtatttttaaaattttgyttttagccattcaaaatgtatttgtattttcagaattgaatgcaagtcatacttagagctcaattaaaatactcttgcaagaaaaagcattaaattctctttgagaattccgtgaaatgcaaattaagggaaaaataggttttaagcagtagcaaaaacacaccgctaaaaatggcctttgaattctcagagctatggaaaaatgtgagaaactaaattgtctcgagatgtcaagatttttctatctccagttgctattggcctgtcctactgttgtctttgaatatttcctgtattccaccccaaaagatttcaacttttagtttttctatcactgggcaaggtcagactgggtttataaaacaatatattggcatattgtgattctttgtaattgactataaattggttttgaaatgtccaaacatacgttgtgtgtctttatattgtactgtgtgttttaagtaactggcagaaaaagaattggaaatgaaatttccaatcagacaatgtagtattaaagaaaactttgttttaaatatgcggtaccatgtaaaattactcgtgttaggaataaagtccactgttgaagttgaatgtcactaagcttattatgttaaaaggaaccagtgtgattaggaaaacctaccagaagccagatacagtgtggtacgtgcaacatttcatgcacattttgattttgtttgtcattcaaaattgtgcttgtaaaaatgtatacaatttctgagttttataatttctaggtacttgttttttcttgctggtaaatagcttttttttaaaaaaaaatctaatataaaagaaaccatgtttatattttgttagtgatcaatgactttgtttatatggaaatttgtatattgttggcacacattttgttgaggtttacgtgcatgaaggcctgcaataattagcacaatgaaaactgctttttcttacatgttcatttttttgaaagattgtggtgcaaaggcttactctaataagtaaccttctggactatggaatgaatataaatgaatggcactttgagtgttaataaagctaatatttatttccacaaaaaaaaaaaaaaaaaaaaaaanaaaaaaa

SEQ ID NO: 1314 - DNA, 947 bp, Homo sapiens
ctgcaggaattcggcacgaggaagctttgataacataaattgcttgcctgccatttaacaatttttgaaatgaattattgtctaaatagtttcaatatatgttttattttatgaatttaacaaaattcttttttcttgatttagctaattttaatagagtgttttcttatcaaacatttacttatcttctaaaactccattcttgcaaactgtttggagggatttgtttttatttttattttgtagtatagctcatgtatctagaataacttgttatgtttattatttcatcatcataaattggcttatatttcatatgcttgcagacatatagaataatcgaaaacaacaaaattatatgtatatacatatgcatacacacatatgtaaaatgtgaatgttttttatgttttgccttttattacacgttctgccttttattacatgttttgccttttattaaatctcactttgctcttcctcattcttttcggggagacatactttttcttttaaattctactactggctccttacaaaattaactatcctttaaagtttatttattaaatttatagagtcaagtttgaaaaattgttttatttcatcctttatgcaacaaggtatttattatacttttatttttcatcatctgtgaatatttagagccaaatttttatggtctttgtggttttattcttgctatattatctctgtctggaatatttatttatgtatatatttattaaataagatttacataaaaggttgagccatttattttagaattaattcaaagctctttggatgtaattttattctaaggctttgttattcttaagttcttaattttaattcctatcactgtgatttagaataaagtgatatttcttcaataattgaaaaaaaaaaaaaaaaaaaaaaaaaaaaaaaaaaaaaaactcgag

SEQ ID NO: 1315 - DNA, 1744 bp, Homo sapiens
ggcacgaggtcagagaggctaccagagtgtgattcattctgcctctgtcctccccatccctgctccttgacctctcccagacaccttggtgttggtcttgtgccagggtattcccagggctgaatgatggcctgtgttggtttttttgtttgtttggttggtttgtatgtttgttttggcacagtgtgaaggggtcgcagactttcacttattatttgctgagttgtccatgactgatgtccatttctactgggtgatccacccccaaccctttctaaaaggctaactgatcttttcttgcttctgtacgctctctttccctctcctccctctcttttcttaatttcagggactccttccacagatctagtttcaggaaatgtgaaacccagttgtcacagggcagctaagaaaagccatcttcattcgtggagactgtggccctgcaaccctggagaaggacttgctggtacttaaaaaatgggacatttgccacccaggactgactgtacactccctgatcagccagcactctggaagctttgggatcccaggaaccatggaattattcccaaatggactctgaccagatttttgccatactggggggtggcgggatggaggatgggtactcaggcatgactgcgtatttattaaagtgtgtttttccacaatgtaccaaacaaggcataagcagcttctcctgctgactggccaatcactgcccatctgagagatgatttcctctggcccatatttgaatttattggagtaactcaaattgcctgaggaaaaatggaaaaattatccaccagtcgattcaaactgaatttcactctttataggaaggcagggcaaacttgtaggagtacgaaacattttcaataaatctacaaagggaagccttactacaattccaaaaatcatcatggttggaaatttgggaggagattatttgtgaacttgttacccttttggtaatggtggactaattgctgtatagttatttttgttttattattactgttacattaatttaacatgcatttatagaagaatacattcaaagcactgatgtaggagatacacggtacttggagcagtcagccaraaatcacagatactgctttcacttaaatggaaacaattctccgataatgctttgctttttttcttatgtcactcttgtgtactatctatttttctcctctctgggaccaagtttctttttataaagcaataatatctctgttttcatttcagaacattgtgctgtctgtcagcatatgtatatcagctacaaaatatattcaactttgacttcttttgacaaaggactttaggaaaaagaggaacaaagacattatttgagaattaaattatatatttttaatatgactgtgaccttgactgataataaagatgtaataagaattgcaagctaaatgtttccctttgcaactcatgctttgtgttttgttttgatgacctactcgctcgtaatgttttgtaaggcacttcagagagaagacagatgcatcatcctggcctccatcaaataacactawccaaggtggcacctcttctgcaatgtttaaccctgctagtaatgaacgatgacttagttcggatatwwcagaactttttgtttataccatcaggtatgcatgaatttataatctgaaagaggacttaaaataataattaaaasttaccagcttaaaaaaaaaaaaaaaaaactcga

SEQ ID NO: 1316 - DNA, 1744 bp, Homo sapiens
ggcacgaggtcagagaggctaccagagtgtgattcattctgcctctgtcctccccatccctgctccttgacctctcccagacaccttggtgttggtcttgtgccagggtattcccagggctgaatgatggcctgtgttggtttttttgtttgtttggttggtttgtatgtttgttttggcacagtgtgaaggggtcgcagactttcacttattatttgctgagttgtccatgactgatgtccatttctactgggtgatccacccccaaccctttctaaaaggctaactgatcttttcttgcttctgtacgctctctttccctctcctccctctcttttcttaatttcagggactccttccacagatctagtttcaggaaatgtgaaacccagttgtcacagggcagctaagaaaagccatcttcattcgtggagactgtggccctgcaaccctggagaaggacttgctggtacttaaaaaatgggacatttgccacccaggactgactgtacactccctgatcagccagcactctggaagctttgggatcccaggaaccatggaattattcccaaatggactctgaccagatttttgccatactggggggtggcgggatggaggatgggtactcaggcatgactgcgtatttattaaagtgtgtttttccacaatgtaccaaacaaggcataagcagcttctcctgctgactggccaatcactgcccatctgagagatgatttcctctggcccatatttgaatttattggagtaactcaaattgcctgaggaaaaatggaaaaattatccaccagtcgattcaaactgaatttcactctttataggaaggcagggcaaacttgtaggagtacgaaacattttcaataaatctacaaagggaagccttactacaattccaaaaatcatcatggttggaaatttgggaggagattatttgtgaacttgttacccttttggtaatggtggactaattgctgtatagttatttttgttttattattactgttacattaatttaacatgcatttatagaagaatacattcaaagcactgatgtaggagatacacggtacttggagcagtcagccaaaaatcacagatactgctttcacttaaatggaaacaattctccgataatgctttgctttttttcttatgtcactcttgtgtactatctatttttctcctctctgggaccaagtttctttttataaagcaataatatctctgttttcatttcagaacattgtgctgtctgtcagcatatgtatatcagctacaaaatatattcaactttgacttcttttgacaaaggactttaggaaaaagaggaacaaagacattatttgagaattaaattatatatttttaatatgactgtgaccttgactgataataaagatgtaataagaattgcaagctaaatgtttccctttgcaactcatgctttgtgttttgttttgatgacctactcgctcgtaatgttttgtaaggcacttcagagagaagacagatgcatcatcctggcctccatcaaataacactawccaaggtggcacctcttctgcaatgtttaaccctgctagtaatgaacgatgacttagttcggatatwwcagaactttttgtttataccatcaggtatgcatgaatttataatctgaaagaggacttaaaataataattaaaasttaccagcttaaaaaaaaaaaaaaaaaactcga

SEQ ID NO: 1317 - DNA, 1982 bp, Homo sapiens
ggcacgagccgaggagcgcttccgccctcagtggagcctgagagacactctcgtaagtacatgcaaactaaagaaagtgaaattcttcctgaaatggcatctcagttcccagaagcgatactgctcgccagctgtgtctcagtgtggaaaacagctgctgtgctgaaatggaatcgagaaatgagatagaattatttcctcagctatctttggatgactttggagagaagactcctctctcctcgtctgcggcgtggacttgatcatggactggtgcctttgcattcagaaggagagctgtcagcgtagaccgaattcaagaccaaggcgtgctacctgagctgacagctttttgaaagccgagctgtttctgaaccatgtacatacatgttctgaaactttctcatcattttatgagtactgttcattgagagatgacaatgaagattagatgaaattggaaataaaccaacattgtttacattccaggagacttgtagctcagccacacacgcagtaatgacctgtgcccgttcgcctctggcactgcccacccctctttttttttttcttctaattctgtactcacaaaagagaatctcattttcttctttcttccattcccttaaattctgagtactgtacatatatttctgggttcccacgatgatgtgaaaaactaccagactgttttttgtcttctcacaaagacaagaaaaatcagggcattttgtgagtgccttaagatcaaactaacaagatctgaccctctcccctcacagtgagccactgccccacttcagagggtaagagccaaaagcctcattgtgaaaggcactggacttggaccagggacaccatcagggccttggttttctcacgcataaaatggagagtggattaatcgccaaagattcttctgatctgacattttgaaattatgagagaaactagatgactgtaaacttggtcacaggcctggttctggcagttctttgcggacttttttctagcattatgccaaataaacatgcagtctcagtgtgctctcgcatgtatgaatatctagtcctttctgtggttctcagccaagacataaaaactaggactcagagcacatacaaaaccagttatgtttcggaaagagggaaaagagtccccgagcccggatcttgtgctgcttttctcactgacgtgttgccttttttctttacaaaatctgctttgatacttaggacctctctggactaatttctcttcctagacagctcagcacagctattgatatgttagaggcagtatccttaatattcattctaaatgagttaacgacttaacttgaaattgggcctaaggagtgagaactacaaaaatacaaaatgcttgtccaggactcagccatgtacaccttgagcagcgccggcaggaggcacggaaggaactgtgctccgttctcctcactgtcatggtgccaccagtgtctgatgaagggcagagtgacccagactgcaggcagtaactgacttcacacagtccctggcatttagtcatctgtgattgttttatcactctggactgtgcagagccacctgccaccgagatctgcattccgactgcctatgaacgggtgtgggggccgggggctggcttgctgaagtcttcaacttgcactcggagctcctttgatacctcagagctggctgtcaggtggcagctcacacccagactcactggccacacctcagcagggggggagtcgagtgtcagtctctttctgtgaaggctttttttttcctttggcctgggaatttttcccatttttatgaaggggttttaaattgtttcattttgtgtgctgtgcttcaaagccttaactgtcaaatcttgcattatcttgtttgtacagaaatatactggcctagcagaggcaaaaaaaaaaaaaaaaaaaaaaaaaaaaaaaaaaaaaaaaaaaaaaaaaaaaa

SEQ ID NO: 1318 - DNA, 2689 bp, Homo sapiens
  SITE (2316): n equals a,t,g, or c
aaaatgtcactagttccgaagctgagaaatagttacatatgtgtcatttctcactgagtgctctcaagagttttgtctttaattctctgaaatttggatttgatattctagacatggatttcattgcatttattctatttgggtttcattcatcttcttgaatgtgtaggtttacatcttttgccaaagttgggtagttttaaggccttctttcttcaaatatatttttagctctgctccttttctgtttctgggactctgatatgaatgttggatcttttgttattatccctatggcccatgggcttccattctttttttcccccaattggattgtatgtctggtctagaatggataatttctattgatgaatgttcaagtttattatttcctctgccatctccattctgttattgagccaatccagtaatttttaaaaatttacttgttgaatttttcatctccatttttttctatttggttctttgttatatcttctatttctttacttagtgccccctcctttaatttgatttaagagtgtttgcaattgcttggtgcattttaatgataggtctcttaaactcattgtcagtgaattattaatggcaaaaactgaaattacttttgcaccaaccaaatacagtatcagtgtaatcttggtgttggtatctgttctctttttctattaggtttagatttgcctggttttggtataatgaatatttttaattgtatccttgatattttgagtattaggttatgaggcccaggtttctattcattttgtgtttaactttttaagaaactgccacactgtttcccaaaagtaattgtaccattttaatttccaccagcagtatgagcttcacctgcttcttatcttcactaacacttgctatacttagctttttaagtgctagccattatattaggcacatagtgttaacttattgtgttttaatttgcatttcacttgtgactaatcatatgtttatttgacatctgtatatcttctttgggttgttgaattttaaggtctttttatattcaagtctttgtcagatatatataagattagaaaatattttctcccagtctgtggctaatcttttccttctcttccccaaagtccggttaagagcaaaagcttttcaattttgatgactaattaatttatttgttaaggacttgcagtttcagtaacatatataagaaatttttgcctactccaaggttctgaaagttttatagttttaagcatatgatacatttttagttaactttttttttttttaagacagaatctcactctgtcacccaggctggagtgcagtggcgcgacctctgctcactgcaacctctgccttccaggttcaagagattctcctgcctcggcctcccaagtagcggggactacaagcttgcaccaccatgtccagctaatttttctttttttgtattttcagtagagatgaagtttcaccatgttggccaggctggtcacaaaccagccagcctcagctgatctgccagcctcagccccccaaaatgctggaattacaggtgtgtaccaccattcccagcatttagttaacgttttttgtaggtgctttgagctataaatcaatgtaaatttttaaacatatatataacaagttcttctagcattgtttgttaaaaagattacctcttctttaataaatttcctttgcaccactgtcacaaatcagttgtccatgtatgtgtgtttctcaactctctattttattccatgaataccacacagtcttgattactgtagctttataataagtcttaaattcaggtaacatatgttctccaactttttctttttttttttgagtcggagtctccctctgtcatccagactagagtgcaatggcgtgatctcggctcacttcaacctccgactcccaggttcaagcaattctccctgcctcagcttcccaagtagctggaatttcaggtgcctgccagcagacctggctatttttgtattttttagtagagatgggttttgccatgttggctggtcttgaactcctgacctcaggtgatctgtccaccgcagcctaccaaagtgctgggattacaggcatgagccatcgcgcccagcctattttccaactttcagaattatttttaaaagttggtttcactaatctaggtcctttgcatgtccatatgtattttagaattgagttcccaatttgtacaaaacaaaaagcctcctgaatattcaaaatgggatttcactgaaggcctaggtcaggttggaaagaattgacatnattaaatggtattgagtcttgtagtctctgaacatagtatatctctatttaggtcttttttaaagttctcccagaagtgtttttaatttttatactatacatcttgcacttcttttgccagatgcatcactatgtatttcatattgtttatggtgttataaatggcatttaaggttttaaggttcagattgttcatggctagttcatgcaaaatcatctgctttatatatattgatctttattttgccagtctcactaagctcatttagttctaatagtgttgtagataccttcagattttttttatatagacaatcatataatctgttaataaagatgattttacttcctttccaaaaaaaaaaaaaaaaaa

SEQ ID NO: 1319 - DNA, 1573 bp, Homo sapiens
tcacggctgcggaagacgaggttcttcgggacacccgtggatggacacggcaaggaaacaccaggccaaccacagctggggataaaatagcacaaccacaccctgccgtccagcgcctcccagcctgtgccccttcctagtaccaccagcaaccatcaatcccgtctcctcctgcctcctctcctgcaatccaccccgccamgamtatcgccatggcagccytgatcgcagagaacttccgcttcctgtcacttttcttcaagagcaaggatgtgatgattttcaacggcctggtggcactgggcacggtgggcagccaggagctgttctctgtggtggccttccactgcccckgytcgccggcccggaaytacctgtamgggctggcggccatcggcgtgcccgccctggtgctcttcatcattggcatcatcctcaacaaccacacctggaacctcgtggccgagtgccagcaccggaggaccaagaactgytcsgccggccccaaccttcctccttctaagctccatcctgggacgtgcggctgtggcccctgtcacctggtctgtcatctccctgctgcgtggtgaggcttatgtctgtgctctcagtgagttcgtggacccttcctcactcacggccagggaagagcacttcccatcagcccacgccactgaaatcctggccaggttcccctgcaaggagaaccctgacaacctgtcagacttccgggaggaggtcagccgcagtcaggtatgagtcccagctctttggatggctgctcatcggcgtggtggccatcctggtgttcctgaccaagtgcctcaagcattactgctcaccactcagctaccgccaggaggcctactgggcgcagtaccgcgccaatgaggaccagctgttccagcgcacggccgaggtgcactctcgggtgctcgctgccaacaatgtgcgccgcttctttggctttgtggcgctcaacaaggatgatgaggaactgattgccaacttcccagtggaaggcacgcagccacggccacagtggaatgccatcaccggcgtctacttgtaccgtgagaaccagggcctcccactctacagccgcctgcacaagtgggcccagggtctggcaggcaacggcgcggcccctgacaacgtggagatggccctgctcccctcctaaggaggtgcttcccatgctctttgtaaatggcactrcttggtcccaaactgaaccccactgcttgctcacatccatatcagaaggggatttttaaaaaactgttatcttcttggccaggggaaaggaccacaaggcaatctggggtgtggacagacccagtagacaatggaagccccagccagcagggccaggtgacagtgaagctcaccagtgggctcctttatggtactctatgcagttaacatgtatctagctgcatagggacacccagcgcagcagtgcaccactgggaagtggcctccagtgcasctctggccttattttatatatttaaatttttgataaagtttttcttactaaaaggacaaaaaaaaaaaaaaaaaaactcga

SEQ ID NO: 1320 - DNA, 1986 bp, Homo sapiens
cggcacgagcggagatacaactcgtcaacgaatcaaattcagtgatgacagagtatgcaagagtcaccttctcaactgttgtcctcatgatgtcctttctggaactagaatggatcttggagaatgtctgaaagtccatgacctggctttaagagcggattatgaaattgcatccaaagaacaagattttttctttgaacttgatgccatggatcatctgcagtcattcattgcagattgtgatcgtagaacagaagtggccaagaaaagattagcagaaactcaagaagagattagtgctgaagtagcagcaaaggcagaacgtgttcatgagttaaatgaagaaattggtaaattgttagccaaggtggaacaactaggagctgaagggaatgtggaggaatcccagaaagtaatggatgaagtagagaaagcacgggcaaagaaaagagaagcagaggaagtttatcggaattctatgccagcttccagttttcagcagcagaaacttcgagtctgtgaagtctgctctgcctatttaggacttcatgataatgacagacgactggctgatcattttgggggtaaactgcacctgggatttattgaaataagagagaagcttgaagaattaaagagagtcgtagctgagaagcaggagaaaagaaaccaggaacggctgaaacgaagagaagagagagagagagaagaaagggagaagctgaggaggtcccgatcacacagcaagaatccaaaaagatccaggtccagagagcatcgcagacatcgatctcgctccatgtcacgtgaacgcaagaggagaactcgatccaaatctcgggagaaacgccatcgccacaggtcccgctccagcagccgtagccgcagccgtagccaccagagaagtcggcacagttctagagataggagcagagaacgatccaagaggagatcctcaaaagaaagattcagagaccaagacttagcatcatgtgacagagacaggagttcaagagacagatcacctcgtgacagagatcggaaagataagaagcggtcctatgagagtgctaatggcagatcagaagacaggaggagctctgaagagcgcgaagcaggggagatctaactagctgtgtacatttcttcagtccttaagcttcctacggagttacgtactattgtttagttcacagctgttcagggtgacagtgagcagatccagacaccagatctagctaggctagatgtacagtatctaacttgatctgaactgaacctgttttccttgatgatgcctaaaactacatccatagtttctggtgaacctgtaatacagttctgaaagtacagttttatataataagatgctgatctctttattctttcaagtaagagtgctagtgaacaaattgtgttacttgccttgggattttttgaacgtttgtaaaatgctgtcttcctagtccaaacagctgcagctttgggcatttttctttttaattattcttcctctgactttgtatcccttaatacctacactctccaattgtaagagaaagggggcagggaagcaatatagcttccattctaaggctgtattcgtgttatgaattactagctgattacagttcagagcattgatcctggaatgtgtgctggagaaatttaaaatactggggttttttgtttatggtgcctatttagagttggaagttgaacagctgttgcattacatacttttgcttttttattgaaattttgaaatcaaacgtcttgaattttctgttctgttgaattgctatgttcaggatgttctagggggtgggggcagggactcttttcgtaataagcacttgttttattttgtgtgtgtggagtataaaggctacacccttattgtaaaaaaataataataataaaatgaaagaaacaatcaccaccaccaaaaaaaaaaaaaaaaaaaaaaaaaaaaaaaaaaaaaaa

SEQ ID NO: 1321 - DNA, 1993 bp, Homo sapiens
ggcacgagcttctttagaagcattcctgcgtaaatactgctgtaatactgtcatgcaaagtgtatcctttcttgtcgtatcctttttggggcagtgtttttttgtttttttcctagaaatgtttgtccttcccccacctgttgatccaggttaaggaatacttttttacactttattcaaatgaaatatttctaaaatatttgtatagactgaacagatcttttatgtgtttttagatttgttgttgaattttctgtgctgtcctttatataattttttgagggaaagttagtgaatcaggtcaacttacttagagaatgtgttcatttactttaacccagaatacagtcttgtttcttctatttgtatgtttcctaaacctaattcaataacatatgctttctgttgtgtaatatatctggtttaggtatttataatgtgtttaaaatttgggcaaaggaaatgtttttcttttaaaaagtacttacattgaaaattaagatgtctggattactatgtaaattctagagagtagcagacctctcatctgaagtcttagtgaatctcttttgacatagatagcaatagaagtatctttcttctttcccctttctttttctaaacaagagaagaaaagcgtaatagaggggagaacacataatgcccactaagggtagtgcattaaggaaaaacagtcttggcaggtatataggaatagtggtttccagactggttgatgaccgtaatcaccaagaacagtggttctcagtcttggctgcacattgcagtgatctggaacttaaatactaattttaaaagggtgcagtggctcatacctgtaatcccagcactttgcaagtccgagatgggagaatcacttgagcccaggagtttgagaccagccggggcaatgtagggagaccctgtccctacaaaaaatacaaaaattagccagtgtggtggcttgcacctctggtctcagctacttgggatgctaggcaggagattacttgagccccaaagttgaggttgcagtgaaccatgatcacaccactgcattctatcctgggtgacagatgagaccctctccctcctaaaaaaatccttaagaaatatattgatgcttggttcctttggtcagaattttgatttaaggtgttgggagtgtagcacagatgttggaataaacctctcaaactgattttaatatacaaacaaggtcgagaaccaccaaggaagagtttttatgcataaagattcctgtactctaccctagaactaatacatctgaatctctgggaatggagtataacaatcagatttgaaaaggtttctttagtaattttaaggactgaccagtttagacactgctttgttagagtaaaatgattaggtacctagtatcaacctagccatccaaccttatattaataactaggaaaataaagggttggagcctctgtgtttctttgttgaaaaatctgctactattattagatctgtgaaaacaattgaaaattcggttattatcaccttaaaagtacaaaacctatagattttgaaaatgtaattatttttctgtaggcatagttaaaaagattttgtaaatgttataaatcagtttctttataagcggtttatttagataaattttgttatactgacatgattcactaattttctaaatataaatggttcagctcttagttatttttaaactaatgacctgtgttatacttcctatttttaatgggcttttatgatgttttaggtttttttgaatcccgtgtccttcaagtgctttctaactttgagaggaagaaattgaccacctggactatggaactgtgcgtaacagctttgaaagtgtatttaaaaattaaatctatatgcctttaaatcagtgaattggaaacatattacatgtattttaatgattttcctcaaatataataaattgtttcctttccaataaaaaaaaaaaaaaaaaaaa

SEQ ID NO: 1322 - DNA, 1469 bp, Homo sapiens
  SITE (1419): n equals a,t,g, or c
ggcacgagcttcggagaagtgaaatataacattactcagtggacggagaagtctgttttgttacagagacatgcctctcagaaggtcaggaggttttgagtacctatccttgccacccatacaggaaatccaaagtttggtgtctctctctctctctgtctctttctttctctttctccccccaaacccctctcactccctccctccctctctccttcccctatttgcaatcatattctccctctgcttcttttctcttctgccctccttgtgggcagtcatgaaaatcaattcagactgtgttcattagcagatttattattctattgagaaagcactggaatgttttgtgagattatttttatatgaaggaatagcctgaactcaaacagatggtaagaatagtacaaacaccttagcacatcactgcacacacagtattctgaaaggagatttgacacttaattcccattttcttaaaataacagttttgttgacttaaaaatatgagatacataggatgtgaaaaaaaatgtttgcagtactcagcaaaaaatagggtacataaagcagggtggctgtccatccactgattctggggtgagaagcgatttctacctcgcaagagtgactagaaagtttctaggagcacctccaggcttgcaaagaaagtgaggcctcttggtatcctatcctcagtgtgtatatgacagccagtataatcaataccctaggttatgcgtctatatgatactcatctgtgaatattattggttttgtaatctttgttatataagaaggatgtttaggctgtatatactggggtagattattgcctgccccttatacataggaatatgctgcataattgcgcataacttccatctcccttactggcttgtaggcagaggaaactgtatatgttactgccttgtacttttctcatacaccaaaaacacaccaaaaaaatcaataaaataagcaatcttctattctcattccttttcccacagcagcatattttagaggcacatacaaaacctacattctctagttgggagtggatttttaaagttttccttttatcttttattttttttttgtatgatgcactgagatgtgtactttctaacaggggattggtacctaagaaatgtggtagcattattcagaaaactattatactttcaaatgacacatagtaaggagaatggaataatacatgttgcatatttgttaccagttgtaatttgtctgtattatgaaagatgtaatggtttgtcagctgtcactgttgttttcttgtaacatgatatggaataaagtatagcagaatctccagaaaaaaaaaaaaaaaaaaaaaaaaaaaaaaaaaaaaaaaaaaaaaaaaaaaaaaaaaaaaaaaaaaaaaaaaaaamnaaaaaaaaaaaaacaaaaaaaaaaaaaaaaaaaaaaaaaaaaaaaaaaaa

SEQ ID NO: 1323 - DNA, 1254 bp, Homo sapiens
  SITE (441): n equals a,t,g, or c
gaattcggcacgaggttcctgagctgtgcaaccaatcagagtccagtggagaagatttcttcctgaagtccaggctccaagaacaagatgtctggagaagatccacttctttctatacccacatgtgcaacccctgggtctccctgttgggggctgttgggtcccttctcatcatgtttgtgatacagtgggtgtataccctggttaacatgggtgttgctgccatcgtgtatttctacattggccgggccagtccagggcttcaccttggatcagcctccaacttcagctttttccggtggatgargtctctcttgctyccctcctgcaggagcttgcagtccccccaggagcagatcatcttggcgccgtccctggctaaggttgacatggagatgactcagctcamccaggagaatgcagacttcgccactcgggatngctaccamcactyctccctcgtgaaccgggagcagctgatgcctcactactagatgcagtgctgggaccttcctcttttggagctgtcccatgtacagtggacccaagcycaggaccttcgtggagctgcttctccaacctgagaaactcaagacccatcckcccgytgtcactttggacaatggamatctacattttcttttcccttttttttttttttgagacagagtctcgccttgtcacccaggctggagtccagtggcacaatcttggctcactgcaacctctgcttcccgagttcaagcaattctcctgcctcagcctcctgagtagctgggattataggcatgcaccaccacacccagctattttttgtatttttactggagacagggtttcaccatgttggccaggctggtctcgaactcctgacctcgtgatccacccgtctcagcctcccaaagtactgggattacaggcgtgagccaccatgcctggccagaaatctatgttttcttagaacatgtggaagaaggaaaaagacaaaaaaggaagtctggattctgaggaccacgtctcacccagggtgacatcaggaatggtgctagcctctgcaacacgacacccagtctgaagagctctatacaggtactaagactagcaggggacaccaagactctgcacaaccagattgcttgtgcagagggccacaataagtgtatgttttatattttattgtattatttattcaaaaataaataatacactcacatgtttccacacccaaaaaaaaaaaaaaaaaaaaaaactcga

SEQ ID NO: 1324 - DNA, 1827 bp, Homo sapiens
ggcacgagggaaactggtattaggaaaaaaaggatgataatcaataagcaaatgattaaagtagaactattaaccttacataaggttattgtaaatatgtaaagaaaagagaattttgaagtttaaatttagtagtagcaatagacctgcaatgtaaagtctaataattattgtagaaaaataattctctgaggtttttctttctccagatataatttttttatcatcttatatcctgttggagttgctggtgaacttcttacaatatacgctgccttgccgtatgtgcaagaaaacaggaatgttttcaataagacttcctaacaaatacaatgtctcttttgactactattattttctcttataaccatggcatcatatatacctttgtttccacaactctaattttcaataagttacgtcaaaggaagaaaggtgcttccatggagagtggattgtagaaaaggatgattaaatgatctctgcaaacaaggtgctttttccagaataaccaagattacctgagtccaagttttaataacaagaataaacaactttgtgaaatatcatggattgtatggtttcttaaaatataacttgagacacgtggtatttgccagtatttgtgttcctcttgtgccagatctattttttacaagaactgtgcaaatatcagtaacttttgggtaggtattgattattaggaaaataattaggtgtattatctgggggaaaaaaaaacttttgctaagttttttttgaaacatgctcaaagctttttaaatcaatatttagaaattagtttaacgatttactattatacctgctagtgatatttatgtgatatttataaatgaaaataaatgcaaaattataacaacttgttaataatgtattggtatttttgaacccacaatctattttttcaggaaataaggcagcattatgactaataacagtgtttggaagcgtggatataatttgctaaagtaagacttttgatgtagataaagtagcagcataaaaacacacaaatattcaagtagatgtcacagttggaaaatattctttggaaatatttctaggcagctgaaattacttatactgctaaggaaatctgctttttatttaaattagccacttaaggacaaggttttcaactgtgaaggttttaaggggttaggaagagcataagtatttgccccactattaaaaaaaaaaacatgacatctgactataatgttgtattcaggctgggagtggtagctcatgcctgtaatcccagcactttggaagactgaggcaggaggatcgtttgagcccagaagttcaaggccagtctgggcaacatagcaagaccccatccctaaaaaaattacaaacaaaaaaaattaaccaggcatggtgacacatgcctgtagttccagctgcttgggaggctgaggtgggaggatcacttgagcccaggaattcaaggttacaatgagctatgatggtaccactgtacttaagcctgggtgacagagcaagaccctgtctctgaaaaatagtgatgatgatgatgatgatgataacgatgatgaggaaggtgatcatgctgtactcagaactttggttgagaaagtcttctctatactgtagaattatcttgtaacaattgttatgataatccctttgtggtacttaggtaactaaacattttggggtatgatctttggacagactcctttcattctgaattccattgaatagcaaaaggtcttgtaataaagttcctgtccttgtgtttaataaaaaaaatacaccagaaaaaaaaaaaaaaaaaaa

SEQ ID NO: 1325 - DNA, 1514 bp, Homo sapiens
aattcggcacgagcactgctctgcctcagtggacagtcgtttcttttttgaggtgtgaccttttgttttcatgccttccccttgaagtcatcctgtgttttgtaatcagctgtcaggccaaatgtctgacccgaaagagaatgtatttacactcatgctgcgttgttcagcagcccctctgtgttctgtgtgatttgttttatttttccttttttttacatatatatgcagggaagtaatggtactggtagtgtatgttttctatgtggttcaaatatgaatttcgaacacaccaagccgctaatgagatagcagcttttttctgggacccagagtcacaaccaaattgatttaagaccggacccaagacacctttaacaataggactgaaaggaaaaaggatagggaaaaagcttattaaagaaatgtgtcaacaccaaatgtagaggggaagaaccacaaccaggcataataccaaaccggttccagggggaaacaaggctttggtattccgctggctccagcgctttttctgaaacccgaggctggccagggtgctgtcaccgtgtggtctttgattgcagccattcaatgcccacatgcttttccttcttgtttcagaacagcacatggtcacaacaagatattttctttccctccaaagccttttgtctccttgtgcctctttttatccttaggaaaagatccaggtgcttgtgaaaagaatcatgaatgcaacaagggaggctggtcctgttgctgtcgccgattaagttttaaacttttatttattatttatgtctgccgtattttaaataaacattctcgttccttccagttccagtcatagtgtgtctgtggcattccagtccaaccatgtgacttatttattctaatttgagggctgcactgtacaccatggtgtcctgtgacaccgtgttccagacatttatggaaggaaaacatcccatataaatgaaactgtcatgctgtgtcctccccggcagcagaagatgtgtccttccattgagtgagggtaaccttatgtccaccaaggatactttgagaaagcccctaaggaacaagcctcagtcccacggtttcagactatttattctctgaacacaagagtattggttaattatgttctcagctctccctgctgttgtatgtgtgcattcactgcaagtaacttatatctttttatttgaatgtattttaaagcagtagatagaataacaaaggaatatgaaaaccatggactgaatggaccattttatgtattcagagagagaagccactcatcattgccagaaataccatgtaaaaattggcagttcagaggttgcaatacttagtatagtaaataaataaacggtcaacattgtgcaaccactaccaaaaagtgtgttgtaatgcatcaaaaatcaacacaattttattcactaatgagtatcaataaaataagttcaaatgatggaaaccacaaaaaaaaaaaaaaaaactcgaggggg

SEQ ID NO: 1326 - DNA, 1535 bp, Homo sapiens
  SITE (574): n equals a,t,g, or c
ggcacaggcaaaattgccttcaaaggctaagtctcttgtattctgcccttactgagagtctgtactctcctaaggttaattggcttatcatattctgcttttgtgctccctagtttaccatgatgcttggggtttttgcccctacgcttttcactttgtcttcctgtaatttattacaaccaacccttgtgtttttttttttttaacagttttggatctgcattaattttttagtccccagaggaacactatgttcccaaacattatgttctgcactctcatgctcatatcactttgtgtagtgccagacacctcctgggatctcaagaaatgttgtttctttttaaaagatgggtgattactctaggaggctcataaaagatctttctcagttgagttactttcactgtttatgtatcccaagtggcttaggtcaaaatattggttaatagaaagactccaagtctttggagaagctttactagtgtctcctcatctctgtaaaagcaaagatgagtattgaatggtcttacaggagtgttggagagaaatgatgaaaagcattagaaatganaaggcctttgttgaaaatatgaaatgccagagtgaagacagtatcattattcccaagcaggcctcagtgtaagcggagctctctccaccaattgaagctgttcatcactacaaagaatggctgtcctgcaggatcctttctgctgctggctcctactgcagagaatagaaacttctttctaaatactgtatccaaaatgtttcctcttctctcaacttctcagctctatccaggacacttcactgctttcctccaaggcaaacttgaaccttcctctaaattccttccctgaaggctgttttgaggcagagggataggaccatggacagaggcttagcctaccaatcactcacacagcaggaaagtcaattctcttcctaccaggaatccctgggagagggtgtttacatgaatagactcttctttaactataggtcacttttcccttstctaamttcctttggagtgatgctgtgtcttctagaaacactgactccttccagcaactctctgctccttagacatataagaaatactcattcttgcaaatgcagttcttaaaatatttcaaaacatcttcattataaaatatttcaggcaaacagaaaactatgaaaaatagtttaacaaacatctatgtgtaaaacagctaccttagctgggcgcagtgctcacgcctgtaatcccagcactttgggaggccgaggagggtggatcacctgaggttgggagttcgagaccagcctgaccaacatggagaaaccccatctctactaaaaatacaaaattggccgggcatgatggtgcatgcctgtagtcccagctactcctgaggctgaggcaggagaattgctggaacccgggaggcggaggttgcggtgagccgagatcgcaccattgtactccagcctgggcaacaagagcaaaactccgtctcaaaaaaaaaaaaaaaaaactcgag

SEQ ID NO: 1327 - DNA, 3051 bp, Homo sapiens
ggcacgagctgtctcagcctcccaagtatctgggattacaggcatgcaccaccatgcctggctaattttgtatttttagtagagacggggtttcttcatgttggtcaggctggtatcaaactcccaacctcaggtgatccgcctgccttggcctccaaagtgttgggattataggcgtgagcactgcgcccgctatccacatccttctagagtcagaatggtagggtccgttgacttcagcttttgattttgcaggatggccctgtgtcctcctctgccccattccctggttcattaaccagtttgaagtgtatgtagattgttgccccgtctttcccaggtcacatgtgtgagatgcctgggtgctgcttcagaaatcaagatgatctcctttaattgcatgaaactacaccatgctgcgttccccaggcagacagttctgctttgacacaccaaagaatcccgtaggctagcagagccgccagcacaaaccaagggcgctgggtgtcgagactcagaggggtcagctgtgtccctcggcatcagcgtctaccaaggtgctgctaggtacagagccagccagtgttgggcagcaggctcacagcctcaatagggagaaaagacaaaggcctcaaaatgacaggcagcctgacagaggaaggagtctgacacctcagcttgatgcgtctttggaattcctagctcatctcagaattatatcttagagtgataatatgggtggtagccagtggccaaacagcaagaactaagagtggcccttgcaaaaaaaggttgggaaagctgggcccatattgcctgtaaacccttgagcctgatgctcatacagctgtcccttgttttagccaggtcttgacagaagggttaccagcactgtcactgctctacagaatgctctccccgtgcctctctgttgatttataacagttgggtaaccagatagcaatatagtggcaattgagtagccatatagtaatacaggggcagttggttaaacatatagcaatatcacataatgatatgtttaatttaacctcagttttttaaaccagaatgcttctaccataaaagaattgtgatttcagttrtacttccatcaaggaatatgtgggaagatatacatattgtcaaaatggttgggatgggatagttacaaaggacacttttgtatgttgtatgggatcacttgcctgatagtataaggaacattgtatgaaaagatgaaaagatacttcatttttagaaactgatcagagatgtcactggtctttaagtgatgtcttgaaaatccagtatgtatttgcccaaaagttttagcctacatctagctagcttacacttagcagccaaaccatcattgtgtaggttctgttttggaggaagctcatgggggatctgtgtatttcttaggtttctccctgttctccaatgttttatccatttcgtagcttttttactgtctccagaaagtagtgtgggacctgcacttaggggaataccagaatcatagcgtggttctgccttcttgatgagtgattgtgaaaamcacctgcataagggtgctaattggttgtgyattttttcatttatttgaaatcaaactgagamcacctcttttcggtttacagcataacatggcttgaagtaaaaggcagtatccaagtccttcacctggtcttgccctgtctactttctgatcattctgatggtctgatgtggctgttgatgtggaactgcagaagagttcagagaagagtatgcaacaaagccataggaaaacacacaggagcttttccctccccttcaggtccccgccctctttccaagctggacaattttttattaagttgtttattccctgccttaaaactgaaacaggaaattttctggtagaaggagggtcatttagtcacgaacactgaagtgggtcaaaattctattctgggtcaaatccttgaattcaaacagatgtccataatcagtactgatggaatagagcaagtttttctatgtaagacaaataaatcaaacatcatgtgcatctcctcataagggtctgcaagggtctgatggtttaaagttcctaacagatctggttgcagcatctgccggagcttgcaccccatcatcggacggtcatcttcctgctgcagaagttaggtaacataagacttagatttcttcctgttctagcaatctgcaagaccaccaggcttaactttttagctgccagaagacaaacccccttttctgtttcggcaatttgtcctggcacgtgttttggacttcctccgatttacacgaaaagctctgatattcattggagtactttattttttttcctcagttttgtttcttttctcatgtaaaaacaaacaaaaaggtcaacaaaaaaaaattgaggtttttcttgtttctatctagttcatgctttctttgcggtgtttgaacagtagtctgttaacttagtaggtggtacctggaaaggtattttaagtatagtgactgtttaataaatacttaattggatgatggaggaggagaaattgttttcttcccaggattctctttgggggtcattttgtgtgacagatatattttagacatttggagaaacagtttcagatcctgccaggatatttttgtaaaaaaggaaaatggaagattccaataaactagaaacagtacgtatctaagatgctgacacagaagctaatgtgacttttcagcttatcaagaggatggccaataaaacttaaaggtgtggttagatgttttctcacttttgtgacattaatttatcactgagtctcattcaaccaagtaatctaaaatactgtgcaaattctagcagtatgtcttcgataacttggatgttaggatagccaatatgtacaaaaaattaaatcaagtattttgtcctatgtataacacaaattaattttacacagagaaagatgtttctaggcaagtgaaattctggtaattcatactatttctttgtatgaacaaataaaatatattttgccaacg

SEQ ID NO: 1328 - DNA, 1290 bp, Homo sapiens
gaaaaacgagagatgaaatttagttaagtctatgtgagcaagtgagagaaggttaggtaaggggagaggatggaatgcttgcctccaatgaactttggagcttgtatgtgagtcagattgctcccctattgctattatctattactcttgagagctggctgtcctttgaaagaaagaagtaatgttctttgaaagaaagaaaaatctcttgctgtgtcaaacctcaaaatgttgctattggggttagaaggcctcctctttatgctttttaatgctctttcaaacgtgttcttttagaccagttttctaataagctttgtaaaatgtactatccaaattagaagcggatttggaaatgcaaactaacgtgcacttagatatccaagtgggtgagcttagccactcttacccatgctctttccctggaatccctggagacctgtccaagatgatttccatataccagcatagaaaatcagaatcaagagcaaactctgagactggcacaatccaagaagatttcctggctctggcttttagtaatttgggactccaactgccactgtactggactgtaatttataaatccagtagctacgcagggtggaggctgggctgaggattaccataatgaaatgtactaaatcttcatttaggtatgcaattgtgaagtgaaggcatctgctttctttacagtatcagagtccaagaacaggatgtcaccatagataaaagcctcatacaaaggcagaactacactccaaatttaatgtgtttaaattggtggggcaccagcagaaaatacttctagctcagctttactcttcttccacactaggctgggcccagcaatacaggagaggatgaagggaggagctccaggaggcgagggaagagccctagcagggcggccatcacaaccactcactgagagttgcccttcttaaaaatgtattttattttagccagtgggtcccttcctttctcctttcctctctactgctcaagaacagatttgaggccaggtgcggtgcctcacatctgtaatcccaacactttgggaggctgagatgggtggattgcttgagcccaggagttcaagaccagcctgggcaacacagcgagaccccatctcttaaaaaataacagacttgaggaacccctctcccttccataattcccctcatccaccgcccactccaggcactcactcaaacttgctcttcaactctgtatacaagcagaagcaataaaccaatctgattttcttttcaaaaaaaaaaaaaaaaa

SEQ ID NO: 1329 - DNA, 1503 bp, Homo sapiens
  SITE (1061): n equals a,t,g, or c
gtaattcggcacgagttacaatcccaggatggtgcaaattctgaagagaggttgcaagatacatgagcaacttaagcagagaaacagttttactaatatctagatgtgctatgattgtctgaaatggcacagaaagaaagcctagagaagtaaacaaagcaaacaaaataaaaattacaatcaatgaaaaggatcttaggttttaattctccaagttgtgtactggagagtagccgcactgaggggatagaatgttctcctaatttgattatataatcactcttgtccattactactacttttccttccttctcacttgaaaaatctgacactgctctaatttcatgctttccctgaataggcaccaactgcccataaatttttagtcaattacacagaaacctttgactcttgggggctgtatttgtgatggtatttgcttaagagttttatttctaaggtagttatttatctaagtcttgattcttataatattataatcattaattccctttkttttaggstcaacatctctacccacattatcatgtttcttgatcacaactaggttacaagggttggagatacacaaagatgaatgccatactatttatgcttataaaaaagcaatttatcttttgttctactacagaaaatccttcctcaaaaacaaattcatgaagtcagccttgctcaaacaccttcagtggctctttatttctggacataaatctaaattcctttgtcaacattttgagatcttcaataacctggtttcagtcttccaatttaatcttaaatatgttctactgaatgaaccaagtgcttaaacaatttttattatgtgggtgctttgaaaatgttgccagaatcatttaaaaggttctgggagaatatctcacctgaaggaaatggctctgctgatgcaagcagcacattttctggctttaaatcacagtgcacaatattcttaaaatgcagattccycaagcaacaagtatctgttatgaaaaagatttycttttcatgtctggaaatcacagtaaacctcctgtgactcntgaatgatttaatttgaaaactccactatagttcatcaagacttagctaaaagtgtgttattctgctccttaaggttaacaattcccacaatcacccaacatgtaaargtactgctatttaattattttagtttttagckggatacagtggctcatgcctgtaatcccagcactttgggagacctaggcaggtggatcacttgaggcaaggagttcgagaccagcctggccaacacggtgaaaccccagctctactaaaaatacaaaaattagccaggcgtggtggcacacatctgcaatcctagatacttgggaggctgaggcatgagaatcacttgaatccaggaggcagaggttgcagtgagccagattgcaccactgcactccagcccaggtgacagagtaagactcttgtcttaaaaaaaaaaaaaaaaaaactcga

SEQ ID NO: 1330 - DNA, 2289 bp, Homo sapiens
cacgcgtccgcggacgcgtgggcaacaacaaccaatatcagtaaagctttggaagacctctgctacctatttaaaataatcaacactcagccagaagaggtaatgtaatgctgtagatgggaataggagcattgatcttgctcttcttcctgactgtagtacttcctttctatggctttaaccagccacctcctcctgggaaacatctcctgtgggcttgttgggtatagaagctactctaagacccaaccagataccatgatgccactgttaattctgtttgctcttctaattaacctaagctagtgtgtatgtggacagggaggtggacaaaattctacagtaaatatttcaaaaattatagcatcatagaatcatctttatggctgccagatttgtcatcaacacccccaggatagacagtttcatcttccgacctatctggaaaatctcaggaccatgtccccagacctcctaactaaccatagcaccccaaaatacccaaacccctattgtgaagtggaactcttccccacttagtggatcccccctggaccctgctgtccccctgccctgaccactattatcggaatctgggaagttgggcatctatatctccagtgcactcataactctaacatttgcatccactcttgcattaatgacacaaaagtggaagcttccctgcgatgctctggtccaactctagttgcaagtttccaagaccacggggaggtaatgagattccatttgtgagtgaaaagaccatatatggtaccttctcccggatgggaacataaaggaaaaacaactgcctgatctgggaaggtgacagtactaccttcttctagaaaacaaagattgttcaaccaccaccatgagaacaggtggaaaatatctctatagacccaacctggcaatgaagtataacatcccacccccaggcttctcttggtgccctagttgggttcatttttgtttgtgactatgaatgggaagaagtcacaccctgtaccactccaactccctaaggagtcacctcttctttaaggaatactttcccttgtatctaaaacttggaactgacatgaatgaacgttggccactcttacccctccaggggtcacaatctataacgcctaggacccaagaatatcagaaataagtaagcaataaaactaattctggcaggaatcagggtggcaataggactagcagcaccctggggtggctttgcctaccatgagttaacgctaaagaacttggctcaaatcctagaatccttagccaccaacggagatcaggcattaaagagaatcaagagttccccagactctggaaaatgtagttgcgataacagactaccattggattattaactagctgaacaaggaggggtcttggcagttattaataaaactgctgcacatatattaactctggacaggttgaggttaacattcaaaagatctatgagcaagctacctagttacatagatataaccagggcactgcccccaactatatctggtcaaccatcaaaagtgccttcccaagtctcacctgtttttcacctcttctaggacctttgacaactgtcttgttacaaatgtttggtccttgcttctttaacctcttagtaaagtttgtgtattctagattaccacagttccagagacaatgctggcacaaggcttccagcccatcctgtccactgacacggagaatgaaatcgtcctgcctctgggctccttagatcaggtatccagagatttttactcctccagtgccaggcagggcctacgtccataaactcagcaggaagtagttacggaaaacagatctccgcccttctgcagcccccttaagattaaggaggagtatctaatctctgaagggggaatgaggtagtaggtgggcctcacctctggaagtggggctcaggcactcagaccaactgagcactacctaaataggtccagggcagatgctagttccataggacacaccgacctgtgtcaagtcagttcccatggctctggcagcacccagaagttaccaccctcaccctggaaatgtctgcataaactgccccttcatttgcatataattaaaagtggatacaaataccacttcagaactgcctctgatgctactgtgggcgcacaacctgtagggcagccctgctttgcaaggagcagcgctctgctgctgctgtgcacagccggccgcttcaataaaagttgctaaccccaaaaaaaaaaaaaaaaaaaaaaaaaaaaaaaaaaa

SEQ ID NO: 1331 - DNA, 2929 bp, Homo sapiens
ccacgcgtccgatgaacttctggggaaccctgtgctgatctgccaggaagatggaacttggaatggcagtgcaccatcctgcatttcaattgaatgtgacttgcctactgctcctgaaaatggctttttgcgttttacagagactagcatgggaagtgctgtgcagtatagctgtaaacctggacacattctagcaggctctgacttaaggctttgtctagagaatagaaagtggagtggtgcctccccacgctgtgaagccatttcatgcaaaaagccaaatccagtcatgaatggatccatcaaaggaagcaactacacatacctgagcacgttgtactatgagtgtgaccccggatatgtgctgaatggcactgagaggagaacatgccaggatgacaaaaactgggatgaggatgagcccatttgcattcctgtggactgcagttcacccccagtctcagccaatggccaggtgagaggagacgagtacacattccaaaaagagattgaatacacttgcaatgaagggttcttgcttgagggagccaggagtcgggtttgtcttgccaatggaagttggagtggagccactcccgactgtgtgcctgtcagatgtgccaccccgccacaactggccaatggggtgacggaaggcctggactatggcttcatgaaggaagtaacattccactgtcatgagggctacatcttgcacggtgctccaaaactcacctgtcagtcagatggcaactgggatgcagagattcctctctgtaaaccagtcaactgtggacctcctgaagatcttgcccatggtttccctaatggtttttcctttattcatgggggccatatacagtatcagtgctttcctggttataagctccatggaaattcatcaagaaggtgcctctccaatggctcctggagtggcagctcaccttcctgcctgccttgcagatgttccacaccagtaattgaatatggaactgtcaatgggacagattttgactgtggaaaggcagcccggattcagtgcttcaaaggcttcaagctcctaggactttctgaaatcacctgtgaagccgatggccagtggagctctgggttcccccactgtgaacacacttcttgtggttctcttccaatgataccaaatgcgttcatcagtgagaccagctcttggaaggaaaatgtgataacttacagctgcaggtctggatatgtcatacaaggcagttcagatctgatttgtacagagaaaggggtatggagccagccttatccagtctgtgagcccttgtcctgtgggtccccaccgtctgtcgccaatgcagtggcaactggagaggcacacacctatgaaagtgaagtgaaactcagatgtctggaaggttatacgatggatacagatacagatacaatcacctgtcagaaagatggtcgctggttccctgagagaatctcctgcagtcctaaaaaatgtcctctcccggaaaacataacacatatacttgtacatggggacgatttcagtgtgaataggcaagtttctgtgtcatgtgcagaagggtatacctttgagggagttaacatatcagtatgtcagcttgatggaacctgggagccaccattctccgatgaatcttgcagtccagtgtcttgtgggaaacctgaaagtccagaacatggatttgtggttggdagtaaatacacctttgaaagcacaattatttatcagtgtgagcctggctatgaactagaggggaacagggaacgtgtctgccaggagaacagacagtggagtggaggggtggcaatatgcaaagagaccaggtgtgaaactccacttgaatttctcaatgggaaagctgacattgaaaacaggacgactggacccaacgtggtatattcctgcaacagaggctacagtcttgaagggccatctgaggcacactgcacagaaaatggaacctggagccacccagtccctctctgcaaaccaaatccatgccctgttccttttgtgattcccgagaatgctctgctgtctgaaaaggagttttatgttgatcagaatgtgtccatcaaatgtagggaaggttttctgctgcagggccacggcatcattacctgcaaccccgacgagacgtggacacagacaagcgccaaatgtgaaaaaatctcatgtggtccaccagctcacgtagaaaatgcaattgctcgaggcgtacattatcaatatggagacatgatcacctactcatgttacagtggatacatgttggagggtttcctgaggagtgtttgtttagaaaatggaacatggacatcacctcctatttgcagagctgtctgtcgatttccatgtcagaatgggggcatctgccaacgcccaaatgcttgttcctgtccagagggctggatggggcgcctctgtgaagaaccaatctgcattcttccctgtctgaacggaggtcgctgtgtggccccttaccagtgtgactgcccgcctggctggacggggtctcgctgtcatacagctgtttgccagtctccctgcttaaatggtggaaaatgtgtaagaccaaaccgatgtcactgtctttcttcttggacgggacataactgttccaggaaaaggaggactgggttttaaccactgcacgaccatctggctctcccaaaagcaggatcatctctcctcggtagtgcctgggcatcctggaacttatgcaaagaaagtccaacatggtgctgggtcttgtttagtaaacttgttacttggggttactttttttattttgtgatatattttgttattccttgtgacatactttcttacatgtttccatttttaaatatgcctgtattttctatataaaaattatattaaatagatgctgctctaccctcaaaaaaaaaa

SEQ ID NO: 1332 - DNA, 1203 bp, Homo sapiens
ccacgcgtccgcgcaatcactgatttgaaaagttcccaacacaggcagctgctgtgtatatgggattagagccactacatagaatagtctcttacagattttcataaatactagtcacaataagggtatttttcttgggggtggagtaagggggagactgatgctagtccttgttgtattttgttgggctgtccttgtgtattttcaccccagcctgtagtcctcctcacttcaaccccagggatttttggggagcaagggtagccaatggcagagggggttggggctgggactctggaggctcctccccttctttctcttccttccgcctcccccgtgcccccagctgctcttgtcactgtctctgatgggtatttgcctggctttgttgcttctctatctgtatttagctgcagtgatcctttagctggttggctcagaaaaaaaaaaatgtgctttaggtgccctgtaatcctgggcatcaagggaatccatccttcccctttttgatatgttctccccgtacttccagatttattgttatggctcccagtgggtattggcgattcttgtgatgcagggcctcagtcagtgtccagccatgcataagggagaggatagtgtgtacctgccctgccctctgctatgaaggtctctgccttgtggatcatgggactccccttggaggatctgtgcaaaggggggctgggcacaaaggagaatgtcctatttgggagggcaggaagcaaaggaactggacagggattggtgggcttggggaacggaagtttatcttggatacccttgatgaagaggctgggtctcttcacatgaagatcgaaaagggaccctgcttccaatttccctcttccattcctcgagctactccagggcttagaagaatgctcttggtctgtgggtccagtgttgtctgtcatccatttaagtgttcccactttcaagtgacaatcctctccttggccctgccatagggcagagcatgtctggcatagcagcctgacttttatgccctaatcttgagttgaggaaatatatgcacaggagtcaaagagatgtctttatatctgactgtatataaatgaagtttttttgttttttttgttttcctttttggtgcaataaagtttgttttggcagaaaaaaaaaaaaaaaaaaaaaaaaaaaaaaaaaaaaaaaaaaaaa

SEQ ID NO: 1333 - DNA, 3186 bp, Homo sapiens
ccacgcgtccgcccacgcgtccgcccacgcgtccgcgctgcgcgagggctccggagctgactcgccgaggcaggaaatccctccggtcgcgacgcccggccccggctcggcgcccgcgtgggatggtgcagcgctcgccgccgggcccgagagctgctgcactgaaggccggcgacgatggcagcgcgcccgctgcccgtgtcccccgcccgcgccctcctagctcgccctggccggtgctctgctcgcgccctgcgaggcccgaggggtgagcttatggaaccaaggaagagctgatgaagttgtcagtgcctctgttcggagtggggacctctggatcccagtgaagagcttcgactccaagaatcatccagaagtgctgaatattcgactacaacgggaaagcaaagaactgatcataaatctggaaagaaatgaaggtctcattgccagcagtttcacggaaacccactatctgcaagacggtactgatgtctccctcgctcgaaattacacgggtcactgttactaccatggacatgtacggggatattctgattcagcagtcagtctcagcacgtgttctggtctcaggggacttattgtgtttgaaaatgaaagctatgtcttagaaccaatgaaaagtgcaaccaacagatacaactcttcccagcgaagaagctgaaaagcgtccggggatcatgtggatcacatcacaacacaccaaacctcgctgcaaagaatgtgtttccaccaccctctcagacatgggcaagaaggcataaaagagagaccctcaaggcaactaagtatgtggagctggtgatcgtggcagacaaccgagagtttcagaggcaaggaaaagatctggaaaaagttaagcagcgattaatagagattgctaatcacgttgacaagttttacagaccactgaacattcggatcgtgttggtaggcgtggaagtgtggaatgacatggacaaatgctctgtaagtcaggacccattcaccagcctccatgaatttctggactggaggaagatgaagcttctacctcgcaaatcccatgacaatgcgcagcttgtcagtggggtttatttccaagggaccaccatcggcatggccccaatcatgagcatgtgcacggcagaccagtctgggggaattgtcatggaccattcagacaatccccttggtgcagccgtgaccctggcacatgagctgggccacaatttcgggatgaatcatgacacactggacaggggctgtagctgtcaaatggcggttgagaaaggaggctgcatcatgaacgcttccaccgggtacccatttcccatggtgttcagcagttgcagcaggaaggacttggagaccagcctggagaaaggaatgggggtgtgcctgtttaacctgccggaagtcagggagtctttcgggggccagaagtgtgggaacagatttgtggaagaaggagaggagtgtgactgtggggagccagaggaatgtatgaatcgctgctgcaatgccaccacctgtaccctgaagccggacgctgtgtgcgcacatgggctgtgctgtgaagactgccagctgaagcctgcaggaacagcgtgcagggacttcagcaacttcctgtgacctcccagagttcttgcacaggggccagccctcacttgccagccaatgtgtacctgcacgatgggcactcatgtcaggatgtggacggctactgctacaatggcatctgccagactcacgagcagcagtgtgtcacgctctggggaccaggtgctaaacctgcccctgggatctgctttgagagagtcaattctgcaggtgatccttatggcaactgtggcaaagtctcgaagagttcctttgccaaatgcgagatgagagatgctaaatgtggaaaaatccagtgtcaaggaggtgccagccggccagtcattggtaccaatgccgtttccatagaaacaaacatccctctgcagcaaggaggccggattctgtgccgggggacccacgtgtacttgggcgatgacatgccggacccagggcttgtgcttgcaggcacaaagtgtgcagatggaaaaatctgcctgaatcgtcaatgtcaaaatattagtgtctttggggttcacgagtgtgcaatgcagtgccacggcagaggggtgtgcaacaacaggaagaactgccactgcgaggcccactgggcacctcccttctgtgacaagtttggctttggaggaagcacagacagcggccccatccggcaagcagaagcaaggcaggaagctgcagagtccaacagggagcgcggccagggccaggagcccgtgggatcgcaggagcatgcgtctactgcctcactgacactcatctgagccctcccatgacatggagaccgtgaccagtgctgctgcagaggaggtcacgcgtccccaaggcctcctgtgactggcagcattgactctgtggctttgccatcgtttccatgacaacagacacaacacagttctcggggctcaggaggggaagtccagcctaccaggcacgtctgcagaaacagtgcaaggaagggcagcgacttcctggttgagcttctgctaaaacatggacatgcttcagtgctgctcctgagagagtagcaggttaccactctggcaggccccagccctgcagcaaggaggaagaggactcaaaagtctggcctttcactgagcctccacagcagtggggaagaagcaagggttgggcccagtgtcccctttccccagtgacacctcagccttggcagccctgatgactggtctctggctgcaacttaatgctctgatatggcttttagcatttattatatgaaaatagcagggttttagtttttaatttatcagagaccctgccacccattccatctccatccaagcaaactgaatggcattgaaacaaactggagaagaaggtaggagaaagggcggtgaactctggctctttgctgtggacatgcgtgaccagcagtactcaggtttgagggtttgcagaaagccagggaacccacagagtcaccaacccttcatttaacaagtaagaatgttaaaaagtgaaaacaatgtaagagcctaactccatcccccgtggccattactgcataaaatagagtgcatttgaaaaaaaaaaaaaaaa

SEQ ID NO: 1334 - DNA, 1608 bp, Homo sapiens
ccacgcgtccgcaccccctcccctcggcccctcagacgctacccaatgatgccggtttgcagagttggcctgtggaatggctcatgtttgtgcgtgtgtgtgtgtatatttatgggcatgggtgcatgcttggtgtgtatttgtacatgtctgtattgctgtgtccctgtaaatacatgcttgtgtatggatggaagaagccaggcccaggcctggcctcttcctcgggcctgtggccacacctcctgcagctccccaaaatgactgaggcagaaagcccttggggagcctagaaagcaaagctaaaggggatgcagggtctgtctgtctgtctgtctttcagtctgaggaatgagaatcctgacctgagggctgtgcagctgagagcccactacctccccagcccctctcggccccagccgcatcatcccacctgtcccctcccccccacctccagtggggctttctccagatgtcttatggttgggggtttcctgatgggccaggagaggagggcatcttcttgcgacacactgtctgggttaagtgcccagtgaggcatggtgtggggagctggcctcagaggagccgctggtgggcaagcgtgaagtgggctgaggggctctgagccactttgctcccatctaggggactgccccccatggaactcctttgaagtcacagcagccttcctttctgtttgctcttggggctgagaggtggctcaaacactcggggtccctatggctctgggtcaatctaggccaggctgcaccccatggacagggagtctcagggctcctgatcatgcccaggccctggcctggggcctccctccttggcagctttcccacccccacgcccctggcatcctcagttgctatgggatgcccctccagggcaccagctcagggctaagcgaaggaagataggagcagctcagagctgccaggctctgccttcctcacagacctggtggggcaggtcctgttcacagcagcaggagtgaaggcctggccatcggtggagagggcagctgtcagagggctgggggccagggcacaggattgaagagtttcacatatcatcacagcatacactgggaatttggtgggggcagaagaacccagggccactccctcaatatgaagggaaaccaagctgaatgtgaccaccggcacactgctgcatgtcccatgtccacctttctccccgggaataactggccctgagacccctagacccaaggaggcctgtccatgccaagcatccgggaagcatggctggccttatccacccatgggtcacgtcggttcccaggggcagcatgggagatctttgggggcaacagggagagtctgggtggggagacgggacttgtccaagcagaaggcaggaccctgggaaatgcataatgtaaggacatcaataatagtattattttttttgtaagggaaaatcaatatgtacattctgaaatcattttctctgtaaatggttggatttcatttcacccttaaagggatgcttaaaggagaagataatattaataataaaaacagctacaaagtcaaaaaaaaaaaaaaaaaaaaaaaaaaaaaaaaaaaa

SEQ ID NO: 1335 - DNA, 1218 bp, Homo sapiens
ccacgcgtccgatcgtcatttcttcatagtaaccctgactcaaggggttttggaagatttccagtggtctcaatggtgtgaatcctatgaaggtgtcttatttgttgaattagaggtgaaagcctccttcctcactcttttttagaaacagtttagttttattattatgcagaatttgttgagcaaattgcaacagcccaagccacagctagctccacaagagcccttccatgagccctcaacctgggatctcgtgtatctttgttggaatggacattaggtttccaagtccaggcctgtgatttagaagggtcaggttgggtaggagagaggagagtcttggaggggctgctccatgggggtcacacctctctcctgtgggttttcgctggtgattgagttctgaggcatttgctgcattgactgttgtagctttaactcgtgtgcacgtgtgacacataaagccccaagagaagggctgcctggctcagatgcacttccatgctgattatatgcatgggtgttgaaagcagtgctggctgagcagcgatcccagtgcagtttgactttattctttgctcaaataggtgaagcccacggtcccggcctcgaaggtggtctcgtgggcaagcctgccgagttcaccatcgataccaaaggagctggtactggaggtctgggcttaacggtggaaggtccgtgcgagccaaaatcgagtgctccgacaatggtgatgggacctgctccgtctcttaccttcccacaaaacccggggagtacttcgtcaacatcctctttgaagaagtccacatacctgggtctcccttcaaagctgacattgaaatgccctttgacccctctaaagtcgtggcatcggggccaggtctcgagcacgggaaggtgggtgaagctggcctccttagcgtcgactgctcggaagcgggaccgggggccctgggcctggaagctgtctcggactcgggaacaaaagccgaagtcagtattcagaacaacaaagatggcacctacgcggtgacctacgtgcccctgacggccggcatgtacacgttgaccatgaagtatggtggcgaactcgtgccacacttccccgcccgggtcaaggtggagcccgccgtggacaccagcaggatcaaagtctttggaccaggaatagaagggaaaggtgggtttcatttaaaaaaaaaaaaaaaaaaaaaa

SEQ ID NO: 1336 - DNA, 368 bp, Homo sapiens
ccacgcgtccgaaaaggaattgcaatactatcttaaattgaaggcttttatttcaatgtccttacatttaaaatgggatcttacaagggaagtaccaaaaaagtaaagtttattttgatgactctcaagatatatatgtttgttttgaatgttggcagatgccaatagcccttaacatttgaaaaatggtacttgaacatcaattatgtctcagagttcccttaaactttttgggcttaaatatttttattcattttggtcatacctttgacaatggatatgttaaactttaacaattatagtgacaaaacagcttgcttagaacctggaaattaaaacacaatttctagagtaaaaaaaaaaaaaaa

SEQ ID NO: 1337 - DNA, 685 bp, Homo sapiens
ccgggaattttggtcatgaccttttgtgcgtgtgtgtatgtatgtgattgggttgaatttagcttaaaaaaagttatgcaagaaattcatgcttgttgtaacgtgtcaaacaatacagaggtgtagggaaaatacctagtgccaccctccactccaaaaccccatgtcgccagagataaccatttattcagacagtgagtatctattaagtatctattgctaggctttggagatagcataatgaacaaaatggatgtgctctctgcccttgtgatttggacagatgcttccagttaatcttttttctgtgttttatattgattatgtttgtatgtatgtgcgtgtgtgtgtgtgtgtgtgtgtatcgactgttttcttcctcctcccataccattccccaaaaaaggagggggtagggatcaagctacacctatttgtaacccagttttttcaattaatggctgggcatgtccttccaagtcattacatatagatctggcttatccttttcaacagctgtacccacattcttcagtgcagagagaccacgctttattccagcattcccccactgctggtcctttaggttgttcctctgagatgtcttttttttttttttgagacggagtcttgcactccagcctgggcgacagagcgagactccatctataaaaaaaaaaaaaaa

SEQ ID NO: 1338 - DNA, 781 bp, Homo sapiens
ccggtccggaattcccgggtcgacccacgcgtccggtcataattgctgccatarttcctgtttgtctatctctctctcccctaggctcagaattccttgccaacagtggctgtgtctgatatgtctttgaatcttcagtatcgaactcagtgcttggcatatttgatgttcataaaatgtctgttaaaagaataaatgaatccaggactcatgtttctaataagtatagaaattgctctcttaccccacataagtcttgcatatccttggtcattggcaatactagataaggatatgctatttaagtagcctaaacttaaacaatgataaagctacattactgcatgtttactgaatgtcaaacagacttctaagtgctttgtgtttactaactcatttaattctcacaaatttataaccatttggtaggagaggaaaccaaggcatggagaggttaagtattttgctcaaggccacacagctagtaaatggtggaactgggatttaaactccaacaatctaacttcagagcaatacagccttagtaaagcagtctcacatccatcatctgactcaattaatgtatcacaagatagtaatacctacgtatttattataatgaaagaaatcaagagccaaataaatcaagttgttagctatagtctccaaagaagggatacccaagatgcaacccttccagccacttcctgcagccatgcttggttcctgtatatgcctaaagacccctcatttaaaaaaaaaaaaaaaaaagggcggccgc

SEQ ID NO: 1339 - DNA, 829 bp, Homo sapiens
cccacgcgtccgaaaccgttttagtttaaaatagatcatttgatttaataaactattttaaaattgactgttttgtaaactgcatattcataaagtgtttatagtctgtagttaaattttatgttactgttaacgaattaatttatttaatttcttccttcatgttcctaatcattttcatttcacttaattttagtttatgtcatagtaatctgacatttactcatcagcaaattacaatgcaaaagaaaaaatatttttaagaaatattcatatttttctttatggaaataagtgtgtttaaatgcacaagataggaaaggacgaacctgatctcttatactagtatccttaatcatttttattgccacaactaacctcctcggactcctgcctcactcatttacaccaaccacccaactatctataaacctagccatggccatccccttatgagcgggcgcagtgattataggctttcgctctaagattaaaaatgccctagcccacttcttaccacaaggcacacctacaccccttatccccatactagttattatcgaaaccatcagcctactcattcaaccaatagccctggccgtacgcctaaccgctaacattactgcaggccacctactcatgcacctaattggaagcgccaccctagcaatatcaaccattaaccttccctctacacttatcatcttcacaattctaattctactgactatcctagaaatcgctgtcgccttaatccaagcctacgttttcacacttctagtaagcctctacctgcacgacaacacataaaaaaaaaaaaaaaaaaaaa

SEQ ID NO: 1340 - DNA, 1007 bp, Homo sapiens
ccacgcgtccggaaaggtctgagcatggtgccgattaaattctccattgaaatgtacctttgtgggtacattaaattattttagcataagtctagtgaagtgccagcagtagatactatgttatttctggagctcttgatgttgatttttgaggctgaacatgctcttagcctcaagcaggtcatatttggaatacctgatgtgtgctcctggttgctcagtgcttaggatgcataaacaggtagctgcagtctcatctctcagtatatatacttttcagcaaatcttttttttctagataaattggaaaactaccttttttctgcatttttcatctgatgtcattatggtatgtaggtggcagctttcttggggcacagttgtctatataactgttcatcacatgagtcattgtctgtttctgktcttctgcctgaaaattccatcttggaaatcgtgtcatgcaatcggtgactgcgacattctacttgttatgtacactgccactggctttgtatgttatgttgatggactctacctgtgctacagtgaagggataaagtgacttattaaattgagtcagactcagttcctccaaatggtatttcctgtaaaaatgatgccaagcaagattctgcataaaacatgcatatgctttacactgtaagcatacagtgcctaccttttgttattgtctctgcttaaatccttaccacagttgtactcctgtttgatcaagtggccagtttaactagatactagctttgaagaagttctgtattggcccctggaatgtgacagttcataccacattgaaaaggtaagaaccaagtctttgtagagtagaacaccttaaagttaatccacttttaccaaattcctctattgttaaagcaacagtcctatattggctaatttttaaaatcataatgtgccacactttacacatccctagaatgtaagctagggggcaggggccaaaaaaaaaaaaaaaaaaaaaaaaaaaa

SEQ ID NO: 1341 - DNA, 854 bp, Homo sapiens
  SITE (345): n equals a,t,g, or c
tcgacccacgcgtccgccacaacagtcgagtccaaatcaaacgcgctccaggcaggtggggctggggttctgccagcctcctggccagcaggggtgggtgggcagactggggccagtatcagctgttctgcctggacccaggccgggctgggaaggcacacttgtgcttatttcccgcctccacttctgtgcaagcttgtgctgtcataagcagagatcacagccccatttcttggatggagaaagtggacactgaggtctgaggcttttgaggacagtcaggagccctcctatgggctccagtgatgcactcaccagcttctggtcctcttcttccacctcttnagagtgccttggctccctcctgtcgtcctggggaacctcggccccagccctgcctccccagccagtcacagctcctccctggtcaccctgagggagctcagggcccggctggtagctgggttgctctgcttctgtccccgactcctgtggagcctggcaggcaactccatgatctgaccccggttaccttgacagccctgcctggcctcccctctcatggcccagccaccccagaacctgaagaggttttctagctgccgtgcatttgccaggctgggttacccaccctactttccctgcctgccctccagtgctgccaggcctagtgtgccagccagcgctcagccttcagtaaagggttcccctgcttccaacctccattgcactgcttcccctaagactgtgacctcctggaaggctggagcacaactgcctctcaataaacgtgttgcaaaaaaggaaaaaaaaaaaaaaaaaaaaaaaaaaaaaaaaaaaaaaaaagggcggcc

SEQ ID NO: 1342 - DNA, 1274 bp, Homo sapiens
cccacgcgtccgtgcatattgaatttaactaatcattgtccttaataggaagagcagcgaagaggcacaaaaagagaggagaaggatatcaaatttattgaacataatggaaccaagcctccttcagttttatatttctcgacagtggcttaataaatttaagacctttgccgaacctggccctatttcaaataatgactttctttgtattcatggaggtaagaactcctgtaatgcaaaccggtagtagaagtttgctgtaaaataatttgcaaattaggagagccaagaattttcctctcccacttatttcccatttccccacctgcattcaaacttaatgtgttttaattccatatggtttcagaaattcacccttcctttttaattgtaggtaatctctagcttctttattgaacatatatttactgagtacatgctttctaaactttttgctagtgcctaaggacactaaaaatcctttttcttctgtgaaagctctaatttcatagtagagtaagatacataaacagctgtttacattacagtgagctcctctattatacatcatttttcctacctgaggcattcctgtgctggtgattttatctatcgactatattggtggttcttaaccccattgtctaaatgaatagctggcttttttcccaagtatggaaatgtatctgggatttaagaaaaaaaagcctcataattaaatataactttggcccttgtgagattggctgtgttaatgtttatttctacaataaataggacctttgtgtgatgccaattaaacttcaaggttgaagatgggatattcatggtaattatgtttgtagtgaaaccagaagggatagggatacctgtattggacatagaaattttaaggtgtatgttcatcttgaggaaacacaatcaccaaaaatgctttataattaccgttcttgggagagagagtgtaagaataatgattgagctgagtgcagtggctcacacctgtaatctcattgtctcaggaggctgaggcaggaggactccttgagccctagagtttgaggttgcagtgagccatggtcatgctgctgcactccagcctgggtgacagagtgagaccttgactcaaaaaaatggccagacacaatggctcatgcctctaagctcagcactttgggaggccaaagcaggaggatcacttgaggtcatgagtttgagaccagcctgggcaacataatgagagcctgtttctacaaaaaaaaaaaaaaaaaaaa

SEQ ID NO: 1343 - DNA, 1820 bp, Homo sapiens
acgcgtccgattaaatggttattctagctcctcttaacaatgaaagtgatcactctctggaaccattggaaataggtcattatatcatatgaaatgtattcttgaattctaatgactattattttaaaagtgctcttcattcagatgacaactcagttaaaatatttttcaacaatgatgaattattttgcattaattattttttctgtttggttattggtttaacactctggagatgagcaaagaaaaaatatttaagtctgcctttcggaaaaaccattgtactctcagtgtcttccatcatttcttacctacaaatgttgttttgtttaaggaagggttcttgacatttgccgtgtaaggttatagaataaataaagagtttatttacctacggtagtggtgatttagtttatttttaattcttactgtctattataggtgtaactcattgattttagttacaagtttttaatttaaagtttctatccccaaaactattgccctcgaaagtatcaaattactataaaatatgaaaccttaaatactttgacacttatgtaaactagggtaacatcattttcattacgtatgggaaagtacatatctaaatatatttttgaccaaatatatttgtcaaatttttaggccagtttattttgtcccaatatttgagcaaagttgagtggatattaagagtgggtttcctcaaattatgaggaacaaaggcataatgcctggcacaaaggagaccctgagtgaatcacattgctttttaaaaatttgttttgatcacttaagaaaaaataagtcatgtttttggtatatgtctcaatgtaagaaataaaactttatcaaatatttgaatttactcacagctaattaggtttttaaaaagcgttaaaatttgtgacatgtatttctatcaaattgtatacacactcattttttaatttaaggaatcaaggatttatagatacagttttgttatgcatattgaacctatgaacaatagctacatttctaagtatcttttgtgaagttagttgttttaatgatactaaagatatggcacttgggcttgtctttaagaatccctccagttatgcatatttttatttataaatagacatttttctctggcaacagcttttattattctctcagaggttcacagccttccaaaatttaagaaccactgtttttttttttgttttttgttttttgtttttgagacggagttttgctcttgttgcccaggctggagtgcagtgagctgagattgccccactgcatcactccagcctgggtgacagagcgagactccatctcaaaaaaaaaaaaaaaagaaaaaatcagacctttataacaaataatgaaacatttcccaataatgaaaagcccagaaccaagctaagctggtgaattctatcaaatattaaaagaagaatgaacacaagtcattctcacatgcttccaataaatagaacactcagattcattttttgaagccagtattacactgataccaaagccaagggaaagtatcacaagaaaactacagatccaaatcctttatgactagatacaaaaatcctcaacaaaatagtgacaaactgaattcagcaggttattacaaggatttatacatcaagaccaagtgggatttatcccaggaatgcaagattgcttcaacatatgaaaatcaatatgatataccatattagaagaatgaggagacccacataatcagctcagtagatacaaaaaaaagttgcatggaacccaaaatgctttgatgatttaaaaaaaaaaaaaaa

SEQ ID NO: 1344 - DNA, 1984 bp, Homo sapiens
tccgtctttttctacattttagctcctaacaatgcagtttctatttatttgctgatttcttactattgatttgatagtctataattaacatgtatctttttaataatttttttttcagttcttggtacttaattctagtccttctaaatcagtattcaggaactattgtgggagtgtattagaaagtgcatgttcaaatgctaatcacatatccagggagactccagttctgtgttcatgcctctcagccatcaaatgacttcgggaaatattaattcccttctccaggttcaaagtcacttcaggtaaatgaaagaagaaatgtggtttttgatatcctggtgcagagtctgaagcttgatttctgtggagggtctagagatttgctaactgaaggcattatgggatagttagtgcccacttctatgtaggaaatatttttctgtctcccattgataatagtaaatacaaaggaacatcattagtttaatattatgaaacagcctgcagtttcaaaggaatcatgtttttgatttggtgagacagggctggattctctacagcctatattcatcattctgcatatcatggttgttgattattgaggattaggcctcctaatcctacagctgtgtcctaggtgcttgggacatatcattgaacataacaaaatccctgcctcatggagcttgcatcctaacagagggaaatagtaaataataaatataataaataacaaaaataaacagagtctttgaaagcagtaattctttggaaaaaagaaacgaatattgcaatattgcaatttaaggggattgatagtgtattataagttattataagttgcagaattaaatatcagagcagttattattgaaaaaaaatcgagctaatatttaagggagataaaggagtgaaccatgttagtttcggggcaaggacattccaaactgaggaaatagcaagtgtaaaggtcctagggtaagagctgccaaacatgttctgcaggtcaagcaggcataaagagggatgtaagttaatgtaatcattttatcctttctaatcttcaattgatgttagagtctttttagtgttcctaaatgtctgtacactagatcctggttggctgaattgccatctgcagtggtcctgctactggattcctctgacctttggtcattcttccctttaaaccttttacattttgacacttcattattttatgctgcttattcaaaatgtatactttcttttaacgttattctttctttagtctctttacttcacttggagtcagattctactagaatcttttttgaccccaaaagcatttggaaacacatgaaatatttgggggaaagggagttgtcatggtaactagggaactcccgtttcctagactgcagtacagtgtcatgatctcggctcattgcaatctctgcctcccgggtttgagcaattctcatgtctcagtctcttgagtagctaggattacaaatgtatgccaccatgcctggttattttattattattattattattatttttgtatttttagtagagatggggttttgccatgttggccaggctggtctgaaactcctggcctcatgtgatctgcccgccttagcctccttacatgcgtgagccactgagcctggccaaaatattgtctaattattcatcattctgtagtgttgagtaaatgtaacttttttgtgtctatattatgtagttttgagtaaatgtaactttttttgtctgtgtctttggacacttgtagccaaaaagaggaagaagaacaggaggcatacagggtattttaaggtctagattgaacctggaccttggaactgcttcctaggtgttgcaaatgggtaagaaacatatgtaacaaacctgcacgttgtgcacatgtaccctaaaacttaaagtataatagtaaaaataataaaaaaaagatcaaaaaaaaaaaaaaaaaaaa

SEQ ID NO: 1345 - DNA, 789 bp, Homo sapiens
  SITE (15): n equals a,t,g, or c
  SITE (47): n equals a,t,g, or c
cgtatgttgtgtggnattgtgagcggataacaatttcacacaggaancagttatgaccatgattacgccaagtctaatacgactcactatagggaaagctggtacgcctgcaggtaccggtccggaattcccgggtcgacccacgcgtccgctcttatattaaaataatacctggccgggagcagtggctcacacctgtaatcctagcacctttggaggccagggtgggcagatcgcttgaggtcaggagtttgagagcagcctggccaacatggcgaaaccccgtctccgcaaataatacaaaaaatgagccgagcgtggtggcacacgcctgtattctcagcctcctgagtgcctgggaccacagtcatgccccaccacacctggctaatattttttgtttttgtagagatgaggtttcgctatgctgcgcgggctgcgtcgaactcctggcctcaagcaaacctcctacctcagcgtcccgaaggctgggattatgggtgcacgccactgcatctggcccttttgtaggtattttttccccctttctctgattgtacctattgatttttctccctttctctgattgtacctattgattgtttagagtctctgaaaaatcacactcttattggctaagtcttcaccccataaatctttcctaataaatgctcattcagactctcagaactttcagcattaaagagttttctattcatgccctcaattcctcccataagaactaaagtgatcttttgcaaagtaaaaaaaaaaaaaaagggcggccgc

SEQ ID NO: 1346 - DNA, 354 bp, Homo sapiens
ccacgcgtccgaattttttcattttgcctaattttagacttattgacaaagtgctgggaagacaggcgttagcaccgtgcccggcctctgtttcctgttattagtgattttcctgcccaagattgcaacaacaaatatgtagaactacagactgtttagaatgctgagactgttctaagaaactttcaaaaacagtagcacttcaaggaatggtcactttctatgaaagaaactggtttgatagccataatcttattgctagctgcttttagcaaaagtcttttcttgaaaccaccacctatactctttaaacaaataaaaactaaaatctcttgctaaaaaaaaaaaaaaaaa

SEQ ID NO: 1347 - DNA, 1487 bp, Homo sapiens
acccacgcgtccgaaaaaaaaaaacctcatggtgagataggtgaaaaatagtctaaaataataggaagccctttgctggtgctaaatttccatttgacagatggtgggcctgaggcctagaggcatcggggttgcccaaggtcacacaaagcctgacattgagcatttgttttttaatttcaaatctattttctcttacaccccatctgccttcatttctcttgctatgaaaagacactgatggtttggcatacagtctgggcgtagtcaacattttgtgggagaaaaggaaggaattagactaggagatctgggatgcaagtatatattcggcccttgattagccttttgctttggggttaaaagggagtggctgggggtgggtgaggttttaactagatttccaagaacctctttcctccttgcttttgaagttgggggtgggggtactatattggtttgtcagtcagctactcatgccaaacattaggtcattatcactttcactaaattcactcattcaacactttttggtctgcaaaattttgaaacgggaaagagttaatgaatacccaggcaattttaacacaatgatgaaaaaggctacaaaggagtaaatctccgtgttatgaaagtgtgcagaggagaggtcgaggaagggctctaggagggaattatatctcagctcagattggaccccaaaggaggagttagttgggtagaatggaagagagtaaggaagggaggctctctgggcagagccactcctgccctccagagagatagcatagcccttgaaggaggaacttgaagacatcttgtttggctgaagcctcaggtaagtgggggatgtgacaagaggtgaagttgggtcattagagggcagaagagcttctaaccttattcaagagtctggactttakcctagagcagtagggagccactgtaggatcatrtatggggaggccawttaggacgttaagaaacaacatcatttgcccattcccttcacttggacctttgccgtttacaaagtactttcacttatgttattactttatgtaaactactcaataatcatataaggtagaaggagatagatatctccttgttgtagacaaggaatctaaagttctgagagggtagttgactgattaatcaagtaagaagctagaggggccaacacgtgagcctcgcacttcagttctggactgtactctagctgcaacaacctcttcctctcaaaacaggtgctggagttttccacaggactctgtgtgttgggcacttacccataggaccagcccctttcagtggtctacaataactattggccgggcgcggtggctcacacctgtaatcccagcactttgggaggccgaggcgggcggatccacgaggtcaggagatcgagaccatcctggctaacacggtgaaaccccgtctctactaaaaaaaaaaaaaaaaaaaaaaaaaagggcggccgc

SEQ ID NO: 1348 - DNA, 820 bp, Homo sapiens
  SITE (779): n equals a,t,g, or c
  SITE (798): n equals a,t,g, or c
acccacgcgtccgcccacgcgtccgctaatctatgtcatttaagttctagattttacagtattttggagtgatgaataaatagcatgctgttcttctatagctagcaaacaagactcagctttggagacaagaagaaggaatacaggagatgtttccttgaatgagtcttcttcctaaactctgctagaagtatgtcagaaagcgaaggttacctcagtctccaagtcatgaaaacatgaggtctttctgttttctagggaaagtatttcatttcctagtgtggctttttgcacaccccagaaggaggaagacaagccttcgtgtcacctttacatggtagttgagatgcttcacatttgtacataacatcttatatgatcgaaagaggaactcaaactcgacaggggagaataaggaaatacatctaaaactgacaattatgttaatccctcaattccctgggcccccaaaatagtctcctctatttgccatttcaaaatagctaatgagagggtaattggacatgtagacactgaatttccactgctcatggtttccttccctgggctcccagtcacccggaaggccccggattacctcaaatgtcataatgggktcatcgcattacgaattacctccttctgccaataaactacaagttctttgaggaccaaaaaaaagwmraaaaaaaaaaaaagggcgggccgccctaggaggatccaagcttaaggtacccggtgccattgggacggccaatagctccttccaaaagggggcnccctaaaattcaaattcanctgggccgttcggttttacaaa

SEQ ID NO: 1349 - DNA, 751 bp, Homo sapiens
gcacaacttcaacagattttctgtcatattctcaccagcacatctgaatgaggctttgtgttttccttgctctcttgcatgttccttttcaactcatggcccacagtgactctcagagatttatgccaaaattgcatacaattgttttctgaatcataacttgtctatttttctgcctatgtgtgctactttcagtttgtttctcatcaacattttgactctcagaagagcctccatttgcccctttctctctttaggtatctaagatctttgaacacctggacctttacatttgatccaaccctatcaaataatgaacttctcagagaggcatctggggtcctggaacttcatgttgatgaagtcatattatataatatgataaaaatattctcatgcagtattttaaataatttcaaattctagaagaagcaaatttcagcgacatgtcattgagtttttatttggtaaagctataattgtgcagtgtacaaagcactttttaaaaagatagtttattctgtcagggtatatgaagttagtatacagccagaacagccaagcctcaattcttgtaccttgtgtctttttattactgtttaatcaatagatatcatatgtttatgacagtttcaagaattgtttttaaacccaaacttaattttawgtttcagactattgttagaaaaacaaaacaagaaaaaaaaaaaagggcggccgctctagaggtccaagcttacgtacgcgtgca

SEQ ID NO: 1350 - DNA, 1084 bp, Homo sapiens
  SITE (864): n equals a,t,g, or c
ccacgcgtccggatgtatcaaattacaaggtttcatttgtaaataaggtgattaaaatgacaaagtgtattaaaagaaattgtattgtccagtgaagttttaagaaacagaaaccataaggtgattattatttttcaagccccaaaggagaattcattagatgacatacttttaaagttcattacaggtgtgagccactgcacctggccgtataattttctttttatcagggatgtaggctcaaatgagattgggtgccaaaacttcattatttttcttttcttttcttttcttgctagtttttgctaaacttcttttgttaaagaaaggcagttactgttactgagatagctcgatggtatcctgtgcatttttttttgaaagctcaaatagaagtctcacagttttagggagggattttttttagtctacaaaaagttattagtatgcctgtcctcttagtactgtactgcctagttactctcctttcaaaaaaaaaagcgtatatttattatatttccatggtaaactagcagctacaataatgtacgcttttttttttagtctacaaaaagttattagtatgcctgtcctcttagtactgttcctaaaaatgcttgtacattctaaaactgcaattttactgatagttgggaaatgaaagtgcaaaagaaattaatgacttgtgaagttctggtatttcattatgtcaagacaagattttttttttttttcctgagctgtagatctcatttgctgttggttgattaagaaaaaaatcttggccaggtgcgataggctaagtctgtggtcccagcactttgggaggctgaggtgagtggattgcttgagctcaggagttcnagaccagtctgggcaacgaggcgaaaccccatctacaaaaaaaaaaaaaaaaatagaaaaattagccaggcctgtacacccatagtccctcctactcaggaggctgaggtgggcggattgcttgagcctagaaggttgaggctgcagtgagccgagatctcaccactgcagtctaccctgggtgacagaatgagaccctgtttcaaaaaaaaaaaaaaaa

SEQ ID NO: 1351 - DNA, 1403 bp, Homo sapiens
ccacgcgtccgcccacgcgtccgcccacgcgtccgatgacccatggtggtcatgaccaactgcttttaaaaataccgaaccaaaactgttttaaccttgccccttgaattatagcagtttatgagtcagcagcttatgctataagggatttgattattatttacttcgagaaaactggcttccttgaaatctcctgatatgcatgtaaaactgtcatgtcatgtaaatcaaaggtaatattcaaggtgtccaactaagtgtaaggtccaaaataatgaccaaatgatataaagcaacttagccttggaaacaatatgaagcatagtactaatgtagaatagttgtattggagttgactttatataaaaatgtcttacatcactctacttaaattcatcttgtatttcttctctctagtatctgagttcagaaaacttattccatttataatgttctctttatattggttatgctattttgatcttaccattctttttaaaagtcttattacatatttatttttccttttttctttctattctatcattatacccataagagagtttgttacacctgaaaagtgaaacaaactaaattaaaataaaataaaagaataaataaagaacattggtcaagtctacaaaagttaaaaatttaaaaatcacatggctttgcttatattgaaataaatgttttgtgtatggttaatacaaacttctctatttcctggcatttattcaatgagtaatgaatagcgtaatgttactttttacataaatgccatttctgtaaactcactgtctaaatatttactactctaggtaattgccagatcttttatatattaaaggtcatcaagaatgaattaatcatttagcattagtaatacaactggaaggctcaagaagttcaagtatgttaaaaatgctttggaaagtcttctgaaaactattggactagtcctatcataaatgggatatttagatactgtaccatttgcatgtgtgcttgtgtgtgtgtgaatgtgtgtattggtgtatacgtgtgtgtttgtgtctttctgcaggcacatctcattttaactgttagagttgaatcagtcaaataatcacttttgtgataggctcacttttgtgaatgatctgagtatcagaatagaaacctatagatatggccaaatggtaatattcatttatgatgatttttttaaaaacacattaattttattgtgacagaatgttggttattaatgtttgaaagatctagttgcatacacagactcttggatcaaaaataaagagctctgggctcacttcttagatcagtctgtggccaaaataaatgaatttaattcctggcacatcagtttgtcaaaattaggcgggaaaaaaaaaaaaaaaaaa

SEQ ID NO: 1352 - DNA, 1566 bp, Homo sapiens
cccacgcgtccgtgctatgttgccccgctggtctcaaactcaatggactcaagcaatcctcccacctcagcatcccaaagtgttgggattgcaggcatgagccactatgcctggcctagtaaaatatttttatactaagtagagagagtagattcgtggaaaactcttaaactcaccaggtactgcaatgaaacttctagcattggtgattagcatactaatatgtactgggcaaatttataattgttagtaatttgcaatggagtcttttcattctgatattcaaagtattttacaaacactaaactttcaaaatctctcttataataggtattgttaaattaattccatatttcatatgaaaaaacaaaagctgagggaggcaaagttacttacctaagaccacacagtatttaactgatggaacctgagtagttccaaatttccgttactcaactctaacccgcatataaaataaaatcagtgtaatgctaagaaatactattgtacctccaagaataaacttgacaataaaaatattgtcatggcagtttaaagaaatgtctttattaaaatgaggattccaaggtaaaatcctctaagtataaacatatttatataagatatttatatttaagaagatagtaatttcattcaatattttgtttttaatatcatgatcattaagttacatagattctcttctggtaagcaaagtgcaaaaaaagccaaaattgttatagactgtgattcaaatactctttcatatagccagggtgataaactacttatttattgaacttgactgtttaaatataaaaatgattgtcctaatggagaaagcccctaaaaagcaagtagctccttttgcataaaagacttttacattattttggattttagtgaacagtgtttttttctattgtaatttctgattagatatcacattatttatgaattgtttgttatggtaggagtatagtatcttttggaagaatttatcttagtatatattaaccaatgagtcaattaagattagccaatttcaatattatccttaagcagtattaccattgtaatgctagaatagacatatcccagaccattaaaaacctgacaattctttatccaaaaaaaacaagcaggcaaaatatttacaaaactattaaaagattggggagctaaagtagtggcaaatgcattactctgaaaatcctcacacatcctctgaaaaccaataaagatgaacaaataagactacacataaccaggctgggcacagtgactcacacctgtaatcccagcactttgggaggctgaggcaagtgaatcacctgaagtcaggagttcaagaccagcatgaccaatatggtgaaatcctgtccctacaaaaatacaacaattagctgagtgtggtggcacgtgcctgtagtcgcagctacttgggaggctgaggcagaagaatcacttgaacccaggaggcagaagttgcagtgagccaagatcatgccactgcactccagcctgggcaacagagtgaaactccatctcaaaaaaaaaaaaaaa

SEQ ID NO: 1353 - DNA, 668 bp, Homo sapiens
ggtaaactatcttgagattaaatggaggctgcaaaatcactgtgtcccagggctcctttgtcttgctctgctcttcttctatgcagtttctgtattgtgggcgaggatggttaccattgtgtctgctaataagaagaaaaagagaagggcattctctttacctttaagaggagtttgtgtatatcactttcactcagatccctctggctctaactttgtcacgtcacaaccagttgcaaaggaggctgggaagtgagtgactctgacctaggcagccatatgttgcacttaatttttattactgcataagaaggagagaacagattctggggagatagccagctatctgtcacattaaggtttgagtcagatttatttycattaaaaaaaaaaaaatggcctcaggcctgtaatcccagcaggytgaggcaggagaatggcgggaacctgggaggcatagcttgcagtgagccgagatggcaccactgcactccagcctgggtgagagcgagactctctctcaaaaaaaaaaaaaaaaaaaaaaaagccgttgattatttaaacagttaacttttttgttgttgttctggaatgagtcttggttactgtatagtatgtattaaaaataaccattagcaatctaggcatagtggtatgtgcacagtccc

SEQ ID NO: 1354 - DNA, 313 bp, Homo sapiens
gctgacaataccaaatgctgggaaagatacagagcaacaggaactctcatgtcagagttcctgttgctctgtatctttcccagcatttggtattgtcagtttaaacacaaatgctgggaaagatacagagcaacaggaactctgacatgagagtaggaatgcaaaatgagacagccactgtggaagacagtttggcagtttcttagaaagttaaacacatttactctatggcccaggatctcattcctggggatttactcaagagcaatgaaaaccccactcaaagatctctacaatccaaaaaaaaaaaaaa

SEQ ID NO: 1355 - DNA, 1082 bp, Homo sapiens
  SITE (1065): n equals a,t,g, or c
gcagtcactttagtaaaataagtacattatattacatgtcattataatattgtgttatcacataaactgagcataccacaatccatattctacggactgtcttctcctttttccactgattacatgtgagtggttcttagataacacaccctaaagacaaagaaagaaaggaagagaaacagaattaacaagagagggaaaagagtgtcagtttcctttgctatgactattaaatgactcagtgaattttcttagggtaaagttactgccattcaaaattatagtaaattggtaatattttacagtcatatatttttkgtttcagctgagtatatttkgttycagcttaagtatgggcacatatctcccacacttttttagatcagatatgacacataaaaaagatggctttggttttttaaaaactcttacaattagcaactaatggcagtgtgaacatataattggttttataggtaaatcaatttgtcgacttacaaacttttaagacttcatttgttattcataactacattttgctgaggaaaaaaatacttgtttatgtcaaaaaggggagaatttccattaagttcatactctccatgatgagaaagcacaccccgaaataagacattaaatgttagaatgtattacttttcctggttagaaaagaacttggctttgggagtggaccctatgcgtatcatggtgtggcaatgccattttgtttccaaagataacatttgtagatgtacagatgtcctgaactttattaaaccacagctgtggttatcacatatttattcaaaagatattacagctatcaaagcagtatgtcagcaaagtccttagtagtttgcttaaattgccctttcattttactgtatctgtaagtattcaaccaatgtctttaaaagcctgagtaaaaaaaaaaaaaaaaaaagaaaacacaaataagcaaacacgaagcattatttacatggaagcattcagaaatcatgaatagcattatcacaaatgagttatgacattttataggttcacaaaaacgagagaaaaaaaaanaaaaagggcggcccgct

SEQ ID NO: 1356 - DNA, 1316 bp, Homo sapiens
  SITE (24): n equals a,t,g, or c
  SITE (37): n equals a,t,g, or c
  SITE (48): n equals a,t,g, or c
  SITE (61): n equals a,t,g, or c
  SITE (121): n equals a,t,g, or c
  SITE (1305): n equals a,t,g, or c
  SITE (1308): n equals a,t,g, or c
ccatttttccccccaggaaaccancctatgcccatgntttccgccaancttttaattccgnctcccctatagggaaaacctggtacgcctccaggtcccggtccggaaattcccggggtcnaccccacggcgtcccgcaaaacatcagtgcctttcaaatgctaaggaaactctgtcaaatgatctttctttttttgttttttgttttttgttttttggtctcacaatatgtctcaccattttatagtaacaccttctttggtgtccagtaaaatgaaaacttgagagatttctactgcttcaacaatttttttaattacgtggagattttaattttctatgagctatctgaaagaagagtagaaaataaatacaatcttgaaaaatcccatgaaaaccataggcaaatattaaatgattgaggcttttcttttttaaaacgtggctatgttctttttagatagcctggattcagggacttgggaccttgtaaagccaaagctgattgacactcataaggatgtcttcctgtatgccattctaatagacacacatgttacctgatagagctgggcagaggtgcttcagtctcaggctgaaggttctgaagtccagggaagttgggtgctgcccagggttacaagccatgagtgggagagctcaagtataagacacttaggccagacttcgtttcacaagtccaggctgctcctcaccaaaattctgtgtgtatatatatattttttctttttctgattctcatgcatattgtagataatttggaatatacagtaaactgaaaattctatatccacatttctgtgagctttttaaaatgtgagtgattactggccaggcatgggggctcacatctataatctcagcaattcgggaggctgaggtgggaggataacttgaggcctggagtttaagacgagcctgggcaacatagaaagaccctgtctctacagggagaaaaaaaaaaacctaacaaacattagccaggagtttgagcccaagagtttgaagttacagtgggccttgatcgcaccactgcactgcagcctgggcgacagagcaagatcctgtcttaaaaaaaaaaaaaaaaaaaaaaaaaaaaagggcggccgctctagaggatccaagcttacgtacgcgtgcatgcgacgtcatagctcttctatagtgtcacctaaattcaattcactggccgtcgttttacaacgtcgtgactgggaaaaccctggcgttacccaacttaatcgccttgcacacatccccctttcgccagctggcgtaatagcnaanaaggcccg

SEQ ID NO: 1357 - DNA, 722 bp, Homo sapiens
  SITE (665): n equals a,t,g, or c
  SITE (719): n equals a,t,g, or c
ggaacaaacaaaaaaatctctctaacgttttattctgccttatcctcaattggagaaagggatgaaggctgccacgtattagctgtgatttcttaacttctctacctttaatttcctcatctatgagatgatgttgaacctgtctacatcataagtagttaaggatgaaatgaatgggtatatgaacattgtgttggggacgtagtagatactcagcaaatgtgtcttcccagtgatgtcacatttcctctacttctgcttggtatgtgtctcgttcccctgagcccagctcatgtcactgtgacgtgagagggcaggtgaagtgttagttgttcccactccatcatgccctttcacagttgttagtctgatgctaaagacttaagatttatttcttcattgttgttgttgttgtttttgtagagatcaggggttcgagaccagcctggccaacatggtgaaaccctgtctctactaaaactacaaaaattggccaggcgtggtggtaggcgcctgtgatcctagctacttgggaggctgaggcaggagaatggcttgaacctgagaggtggaggttgcagtgagctgagatgacgccactgtgctccagcctgggcgacagagcgagaccctgtctcaaagaaaaaaaaaaaaaaaagggcggncgcyctagaggatccaagcttacgtacgctgcatgcgamgtcawagccctccanaag

SEQ ID NO: 1358 - DNA, 858 bp, Homo sapiens
ccacgcgtccgaaaaaagggttatgtaaggaaagacaagagtatgtttaagacggtttctaccattttgcttagggcagtccctataatcttagaggcaacagtaagagagtgaaatattgcaggcagtgaattgggctaatttgccatcactccgatttcttcaaaactctcttaaagatgagttaatgttgctggcctaaaatagtctcatatatgggactcccttagaaatgatagtgatagtgttttatttaataaatctgctgtgatggtctaaggcaaacttgacttatggaattccagttagcactgttgatgataataattacagttggttttgcatctgtacagcactttacaattataaatactctttatggaagtagtttccttgggatgatatatatctggccattattctgttcaataggtgtgctatattatggcaaatgttgcaattatcattgtacatattggtatgtttatttgtatatagaatcatactcataccacagagtctaaagaagtagcagcagtgtggtgtagttagcaatcaagaacactggaccttaaataactgggtccaaatatcactttcaccatttattcactgtgagtcatgagaaaattgttttagttttgctgtctgtacaatggcatactactacctgtctcatacacacacacaggcacacacaaagttttactaattggttcatactaggaactctccaagtatcaattatccctgttacagaaacagtatgtatagagagacaatcatggagattccctgtccaaggattttcctgatagcttcctctggtccatatcaaaatgaaaaaaaaaaaaaaaa

SEQ ID NO: 1359 - DNA, 1206 bp, Homo sapiens
  SITE (38): n equals a,t,g, or c
gaaaccccatctctttaaaaaaaaaaaaaatccaaaanttagctgggcatggtggcatgcagtggtagtcccagctactcaggaggctgaggtgggaggatcactggaacccgggagcagagactgcagtgagctgagatcacactactgcattccagcctgagcaacagagcaagacacacacacacatcaatttattttagttgtataatgcttttctattagtaaagcatcagctaagcttcagtggcctgctccatcccctaatgactcccatgggctatcctaaaggaacttccagaacctttgttggtgtgttgacattgaccatgcagaccaatttgggcacaactggacattgattccttttacacaagagctgcctcccaaagatagataaattttcccagccctaaatatgaatcatggggcaagatattggtcgtattgatggtgaacctttcctactggattctttgcatgccacatagcaggattcattgcctttctctcatcatggatggcatgcagcagcacccaagtattcttcattctttgcagggaaaaaattgtgcatgggggctgaaatgtagtatgtgtagctcaattagtctctcctctgtgatgcaaaatggaatattcaatggcagatctgcccttctgagatgctgaccatccaaaacaccttgtttatggtgcaccatgattagctcacacacaatgccaaggctgtgcttctattatctgatacatagtttgacaatgggtaattctactcagaccctccctactgattggctaggatgcctgtcaggaactcattatgctactggttgtttggggatccccatagtggactactttcaggaatggcatgaattgtaaccaactgagtgctgcccccactgttacggaagtttataaaaccttagttccagaagacccaaaggagagtactggtttgtgtttggtgcttggcctagatccagccaccactctgaaactcatcacatcttcattgacagggagggagcccaggacatatgtgtggctcattgaccagaaggctttcttagtcccaacagccatgaaccatgcacttatggatacccagccttttagggctacgtgaaatgcatccttgtaacatcattgtattctttcaataaatagccttctgagttgaawaaaaaaaaaaaaaaaaaa

SEQ ID NO: 1360 - DNA, 2102 bp, Homo sapiens
ccacgcgtccgcagccttggaaaggaaagcagctgagatccagaggagtggaaggctcccccttgactaaagctaaatcactaaaccttggccatggtcacttcctcttttccaatctctgtggcagtttttgccctaataaccctgcaggttggtactcaggacagttttatagctgcagtgtatgaacatgctgtcattttgccaaataaaacagaaacaccagtttctcaggaggatgccttgaatctcatgaacgagaatatagacattctggagacagcgatcaagcaggcagctgagcagggtgctcgaatcattgtgactccagaagatgcactttatggatggaaatttaccagggaaactgttttcccttatctggaggatatcccagaccctcaggtgaactggattccgtgtcaagacccccacagatttggtcacacaccagtacaagcaagactcagctgcctggccaaggacaactctatctatgtcttggcaaatttgggggacaaaaagccatgtaattcccgtgactccacgtgtcctcctaatggctactttcaatacaataccaatgtggtgtataatacagaaggaaaactcgtggcacgttaccataagtaccacctgtactctgagcctcagtttaatgtccctgaaaagccggagttggtgactttcaacaccgcatttggaaggtttggcattttcacgtgctttgatatattcttctatgatcctggtgttaccctggtgaaagatttccatgtggacaccatactgtttcccacagcttggatgaacgttttgccccttttgacagctattgaattccattcagcttgggcaatgggaatgggagttaatcttcttgtggccaacacacatcatgtcagcctaaatatgacaggaagtggcatttatgcaccaaatggtcccaaagtgtatcattatgacatgaagacagagttgggaaaacttctcctttcagaggtggattcacatcccctatcctcgcttgcctacccaacagctgttaattggaatgcctacgccaccaccatcaaaccatttccagtacagaaaaacactttcaggggatttatttccagggatgggttcaacttcacagaactttttgaaaatgcaggaaaccttacagtctgtcaaaaggagctttgctgtcatttaagctacagaatgttacaaaaagaagagaatgaagtatacgttctaggagcttttacaggattacatggccgaaggagaagagagtactggcaggtctgcacaatgctgaagtgcaaaactactaatttgacaacttgtggacggccagtagaaactgcttctacaagatttgaaatgttctccctcagtggcacatttggaacagagtatgtttttcctgaagtgctacttaccgaaattcatctgtcacctggaaaatttgaggtgctgaaagatgggcgtttggtaaacaagaatggatcatctgggcctatactaacagtgtcactctttgggaggtggtacacaaaggactcactttacagctcatgtgggaccagcaattcagcaataacttacctgctaatattcatattattaatgatcatagctttgcaaaatattgtaatgttatagggcgtctctttatcactcagcttctgcatcatatgcttggctgaatgtgtttatcggcttcccaagtttactaagaaactttgaagggctatttcagtagtatagaccagtgagtcctaaatattttttctcatcaataattattttttaagtattatgataatgttgtccatttttttggctactctgaaatgttgcagtgtggaacaatggaaagagcctgggtgtttgggtcagataaatgaagatcaaactccagctccagcctcatttgcttgagactttgtgtgtatgggggacttgtatgtatgggagtgaggagtttcagggccattgcaaacatagctgtgcccttgaagagaatagtaatgatgggaatttagaggtttgtgactgaattccctttgacattaaagactatttgaattcaaaaaaaaaaaaaaaaa

SEQ ID NO: 1361 - DNA, 1289 bp, Homo sapiens
  SITE (1254): n equals a,t,g, or c
  SITE (1285): n equals a,t,g, or c
ggaattcccgggtcgacccacgcgtccggggagctcagccgagggctgcacaaagaccttcctggcctgccccagacagagctgaggacccctggccgtgggcttgggcctcggcttcacaggatggggctgccagtgtcctgggcccctcctgccctctgggttctagggtgctgcgccctgctcctctcgctgtgggcgctgtgcacagcctgccgcaggccgaggacgctgtagcccccaggaagagggcgcggaggcagcgggcgaggctgcagggcagtgcgacggcggcggaagcgtccctactgaggcggacccacctctgctccctcagcaagtcggacaccagactgcacgagctgcaccggggcccgcgcacagcagggccctgcggcctgccagcatggatctcctgcgcccacactggctggaggtgtccagggacatcaccggaccgcaggcagcccccctctgccttcccacaccaggagctgccccgggctctgccggcagctgcagccaccgcagggtgcgctggcctcgaggccacctattccaacgtggggctggcggcccttcccggggtcagcctggcggccagccctgtggtggccgagtatgcccgcgtccagaagcgcaaagggacccatcgcagtccccaagagccacagcaggggaagactgaggtgaccccggccgctcaggtggacgtcctgtactccagggtctgcaagcctaaaaggagggacccaggacccaccacagacccgctggaccccaagggccagggagcgattctggccctggcgggtgacctggcctaccagaccctcccgctcagggccctggatgtggacagcggccccctggaaaacgtgtatgagagcatccgggagctgggggaccctgctggcaggagcagcacgtgcggggctgggacgccccctgcttccagctgccccagcctagggaggggctggagacccctccctgcctccctgccctgaacactcaaggacctgtgctccttcctccagagtgaggcccgtcccccgccccgccccgcctcacagctgacagcgccagtcccaggtccccgggccgccagcccgtgaggtccgtgaggtcctggccgctctgacagccgcggcctccccgggctccagagaaggcccgcgtctaaataaagcgccagcgcaggatgaaaaaaaaaaaaaaaaaaaaaaaagggcggccctctagaggatccangcttacgtacgcgtgcatgcgacgtcatagntctt

SEQ ID NO: 1362 - DNA, 868 bp, Homo sapiens
gggtttatcaaaaaatgtcatgaatgtttctatatttcttgttggtttatttctcattattgagttatatattgctggaagtttaacaacttctcttgaattccaacaggaagcatttgctaggtaggcatttggtacctaatggataatctttcatgatggataaatctgccacatcagtctctcttgactttgaaaattaaaatctgggcactttgggaatttctgctgtcttaattggctggcctgtcctgtgaacagccgtcttctctaaatggtataataactgcatttcagcgctgtctcattgtgagtctttttgaaagcttttaaaatgatgttgtgtgatccaaatttaaattaatagttaagcagtgtgttctaccaccaatgcaaataactcaactgaatgacaattggatcctgcttcactcagtttgcgcataaatggttgaggaaaactacatcataggtgacccccgttggtggtagccaaatttcatagtctactgtgtgaaccatcatgatttcagaagcactaaaatatagaaacatacattcttggccaggcacagtggcccatgcctgtaattccaacactttgggaggccgaggtgggcagatcacttgaggccaagagtttgagactagcctgtccaacatggtgaaaccccatctctactaaaaatacmaaaattacccaggtttgggggtgcatgcctgtaatccgagctacttaggaggctgaggcatgagaattgcttgaacgccggaggcagaggttacagtgagccgagatcgcaccactgcactccagcctgggtgacagagccaccctgtctcaaaaaaaaaaaaaaagggcggccgc

SEQ ID NO: 1363 - DNA, 2929 bp, Homo sapiens
ggaaagctgttacgcctgcaggtaccggtccggaattcccgggtcgacccacgcgyccgcccrcgcgkccggtcgcgaagcgcgcctgcgacccggcgtccgggcgcgctggagaggacgcgaggagccatgaggcgccagctgcgaaggtggcggcgctgctgctcgggctgctcttggagtgcacagaagccaaaaagcattgctggtatttcgaaggactctatccaacctattatatatgccgctcctacgaggactgctgtggctccaggtgctgtgtgcgggccctctccatacagaggctgtggtacttctggttccttctgatgatgggcgtgcttttctgctgcggagccggcttcttcatccggaggcgcatgtaccccccgccgctgatcgaggagccagccttcaatgtgtcctacaccaggcagcccccaaatcccggcccaggagcccagcagccggggccgccctattacaccgacccaggaggaccggggatgaaccctgtcgggaattccatggcaatggctttccaggtcccacccaactcaccccaggggagtgtggcctgcccgccccctccagcctactgcaacacgcctccgcccccgtacgaacaggtagtgaaggccaagtagtggggtgcccacgtgcaagaggagagacaggagagggcctttccctggcctttctgtcttcgttgatgttcacttccaggaacggtctcgtgggctgctaagggcagttcctctgatatcctcacagcaagcacagctctctttcaggctttccatggagtacaatatatgaactcacactttgtctcctctgttgcttctgtttctgacgcatctgtgctctcacatggtagtgtggtgacagtccccgagggctgacgtccttacggtggcgtgaccagatctacaggagagagactgagaggaagaaggcagtgctggaggtgcaggtggcatgtagaggggccaggccgagcatcccaggcaagcatccttctgcccgggtattaataggaagccccatgccgggcggctcagccgatgaagcagcagccgactgagctgagcccagcaggtcatctgctccagcctgtcctctcgtcagccttcctcttccagaagctgttggagagacattcaggagagagcaagccccttgtcatgtttctgtctctgttcatatcctaaagatagacttctcctgcaccgccaggraagggtagcacgtgcagctctcaccgcagatggggcctagaatcaggcttgcttggaggcctgacagtgatctgacatccactaagcaaatttatttaaattcatgggaaatcacttcctgccccaaactgagacattgcattttgtgagctcttggtctgatttggagaaaggactgttacccatttttttggtgtgtttatggaagtgcatgtagagcgtcctgccctttgaaatcagactgggtgtgtgtcttccctggacatcactgcctctccagggcattctcaggcccgggggtctccttccctcaggcagctccagtggtgggttctgaagggtgctttcaaaacggggcacatctggctgggaagtcacatggactcttccagggagagagaccagctgaggcgtctctctctgaggttgtgttgggtctaagcgggtgtgtgctgggctccaaggaggaggagcttgctgggaaaagacaggagaagtactgactcaactgcactgaccatgttgtcataattagaataaagaagaagtggtcggaaatgcacattcctggataggaatcacagctcaccccaggatctcacaggtagtctcctgagtagttgacggctagcggggagctagttccgccgcatagttatagtgttgatgtgtgaacgctgacctgtcctgtgtgctaagagctatgcagcttagctgaggcgcctagattactagatgtgctgtatcacggggaatgaggtgggggtgcttattttttaatgaactaatcagagcctcttgagaaattgttactcattgaactggagcatcaagacatctcatggaagtggatacggagtgatttggtgtccatgcttttcactctgaggacatttaatcggagaacctcctggggaattttgtgggagacacttgggaacaaaacagacaccctgggaatgcagttgcaagcacagatgctgccaccagtgtctctgaccaccctggtgtgactgctgactgccagcgtggtacctcccatgctgcaggcctccatctaaatgagacaacaaagcacaatgttcactgtttacaaccaagacaactgcgtgggtccaaacactcctcttcctccaggtcatttgttttgcatttttaatgtctttattttttgtaatgaaaaagcacactaagctgcccctggaatcgggtgcagctgaataggcacccaaaagtccgtgactaaatttcgtttgtctttttgatagcaaattatgttaagagacagtgatggctagggctcaacaattttgtattcccatgtttgtgtgagacagagtttgttttcccttgaacttggttagaattgtgctactgtgaacgctgatcctgcatatggaagtcccrcttcggtgacatttcctggccattcttgtttccattgtgtggatggtgggttgtgcccacttcctggagtgagacagctcctggtgtgtagaattcccggagcgtccgtggttcagagtaaacttgaagcagatctgtgcatgcttttcctctgcaacaattggctcgtttctcttttttgttctcttttgataggatcctgtttcctatgtgtgcaaaataaaaataaatttgggcaaaaaaaaaaaaaaaaaaaaaaaaaaaaaaaaaaaaaaaaaaag

SEQ ID NO: 1364 - DNA, 1141 bp, Homo sapiens
cttcagggcaacaggctgggatccaggcaaggtgcctgcactcagaggggcttcagtgctgagggcggcctgctgtccgtccctgcggcagactgggccctgtcccaccttcccgtcactcctcgatgtcacatcagagtgctctctcctgggtgggaacccgcgcacggaggaaacactttaccagagtaaacgagattataacttgtttgccagagaacctctcctgtggccatgcctgaacctctcctgggactgtccgtggtcttcacattggtgcttggacacccgtccttcgggaggggaggaaaagcggccggtaaaatggagacagtcggtggcgtgtgtttgccgattggactggcattggtatagacagataccaatcactgcacagacatttccaggggcccttccccagccatgtttagtggcactgacctcaggcagctgggcccccgggacagcaaccaggggactgccctggccctggatggcagccgggaccggctcacaagcttctgtttggagcagttctgttggcagccccccgcctccagtggagatgtgacacgactctttcttgcctgccaaacgttctctgattctttggatcatcgatcctaacacagcaaaggcggtattgttgctgtcctttcaaggttaatccaggatcagaaaagtctaatcatttctctgtggtttttggaatttccaaagagcacccagattttaaccctcagtcctcggggttgtccggctgcggctgtgctgctgttgagcattaagctcattccacttcacatgtaaacttgtttctatgcattcacctcctgggagactccacattcctgagagaactgcatggttatgaactcttactcgtgtgcactaaagtgcacgtgctgtgtgtgtactgaccctctgccctgtgggagccacgtgctgtggggagaacagaccagcagcagatgggactcctcctccaggaacctgctaccagctaggcgtggtggtgcaagcctatacttctggcactttgggaggctgtggcaggaggatcacttgaggccaggaatttgaggccagcctgggcaacatagtgagaccacgtctctttttgaaaaaaaaaaaaaaaaaa

SEQ ID NO: 1365 - DNA, 1285 bp, Homo sapiens
aattaaccctcactaaagggaacaaaagctggagctccaccgcggtggcggccgctctagaactagtggatcccccgggctgcaggttttaatgtttcgaagatggttgtaaagaggaaaattttagtatctcaaatgctttaaagtgagtggaattttgactgtacagttccttctagcagaaatcagtaaaccttgtaagatgcttcaacaaaaaatggggttgattccttggcacttcacagacatcctcacctttctgttccctcagaatcgggttcctgtgaggctgggtagtgggaggcagggatggaggtagcaggatggcgtgggtgggattagcaagtctcggagtctgttgtcccatctcaagggttccataaaaatcacctttttggtcctatattgggaacttgtgtggttctcagcttctgaccagaagctcctaggaagaactggctggtcacgactccttaagcttcatccttgatactggttgtgtcatctcagacccacgggttagtatggtagcttcactgggcttttggggctgggtctgactttgcatctgattgctctgggcctgtcattagcatccctgtaaggagagggaacggagtcagttcagggatattcttgccagaaaatctggggtcgaaatctccttccacttttcctcccagcagattggactcattggcgctctcatgttgaatttcaaactttaagatgagttggtcactggaaaggagtttgctgggattacaggcgtgagccactgcgcccggccacattcagttcttatcaaagaaataacccagacttaatcttgaatgatacgattatgcccaatattaagtaaaaaatataagaaaaggttatcttaaatagatcttaggcaaaataccagctgatgaaggcatcttaggcaaaataccagctgatgaaggcatctgatgccttcatctgttcagtcatctccaaaaacagtaaaaataaccactttttgttgggcaatatgaaatttttaaaggagtagaataccaaatgatagaaacagactgcctgaattgagaattttgattttttaaagtgtgtttctttctaaattgctgttccttaatttgattaatttaattcatgtattatgattaaatctgaggcagatgagcttacaagtattgaaataattactaattaatcacaaatgtgaagttatgcatgatgtaaaaaatacaaacattctaattaaaggctttgcaacacaaaaaaaaaaaaaaaaaaa

SEQ ID NO: 1366 - DNA, 1796 bp, Homo sapiens
ggcacgagaggtggccatcactgagcaggatttggaacttattaaagaaagagaaacggcaattcggcagctggaggctgacattttggatgtcaatcagatatttaaagatttggccatgatgatccatgaccagggtgatctgattgatagcatagaagccaatgtggaaagctcagaggtgcacgtcgaaagagccactgaacagttacagcgagctgcttactatcagaaaaaatctcgcaagaagatgtgtatcctggtgcttgtcctgtcagtgattattctaatcttgggacttattatctggctagtttataaaacgaatgattgcctccgatcgttctcccgctgagctgttttcaagggcaagtgcttgttgaagtcttgccagaacaaactgatcacaagaagacagcatatatcagaacgtcctgtaatcatttagttagaaactaactactaactagtctttggaattcgtgacctatggagacagtaattatcaatttattgattctattgatttctcaaattaggaattaacttatgtggattttgcttcctcttgtattctgattgcccttcatcccaagtgtttactgaaaattccattctagatattcttgttttgacaaatgacactacagtctcgtaatattgtcttttatgtatatacaaaatttacctttttactagcatctgaagatagagttactttctggtacccagtatattggagtctgtcagaaactctataataggccaccagtttttattatttaacatttttatttgaatttctagaagcctattctctatctattttgaaagattttggcactatatttaattggaaggtaaaatattgtacatgtgatccagagtaaatgagaagtctctatctgagctggtcagttactggagtacatgttactaatctgggtttaaagtttacttcattatctgctagtgtcatccacagcagttcatcctcatccacactaagccatcctgttagcttttaaaggaagttaatttaattaacattaatatactctatgggctccctctcccacctgtctgcatagaaaggcagaattagacatagcatgctttggaaaagcaaataggaattgttgggaatgatttaatcttgttgttgttgttgttgttgttcacttgtggttctacattcctggtgaatgatgaatgttgctgtcaaagggctgccccctaccttataagggttgctgggcatttgaaggcaggaagatttttaaagatagattgaggttggtttaaaattattcctgtaaaccaacaataaagcaaagaagaggttcatttttgtaaataacactggtttcaaatagtgatgttagacttaacctaatttataaacaagagattaatatctccatgcatagttttagacaaaaaaagatgtttcaataaaattactgtcttgtaatataaatgttgtccacttcccttttccacaggcctagaacagttaaagggaacataatttgtttaggctcccacataaatgtgaatctggccaacaactttggttcatcctttagtgaattagaggatttggctaccctgagtatatttatattcatttcttctgttctccttctgttattatacttaatcttctaaactaaactaatgtgaacagtagggaagcaagggcccaaatgcataagtttctttgcactgttgcacttacttaatacaaataaatgttttttaaagctttaaaaaaaaaaaaaaaaaaaaaaaaa

SEQ ID NO: 1367 - DNA, 770 bp, Homo sapiens
  SITE (745): n equals a,t,g, or c
  SITE (761): n equals a,t,g, or c
  SITE (770): n equals a,t,g, or c
ggcacgaggcttgacactcatagtcccatggagtcagggatggacaagacagagggaccagagataaaggaacccaggcggaggttgcagtgagctgagatcatgccactgcactccagcctgggcaacaagagcaaaacttgatagctttgcatagggaaagagggcattgatgctggggttttgaaaggtgagtaggagtccatcaggcaaaaaaagtatgtattaattcgaagtattaaacatccctagccacccccattgggaaagatgtgccactgatttgcgaggcgggaggcgggggccagacttgggaatatgtgcagccctttctgggctggaaccagggtgcatgggttggggtagctgctgggaatatgcccccctgtcttgctttgtgcagaaacccttggaagatcagacccagctccttacccttgtctgccagttgtaccagggcaagaagccggatgtctgcccttcctcaaccagctccctcaggagtgtttgcttcaagtgatggccggtgagctgcggagagctcatggaaggcgagtgggaacccggctgcctgcctttttttctgatccagaccctcggcacctgctacttaccaactggaaaattttatgcatcccatgaagcccagatacacaaaattccaccccatgatcaagaatcctgctccactaagaatggtgctaaagtaaaactagtttaataaraaaaaaaaaaaaaaaaaacncgggggggggcccggnacccaattn

SEQ ID NO: 1368 - DNA, 1444 bp, Homo sapiens
gaattcggcacgaggaagaatctgagagaaacctgacgcagggagcatgggtatctggacctcaggcactgatatcttcctaagtctttgggagatttacgtgtctccaagaagccccggatggatggactttatccagcatttgggagtttgctgtttggttgctcttatttcagtgggcctcctgtctgtggccgcctgctggtttctgccatcaatcatagcggccgctgcctcctggattatcacgtgtgttctgctgtgttgctccaagcatgcacgatgttttattcttcttgtctttctctcttgtggcctgcgtgaaggcaggaatgctttgattgcagctggcacagggatcgtcatcttgggacacgtagaaaatatttttcacaactttaaaggtctcctagatggtatgacttgcaacctaagggcaaagagcttttccatacattttccacttttgaaaaaatatattgaggcaattcagtggatttatggccttgccactccactaagtgtatttgatgaccttgtttcttggaaccagaccctggcagtctctcttttcagtcccagccatgtcctggaggcacagctaaatgacagcaaaggggaagtcctgagcgtcttgtaccagatggcaacaaccacagaggtgttgtcctccctgggtcagaagctacttgcctttgcagggctttcgctcgtcctgcttggcactggcctcttcatgaagcgatttttgggcccttgtggttggaagtatgaaaacatctacatcaccagacaatttgttcagtttgatgaaagggagagacatcaacagaggccctgtgtgctcccgctgaataaggaggaaaggaggaaattcatttctggcttccagtcctgaaaatgattaggaagaagcaaatggacatggcaagtgcagacaagtcatgagagaccccgactactcctcagccacatcgcaccaacaattctcttcaggtctaggatggcagtcactattcatgccggataatagagaactatgtgacgcagtcctctcaggagtctgagtttacagagccaacttgcagcacctggttatgcctcctttcatctcaaagccaaagagctgccaggtaaatggttatgtggtctatgttccaaacaaaccacatgatcttgcctgtgtcacaatgtaacaagactctagctgggtcccctggtgatgagtttcagcatagaataatgttcaaggaaaagaaaacgaaaacagtttaaatctctaccacagcctcacaagcaaatgctaaggggaacatacatgtaaaaagccagcaaactatcttcaaactcttccgtccttaatgtcttccatggctattgcccccacaatggtctcttttctccctgctcccttattaaagaactctttctgaaaaaaaaaaaa

SEQ ID NO: 1369 - DNA, 1892 bp, Homo sapiens
attcggcacgaggaaacctgctgctttcacagaggaaggcatttgctggctttcccaaggcaagaacaatgaaaacaaagtcatgaggagttctctctacctcaaatgaaggccgcagctcctgctcaagctattttggcagtctgagagaacagtacattctgaaccacattgacgcagggagcatgggtatctggacctcaggcactgatatcttcctaagtctttgggagatttacgtgtctccaagaagccccggatggatggactttatccagcatttgggagtttgctgtttggttgctcttatttcagtgggcctcctgtctgtggccgcctgctggtttctgccatcaatcatagcggccgctgcctcctggattatcacgtgtgttctgctgtgttgctccaagcatgcacgatgttttattcttcttgtctttctctcttgtggcctgcgtgaaggcaggaatgctttgattgcagctggcacagggatcgtcatcttgggacacgtagaaaatatttttcacaactttaaaggtctcctagatggtatgacttgcaacctaagggcaaagagcttttccatacattttccacttttgaaaaaatatattgaggcaattcagtggatttatggccttgccactccactaagtgtatttgatgaccttgtttcttggaaccagaccctggcagtctctcttttcagtcccagccatgtcctggaggcacagctaaatgacagcaaaggggaagtcctgagcgtcttgtaccagatggcaacaaccacagaggtgttgtcctccctgggtcagaagctacttgcctttgcagggctttcgctcgtcctgcttggcactggcctcttcatgaagcgatttttgggcccttgtggttggaagtatgaaaacatctacatcaccagacaatttgttcagtttgatgaaagggagagacatcaacagaggccctgtatgctcccgctgaataaggaggaaaggaggaaaaacaaggaactcaagatattatccatgattcttcctttaatatatctgtgtttgaacccaactgtatcccaaaaccaaaattccttctatctgagacctgggttcctctcagtgttattcttttgatattagtgatgctgggactgttgtcctctatccttatgcaacttaaaatcctggtgtcagcatctttctaccccagcgtggagaggaagcgcatccaatatctgcatgcaaagctgcttaaaaaaagatcaaagcagccgctgggagaagtcaaaagacggctgagtctctatcttacaaagattcatttctggcttccagtcctgaaaatgattaggaagaagcaaatggacatggcaagtgcagacaagtcatgagagaccccgactactcctcagccacatcgcaccaacaattctcttcaggtctaggatggcagtcactattcatgccggataatagagaactatgtgacgcagtcctctcaggagtctgagtttacagagccaacttgcagcacctggttatgcctcctttcatctcaaagccaaagagctgccaggtaaatggttatgtggtctatgttccaaacaaaccacatgatcttgcctgtgtcacaatgtaacaagactctagctgggtcccctggtgatgagtttcagcatagaataatgttcaaggaaaagaaaacgaaaacagtttaaatctctaccacagcctcacaagcaaatgctaaggggaacatacatgtaaaaagccagcaaactatcttcaaactcttccgtccttaatgtcttccatggctattgcccccacaatggtctcttttctccctgctcccttattaaagaactctttctgaaaaaaaaaaaa

SEQ ID NO: 1370 - DNA, 2509 bp, Homo sapiens
  SITE (617): n equals a,t,g, or c
ggcacgagcattttcactgtatatcatggtatcttaatgatgtatataattgccttcaatccccttctcaccccaccctctacagcttcccccacagcaataggggcttgattatttcagttgagtaaagcatggtgctaatggaccagggtcacagtttcaaaacttgaacaatccagttagcatcacagagaaagaaattctcctgcatttgctcattgcaccagtaactccagctagtaattttgctaggtagctgcagttagccctgcaaggaaagaagaggtcagttagcacaaaccctttaccatgactggaaaactcagtatcacgtatttaaacatttttttttcttttagccatgtagaaactctaaattaagccaatattctcatttgagaatgaggatgtctcagctgagaaacgttttaaattctctttattcataatgttctttgaagggtttaaaacaagatgttgataaatctaagctgatgagtttgctcaaaacaggaagttgaaattgttgagacaggaatggaaaatataattaattgatacctatgaggatttggaggcttggcattttaatttgcagataataccctggtaattcncatgaaaaatagacttggataacttttgataaaagactaattccaaaatggccactttgttcctgtctttaatatctaaatacttactgaggtcctccatcttctatattatgaattttcatttattaagcaaatgtcatattaccttgaaattcagaagagaagaaacatatactgtgtccagagtataatgaacctgcagagttgtgcttcttactgctaattctgggagctttcacagtactgtcatcatttgtaaatggaaattctgcttttctgtttctgctccttctggagcagtgctactctgtaattttcctgaggcttatcacctcagtcatttcttttttaaatgtctgtgactggcagtgattctttttcttaaaaatctattaaatttgatgtcaaattagggagaaagatagttactcatcttgggctcttgtgccaatagcccttgtatgtatgtacttagagttttccaagtatgttctaagcacagaagtttctaaatggggccaaaattcagacttgagtatgttctttgaataccttaagaagttacaattagccgggcatggtggcccgtgcctgtagtcccagctacttgagaggctgaggcaggagaatcacttcaacccaggaggtggaggttacagtgagcagagatcgtgccactgcactccagcctgggtgacaagagagacttgtctccaaaaaaaaagttacacctagggtgtgaattttggcacaaaggagtgacaaacttatagttaaaagctgaataacttcagtgtggtataaaacgtggtttttaggctatgtttgtgattgctgaaaagaattctagtttacctcaaaatccttctctttccccaaattaagtgcctggccagctgtcataaattacatattccttttggtttttttaaaggttacatgttcaagagtgaaaataagatgttctgtctgaaggctaccatgccggatctgtaaatgaacctgttaaatgctgtatttgctccaacggcttactatagaatgttacttaatacaatatcatacttattacaatttttactataggagtgtaataggtaaaattaatctctattttagtgggcccatgtttagtctttcaccatcctttaaacttgctgtgaatttttttgtcatgacttgaaagcaaggatagagaaacactttagagatatgtggggttttttaccattccagagcttgtgagcataatcatatttgctttatatttatagtcatgaactcctaagttggcagctacaaccaagaaccaaaaaatggtgcgttctgcttcttgtaattcatctctgctaataaattataagaagcaaggaaaattagggaaaatattttatttggatggtttctataaacaagggactataattcttgtacattatttttcatctttgctgtttctttgagcagtctaatgtgccacacaattatctaaggtatttgttttctataagaattgttttaaaagtattcttgttaccagagtagttgtattatatttcaaaacgtaagatgatttttaaaagcctgagtactgacctaagatggaattgtatgaactaatgatctggagggaggggaggatgtccgtggaagttgtaagacttttatttttttgtgccatcaaatataggtaaaaataattgtgcaattctgctgtttaaacaggaactattggcctccttggccctaaatggaagggccgatattttaagttgattattttattgtaaattaatccaacctagttctttttaatttggttgaatgttttttcttgttaaatgatgtttaaaaaataaaaactggaagttcaaaaaaaaaaaaaaaaaaaa

SEQ ID NO: 1371 - DNA, 2101 bp, Homo sapiens
  SITE (247): n equals a,t,g, or c
  SITE (2007): n equals a,t,g, or c
  SITE (2024): n equals a,t,g, or c
tcgacccacgcgtccgcccacgcgtccgggacgccggcggagacgcgggcgagtggttagcaggaagaagatgagccttaagtctgaacgccgaggaattcatgtggatcaatcggatctcctgtgcaagaaaggatgtggttactacggcaaccctgcctggcagggtttctgctccaagtgctggagggaagagtaccacaaagccaggcagaagcagattcaggaggactgggagctggcggancgactccagcgggaggaagaagaggcctttgccagcagtcagagcagccaaggggcccaatccctcacattctccaagtttgaagaaaagaaaaccaacgagaagacccgcaaggttaccacagtgaagaaattcttcagtgcatcttccagggtcggatcaaagaaggaaattcaggaagcaaaagctcccagtccttccataaaccggcaaaccagcattgaaacggatagagtgtctaaggagtkcakagaatttctcaagaccttccacaagacaggccaagaaatctataaacagaccaagctgtttttggaaggaatgcattacaaaagggatctaagcattgaagaacagtcagagtgtgctcaggatttctaccacaatgtggccgaaaggatgcaaactcgtgggaaagtgcctccagaaagagtcgagaagataatggatcagattgaaaagtacatcatgactcgtctctataaatatgtattctgtccagaaactactgatgatgagaagaaagatcttgccattcaaaagagaatcagagccctgcgctgggttacgcctcagatgctgtgtgtccctgttaatgaagacatcccagaagtgtctgatatggtggtgaaggcgatcacagatatcattgaaatggattccaagcgtgtgcctcgagacaagctggcctgcatcaccaagtgcagcaagcacatcttcaatgccatcaagatcaccaagaatgagccggcgtcagcggatgacttcctccccaccctcatctacattgttttgaagggcaaccccccacgccttcagtctaatatccagtatatcacgcgcttctgcaatccaagccgactgatgactggagaggatggctactatttcaccaatctgtgctgtgctgtggctttcattgagaagctagacgcccagtctttgaatctaagtcaggaggattttgatcgctacatgtctggccagacctctcccaggaagcaagaagctgagagttggtctcctgatgcttgcttaggcgtcaagcaaatgtataagaacttggatctcttgtctcagttgaatgaacgacaagaaaggatcatgaatgaagccaagaaactggaaaaagacctcatagattggacagatggaattgcaagagaagttcaagacatcgttgagaaatacccactggaaattaagcctccgaatcaaccgttagcagctattgactctgaaaacgttgaaaatgataaacttcctccaccactgcaacctcaagtttatgcaggatgatcacaatttagtggagagtatttatttgagcctaaattgtaggtagcccttactacactcaactgattgggatctagaatgtaactaaattgcttataaatgtcagagcattttttaaaggtacagtatatggggattgtttcgtttttcctagcaggggaaccttagttaataataaaatactacttatttgagttactgatacagattcatttaaggcttgtgtgcaaattttgtctcaatcttttttccctccatgattttcctatgtgcttcctctggcattcactgtggttttggtaaataattgccttttaaaggattaaacaaatgaatgctacaaagtgtatgttcaagaaaattaaatggtaccactcttccacagtttggaataattttataattgtaaagatagaaattatattgatargtaaatatgtaaaattgtaaatatgtaaaanaaagaatggtgtctgcngtgcatggcattttatatgttaattttttagtttaaaatgaagtatattgaatgttttgcctttagcacccattttt

SEQ ID NO: 1372 - DNA, 1322 bp, Homo sapiens
cgggcaaaggcgccctggaccctggcgaaggacgcttgccgccgagcggactgattcgcagagtctgtacatagtgtatattgctctacccggycgcacaccacgtcctgctctggcttttgccttcttgatgccagcctgctgcaacagaccctccccgcgcccctccccagcccatcttactgcaagcagcgtcctgaggagacagcggcacgttctagctgcgtctgcggccagcccgtgccagtggagtgggctccgcgttgctcattctctccgacaggttgtcagcctctgtccccgctgcacagggtcttgccccttctccggggcctgtgccagctcccttccctccccgttstcctgtccccacagccattctgggagctggggaacctggtctcaaggcaggccctgcagttccacagaggtggcaggtcttgccctttggccaacagatttcttgtcctgccttctagatgcctctgagctccaaacccagggcagccatggcttctcatttacaccaacaggtttcagttccaacagaaaggtcggggtaggttcgtgcagagatggggctggcaggggggctatgggaggattattttaacagatcaagaaaatgaagccaaatcaagtgaattaaattcctcacaattattttctttccctgaggtttgattggcacagcagcaaaagttgaggccaccccacttgtgtccactgtttttagaaaaaaatgaatggcttcctgccattgtggggctggactcttgggctttcttggtgggagcggagaaggggcctcccacccttgtccgagttgcctcccactggaggtcaggagtctacactgcagcctcgggcactgtggggagtgcatgcctggggcctctgggtggggaccatggacaggccctggtcactgtcctaacctttgtcaggacaaaggtagcaagaggatttcctggcgggtgggaaggaatggctggggcggccagttttgacacgccccagtgccctggagaacaaccagggtcatctgcacttgatgactgctccccgacccccagcccggacacctcattcccctcccactacagggatcaagtgacctgggaagaaccgagttyaacaccaggatgtgtttccttagatttcctttcctaggcgatttccagggagagccctgattggacaatcacatcacagatcacactgcagtttccatgttagcactgtggatgggtttttaatcaataaaaactgggggtttcttctcaaaaaaaaaaaaaaaaaaaaaaaaaaaaaaactcgag

SEQ ID NO: 1373 - DNA, 1111 bp, Homo sapiens
  SITE (115): n equals a,t,g, or c
  SITE (1095): n equals a,t,g, or c
agcggcagtcgggtgggaagccgtgtctcgcagtcgtggactcgtgcagctggggcgtcygcakscgctcgtmacccgcgtratgctgtttctggcgttgggcagcccgtgggcngtcgaactgmctctctgcggaaggaggactgcattgtgtgcggccgccgcgctccgaggtccccgggcctctgtctcccgggcgtcctccagcagcgggccttcggggccggtagccggctggagtacggggccttcgggagccgcgcgccttctccggcgtccgggtcgagcgcagatccctgtttattgggaaggatatgttcgattcttaaatacgccatctgacaaatcagaagatggaaggctaatttatactggcaatatggcccgagcagtgtttggtgtgaaatgtttctcttattctacgagtctgattggccttacatttctgccatacatttttacacaaaataatgctatttctgaaagtgtgcctctgcctattcaaatcatattctatggcatcatgggaagctttacggtgatcaccccagtgctgcttcactttattacaaaaggctatgtcattcgattgtaccatgaggccacaacagacacttataaagccattacctacaatgctatgcttgcagaaacgagtacagtgtttcaccagaatgatgtgaagattccagatgctaaacatgtatttaccacattttatgctaaaacaaaatcactgttagttaatccagtgctctttccaaaccgtgaagactatatccatctaatgggttatgacaaagaagaatttattttgtatatggaagaarccagtgaagagaaacggcataaagatgasaaatgagcctatttgttagtgttcgtgctyaaatgtgatttacgttttaatgtataataataaaattgccttttgcattccgttagtgactgattgttaaaaataatttgaaattatcaaagcttttaatttccagagaatgatgtttgtttataataaaacaagctatgtttgaaaaccaaaatgtagtatctaccattcgtgttttagaaaggtatgtgaataaatatgttctntgaagatcggactggt

SEQ ID NO: 1374 - DNA, 1514 bp, Homo sapiens
gctgcaggaattcggcacgaggcagcatctgggctgatgggccgtaccctgcaccgtgagccacccgcaggagaccaggagggcacagcactgcacctgcagacaagcctgccagccctttctgaggcagatacccaggaactaacccagatcctgaggaggatgaaggggctggccctggaggccgagagtgagctggagagacaagacgaagccctggatggcgttgcagcagctgtggacagggcaaccttgaccatcgacaagcacaacaggcggatgaagaggctgacctaggggcagaacgtccctgcattcctgtctcaccctgcacatcccgctgagatggagggctgggcggcagtgccagggctgcagaggcctgtggccctccggagtggtcttcctctggatggggctgctactgtggggctgcttctgcaccaggggcctccccaggtgtgcaccatgcctgcctcccacttggctgtccctgctgctgggcaggacccggccacatgttctgcggatgctgcagaagtgtggaccatggcgggaccccaaggacacttggcacaggcctggaagaggccgccctcgtcttgtctcggctccctttcatggacagactggccttcttagctgtactataaatttgtgagtgaagttagagcccagctcacttagccagctcactttgagggcatcctataaacacccaactgttcttttatcgtctcggttttagccaaaagtgaaattagcatgactgcatctttcaaacaaaaatattgatttctgcttttagggccccgtttccatccagaaataaagggaaatgctggctaaaaaaaaaaaaaaaaaactcgaggtcgacggtatcgataagcttgatatcgaattcggcacgaggtgaaattgacctgcccgtgaagaggcgggcatgacacagcaagacgagaagaccctatggagctttaatttattaatgcaaacagtacctaacaaacccacaggtcctaaactaccaaacctgcattaaaaatttcggttggggcgacctcggagcagaacccaacctccgagcagtacatgctaagacttcaccagtcaaagcgaactactatactcaattgatccaataacttgaccaacggaacaagttaccctagggataacagcgcaatcctattctagagtccatatcaacaatagggtttacgacctcgatgttggatcaggacatcccgatggtgcagccgctattaaaggttcgtttgttcaacgattaaagtcctacgtgatctgagttcagaccggagtaatccaggtcggtttctatctacttcaaattcctccctgtacgaaaggacaagagaaataaggcctacttcacaaagcgccttcccccgtaaatgatatcatctcaacttagtattatacccacacccacccaagaacagggtttaaaaaaaaaaaaaaaaaaaaaaaaaaaaaaaaaaaaaaaaaaaaaa

SEQ ID NO: 1375 - DNA, 2799 bp, Homo sapiens
  SITE (2794): n equals a,t,g, or c
  SITE (2799): n equals a,t,g, or c
gcggctaactatggcgaccgccacggagcagtgggttctggtggagatggtacaggcgctttacgaggctcctgcttaccatcttattttggaagggattctgatcctctggataatcagacttcttttctctaagacttacaaattacaagaacgatctgatcttacagtcaaggaaaaagaagaactgattgaagagtggcaaccagaacctcttgttcctcctgtcccaaaagaccatcctgctctcaactacaacatcgtttcaggccctccaagccacaaaactgtggtgaatggaaaagaatgtataaacttcgcctcatttaattttcttggattgttggataaccctagggttaaggcagcagctttagcatctctaaagaagtatggcgtggggacttgtggacccagaggattttatggcacatttgatgttcatttggatttggaagaccgcctggcaaaatttatgaagacagaagaagccattatatactcatatgggatttgccaccatagccagtgctattcctgcttactctaaaagaggggacattgtttttgtagatagagctgcctgctttgctattcagaaaggattacaggcatcccgtagtgacattaagttatttaagcataatgacatggctgacctcgagcgactactaaaagaacaagagatcgaagatcaaaagaatcctcgcaaggctcgtgtaactcggcgtttcattgtagtagaaggattgtatatgaatactggaactatttgtcctcttccagaattggttaagttaaaatacaaatacaaagcaagaatcttcctggaggaaagcctttcatttggagtcctaggagagcatggccgaggagtcactgaacactatggaatcaatattgatgatattgatcttatcagtgccaacatggagaatgcacttgcttctattggaggtttctgctgtggcaggtcttttgtaattgaccatcagcgactttccggccagggatactgcttttcagcttcgttacctcccctgttagctgctgcagcaattgaggccctcaacatcatggaagagaatccaggtatttttgcagtgttgaaggaaaagtgcggacaaattcataaagctttacaaggcatttctggattaaaagtggtgggggagtccctttctccagcctttcacctacaactggaagagagcactgggtctcgcgagcaagatgtcagactgcttcaggaaattgtagatcaatgcatgaacagaagtattgcattaactcaggcgcgctacttggagaaagaagagaagtgtctccctcctcccagcattcgggttgtggtcacggtggaacaaacagaggaagaactggagagagctgcgtccaccatcaaggaggtagcccaggccgtcctgctctaggcagagtcccgggaccatggcctcctgccacacaacacgcagagaggactcaagactcccgctggccatggagtggcctgaaagagagcaagaacatgtggatctttgataggattgttaccaaatggtgtcagtatggaccaattgtgtgaccatgagaaggatgcttattttttttaaaaagaaaacacatctaaaagcccaggaactgatttttttaagaggaaaactaatgacagtgtataactgatgtttaaattgtgcatttagtactatttaaatgttttcttatactagtattttatattcttttgttgtcgtttaaaactggagcttcagtgtctcttccctccctctaatagtaatggttcagtaagcactccttaactccttagtatttcatagaaaaatgactgcaacattaaagctaagaggaacacttcarcatatgtggtacaaatttatattgaagatctaaataaaccacgtattttccagtcttcgttgtgtgaagctaaatggtggctaaaaggaacactttttgtgtgattattataaactttgcattgtatttgaatcttagaacttttgtacacactaaatattgatgtcacaccatttctaatctgagcatccttagccagagaatattcattatacttcctaagtgagcaataatttaaatcagaagctattttattttaatgtaattaacctttctttacatttcttatgtgttcacctctaatctgttttaggaagagagttggttattatgttgatcccataatataaatcatatcctttatattttagaatatctcaaatgtattccttttttgtatggtgggtttgcctagggacgtgtaactacaggcttttactaagccaaggaaaaagagaatttttcttttcatcttacaaattccagatatctacaaaagatgtgaaagcactaaaaataccatttttaagcagtactttacctgttttttctttagcaaaccaggttatgtggtgtaaaggtttgttatacgtgccacaatatagcatataaatattatgccatcattccttctcttgttaaaggtagaagaataaaattgtgatttttataacctgtgcttattactcaaatggtcttcaacatctttttaaacaacacatactttttgaatgttcagtttctattttgcttgaggtattttgtacatatgtgccttgtgattgctgctgctttaaaggataaagtactctttgggggatgagtctggtttgttttgttttattttttaatgaaataaacctatattcctgaaaaaaaaaaaaaaaaaaaaaaaaaaaaaaaaaaaaaaaaaaanggggn

SEQ ID NO: 1376 - DNA, 990 bp, Homo sapiens
accatgtttcatcatcctgtagctacatctggtcttccttgtgtgctgggggactgcagataggtcaggggtatcagcctcagccactcagacaaggaaagggggcaccacatgagctcagggacccccacccccatccctggcctgggtgatggtacagcgtctggccctgccaggtccttggcctgcacaaagtcagtgacagcaggtgaaatgcccagctgggtgcctgcctggagcgggtgtggggcagtgagcccctgtgggtgtgggcttgggagtggctgtgacaggtggtgagcagggcaggggcaatcagacagccctcagaaggcctcatggcccccggtgagctgcaggaagaggtcttcatccagctcctccccacgggcccgctcccgcgtcgacaggaaaatgtagcccccgatatactcgtgtacaattcggcagctggcagacacgcagctgaaggccacattgatgtgttcatcaaactcgatggccactgccggatgtcccagttgacattccactggcgcatgttgctgaaacgccaggtcttgaccacgtcgcccacggccaagtcgatgcggatcagtcggttgttggcgatgcccaggatctcgtctttcctgctgcccttgaacctgaccatgacataggagatgccgaagtcgggcagggactgccaggcctggatgaagcgcagctgggcctctgccagcgacaactgggccacattctggtgggcttccaggatccgtggggtgagctgcttggccttgaactttcgctggaaacggggggcaacaaggccgtaggggttgaggccctcggcagaggcatcagggccgtgggggtggttgcccgggcccccactgcccgtgcgctgcaggctgaggaaggccaggatggcctgcacctcgctggtgtagctgctgtcggccatggtgcggcctttggaggccaggcggcagccagcctcgtgcc

SEQ ID NO: 1377 - DNA, 1316 bp, Homo sapiens
ggcacgaggctcccacttataagggagaacatatgatatttggttgtccattactgagttacttcacttagaataatggtctccagctccatccaggttgctgcaaatgccattatttcattccttttatggctgagtaatattccatggtagaatgttacttttgtttatctacttgttggttgatgggcatttaggttggttccatattttcgcaattgcaaattgtgctgctataaacatgcatgtgcaagtgtccttttcaaataatgacttctttttattaacaccctgtagttaataacctgaattctttatagcttgcattctgaaacatttttctcgaactatccgccttctggcctgttccagtcattctggctttcatcttgatttgtttttcttaaaactttctccagcttccctctgcatctgtgattcgtgctctgcttcttgtttgtggctttggatcaataatgctacagatccagtctaattaatcatggatcaaaagctaaagcatccttcccccagatggtttattattaataccacccagaaaaataatttataatttaattctctacctcatagagtttgggatccttggtagaatgtgttcccttccccttttcttcttcgctatttcctcctcttcctctccatcaaaagtggctttatctccacctttgcagctgacagcaaccctcccatgctccgttgatgaagccctcctttcttaacccctcgtccatatggctctccctccaccctgctccatctcctgtgatctcaaggcctcggagaaatgatctcaaggcctcggagaaatgaaaagtgacctttggtatttgagacaaccaatagcaaaatatagctcccacttccaacagcccatattggtgggggagggatttgcttcatacgtggtctgtgttgggccattctccttctccatgttttctctgttcttacagcaccatctttttgcctcatttctttgctctactctattcctcccccatcatcgtctggtgactcacactgtaatcctagcactttcggaggatcacctaaagtcaggagtttgaggccagcctggccaacatggcaaaaccccgtctctactaaaaatacaaaaattagctgggcgtggtaatgggcgcctgtaatcccagctactcaggaggttggggtgggagaatcacgtgaacctgggaccgggaggctgcagtgagccaagatggtgccactgcactccagcctgggcaacagagcgagactccgtctcaaaaaacaaaaaaaaaaaaaaaaaa

SEQ ID NO: 1378 - DNA, 1146 bp, Homo sapiens
ggcacgagatcattttgatttctaacaatattggtgttggttattggaccttccttccatgaagcccagtgagctgcttctgacagaggtaccaagagactacaggggaactaatgggattgtcctcagtgacatcagttttaccagctggggactttgtttgaatgccctggatttactcactgaccactctggaaatgcaatctattgattgataaccctccttgaacttatctgtaaaaccattcatgaaatattttatgtttccataggctggcaagttctcatttttgtgtgttagattttcatggtgaccctctggctctataattcttttatttgaaaaaacacaaccatgtttactctgtcattactcttcaagctttttcgtatttcattttcccttccttttagaaggagtgttttcacactgtagcttttctcatttctttatgcaatcaccctgagagatcgaaagttattaagcataataacctatattgtgtcaaattgtgggtacatccaaagtgcagccatgcgtgggtgttaataggaaattccaaagggttcataaaaatatcttcagaagtttaatacattcagaatatatccaattagcattagtggatttctaatttcacttgacacattcatcataatgaattttgcttttgaagtagtgttctgtttaaactggcgctctggtctatggtagtgtttttttttttttttttaaaaacaggcttactttcaacatccatttacaaacatttgttgaaaaatattttaggagtatttgtttaaacattattccgaatttactgctccataaagcctagtgaatatttaaattcttgaatatgttgccagaaaaagaagcagagatccaaaaacaagtatatgaccagagttagagctgaaataatagcttgttgaagaagagaaaattgtaataaattgctttatcaaacttgctttcaaaacctgttttttaagttgggcacagtggctcacgcctgtaatcccagcactttgagaggccaaggtgggtagatcacgtgagctcaggagttcaagaccagcttgggcaacatagcaagacttcatctcaaaaataaaatagcgttaaaaaaaaaaaaaaaaaaa

SEQ ID NO: 1379 - DNA, 545 bp, Homo sapiens
  SITE (46): n equals a,t,g, or c
  SITE (536): n equals a,t,g, or c
  SITE (544): n equals a,t,g, or c
ccgctctagaactagtggatcccccgggctgcaggaattcggcacnaggtagggctgccaggctgcagcctgctgctccagggagcaccagctgcagctgatccaatacaccaagcctgtgtctccctcttctatcacctctctccaggatctctgctgtctcttggatcccatctgcctagatggaagaggatcctatccgaagctaggataaatgttgtcttactcctctgctatgttctcccagaaaaaattgattacaagttctctgctgtggttgctgcagctccaggaagtccccgcaatgtctcacgttgtctttgaccagtggtccccagtaccaggccagagaagacaactttataatgtcatttgtgttgtgaaaattcttccactgacccaaaatggaaccgtacaaagcctatccgtgtatatggaaaagtctcatgcacctggattaactcagaaaaagtaaagtcctgaaacttcaaaaaaaaaaaaaaaaaactcgagggggggcccggtacccaattcgncctatagna

SEQ ID NO: 1380 - DNA, 606 bp, Homo sapiens
ggcacgagctcgtgccgactcgtgccatttaacctgatacagtcatacctattaatgaattgcatgctcaaaaattacttataattaggagtataagatcaaagatgtttggaaactaatgatatatattgatttaattagccatgtccctattgataaacttttgggttgttttcagtgtttttctcttataaataatactgcagtgagtaaaaccttgatgcctttttctgagttctcttctcagccactacaaatggaactgctgttccataaagtgtaaacatttatgaattgaatggaaaattccaaattgctttccaaagtgtctgtacagggctgggcaccatggctcatgcttataatctcagcactttgggaggccgaggtgggaggatcgcttgagcccaggagtttgaggctgcagtgagctaagatttttgctactgcactccagcctgggtatatcagtctgttttcatgctgctgataaagacatacctgagactgggaagaaaaagaggtttaattggacttacagttccagagtctcaggcaggcctccttgtcccagatcccttgtgaatgcactaactctgaccggca

SEQ ID NO: 1381 - DNA, 1035 bp, Homo sapiens
ggcacgagtttctgacaaggcacagctctggctgaagcttcatttaccctcaaaacctctgctggtcaggatgaccaggtaaataattttctgaagaagacagcaaagcaaaagtgtgctagatacactgaatcctgttgccaaagaaccacaccagtgaggctgccacacacgaaggaaggaggtctctgaagcaagatgtgccgtgtgtcccctaaacagtagcttttgttttgcctcgtatgcaagaccaatgctatcaagttgaaagagactttttggcagaacttcagacatcaaagaggatggatgctgtgactatctgtggtgccaagaagggggatgaaaatgaatgcagatgtattcacttcaatagatgacagtgtccttggtttccaggagttctgtgttcaacacttgtatttacaatgctcaggcaaggaggccatgccatcaacctaatgtcattacagcaggcaggtggaaaatgagtttaaagcaatcgctttgtgccttgtttgttctctcactaattcaatctaatctcaagccccaaacagatcttccaccagttctgttctcagggggcttcagcccctagaaacacctaccttgaattcaagctgtgttgggacaaccaaaaagaaggaaaggttaaaaggaagaaaacaagggaaagaattggggagaaggagattaaggaagaaaagcaggaggccgggcgcggtgctcacgcctgtaatcccagcactttgggaggccgaggcgggtggatcatgaggtcaggagatcgagaccatcctggctaacaaggtgaaaccccgtctctactaaaaatacaaaaaattagccgggcgcggtggcgggcgcctgtagtcccagctactcgggaggctgaggcaggagaatggcgtgaacccgggaagcggagcttgcagtgagccgagattgcgccactgcagtccgcagtccggcctgggcgacagagcgagactccgtctcaaaaaaaaaaaaaaaaaaaaaaaaaaaaaaaaa

SEQ ID NO: 1382 - DNA, 2414 bp, Homo sapiens
ctaaacccacagctttaagttcttccctaaaagaagcattgcagctaacccttgaactcacagttttaaaatacagtatttctcttctccacatctccatgccttcgcatcaatgcttgtttttcctggtgaacactatagataatctcctgtytgaaatgtgggacagggtgtttcatggcagtggagctaagtttctcctctttatagtgaactggtgacccaaatgtccctgtcatttatagtgaactgatgacccaaatgactccctgtcagtagagtcccatgtggcccatgcttcacacaagcagaaatgaacgcactgtttttaaggctagattatcagttctagaatgattacttcaaagatgggagctacctcctcagatattcacactatgaaatggaggtgcttgatgtgtttcacactggcttgtttgacagtcttctatcttactgttaattcagcagtattttattgtgaaagaaaaccccagtgtttgagctcactcaggaattggggagagagatggaccaccactgtggtgcatttcttaagtgttctgggagaatgtcatacttttccttcccagagtaaaagaaaccttkgggagatcctgagggagactgtttctccccaagtatgatgatgtctagtcaagtctaagaataccactggacatgttctatggacatttgggattgcagttgctattctgatttgattggtcctcagtcaaatggatcactttgaaggaaagctttggttgtcaccgktatataccactgagataaagtgttagcmaagtatggttcaaattaacttatgacatgaccaagagcttttctcttccaaaagatgaattgtattgtaaatagtttctcaaaatatttttaactggatcatgagcatggggagagaaagtttctcagctgctaagaatttccccactgtttacttctttcacttatggtggtattgcatttaagattacaaaatttaaggttttatttgtatctattacccaaaccattaaattgtctttaatttcattgttgtcttggaggtccagtgcatacagggctgatgggggaaaactccctctagccagtcagcactctaacccaggattaaaccatcccatcaagtagtatgtgaagtcaagtcttcgtactcttgcagaccagacattgaaatggattcattcatatagatttctataaatcctataagtgaaaagatagacaactgtccgcagttgcttttaaaaaaggtcactataataagtactatatagtacagtattaatttatagcaggaaatcgtatcttgtaaactgtatataaaacactgttttatggtgcaatcatttgtcaaacttttgtctgtttcattgtttttagagtgtgtgcattcttctcatacctaagaatatcactgtaaaatctgctgaaaactatttttaggttttatttgcacaagactgaattagtttgacatttttggaagctcctattgaacatacccaaacatctgtaaacatgaaaaatcttcaatttattaaaagcaaacatttcagtatgattctttccaaaggtaatccatgttctatgttgttaatgtgtgtatgtaatttttctgactcttccacctcttataaacctattttctgtttcatttgttttgtttttgaaggatggctcttttttctttttaatgttctagatgaccaaaacactattggtttttacccttttgcctaaagctttgatatccccacttgatgttctgtgaattcactgtttaatctattaagtgaaataataaatagtcctggtgacaaacaatctgttgatttagaggaaaggccctgaaaaatacagtattgggaaactaactttgcatatgctgktagctattattyygcatcatgggcttcatgggaagaacatgktgcatttattttgtctttattaaaagactactagccacaagttactctgattatagtaactgttttatcaacccacttcatctttaaaaaattaaatttacattcacaattcaaaacagtaagctgtctttcagaaaatttttgaaggataaaaacatgaaggaaaaaagtggcccgtgtaggtaggattccctacacaggacttttagttgtatcacctcaagagattttgaagtttgtgatcaaggtctgtatattatcccaaactttattaagaattgttttctaattggttataacatttttcaattaatagtttcaaaacaaattgttaatacaactgtataaaatgaacataattttcctcacttgtatttttgttattgagcaagtttatcaaaataaattgtctactaaagaaactaaaaaaaaaaaaaaaaaaaaaaaaaaaactcgtag

SEQ ID NO: 1383 - DNA, 582 bp, Homo sapiens
ggcacgagatccacttcccataggctcatcacctggcaatccccaattctctgtcacggtagttctgcctttttaaaatatcatatacataaatttacattatctggtcttttgtacctggcttatttcacatagaataaatgttttgaagtttatgttgtgtgtatcaatggtttgtttcattttgttgttgagtattctactgtatgaatataccaaaatttgtgtgtctgttcaccgattgattgacatttgggttattacaactttaaagctactataaataaacctgctaaaaatgtttacataagagcttttgcattggtatagattgtcatttctctggagtgaatatctaagaggagaatttctaggttatatgataagtataaccatattgttaagcattctagttgatgtgtagagaaagacaggatcgaaagcaattaaaatgaaagaatatttcaaaagataaaagagaatatagaataacatggttataaaagccagtggaagagtgattaagggatggaaactggagtttcaatgttagaacttcagaaattgaaaaaaaaaaaaaaa

SEQ ID NO: 1384 - DNA, 1426 bp, Homo sapiens
  SITE (506): n equals a,t,g, or c
ggcacgagtactcatacaaattcttagtatatggtgcgtatactgtcaatggtagttatcatcatcatcattattaatgggagcccattatgtgtgctgtcttatttcatcttcacaatattcacatgaaataagcattatctgtactttatgaataagaaaactgaggctcaaagacataaatgtcttaatcaagtcacccatctattatcagaaagaacggggatttgaaaatgcatcttcctagagacaaaacttgtttccattatgccacaggattttactatgtaccacggctttaaaaataataactcttaggaggacttatttataaaagactcctggtattgcaggaggaaagtaaatatattttcatgactctgcatctaactctgggttctttccttaatcccatgtgtgtgtgtgtgtgtgtgtgtgtgtcttttttaaagggaaaaatacccatagattttctcttgcttcagtgcaacattgcagatgatccntagtgatgacctttcccaaagttacattgtagaattcattggctaatatcggctgataccaccgcatgaggtgcataattaagtgatgtggtggcaagaccagattcattatcgtagacggtcatgtgccctgccatgacattttggtcagggacagactgcatatacagtggtgtgcccataagattataatggagctcagctaaaaattcctattcttggtgacatcatagccgtcataacaccgtagtgcaacacattactttttctatgtttaggtaagtttctatacacaaatacttaccactgttttgccgttgcctaacatattcagtacagtagcatactgtacaggtttgcaacaggctataccacaccgcctaggtatgtagtaggctgtacatctaggttcgtgtaagtaaattgtatgatgtttacacaatgagaaaatgttccatttcccagttcatatcctccttcttaagcaatgcatgagtatctcttctgttcttatgctttcctcttccaggaaatagatataagttgtgtcctagcaacaattttttgcttcacataatatctaaagatatctaaataaattaagattcactaatgactctagtggcttttaatgccatgagatattcctactagttctttctgtcattggtttattttcattatgtagattagaaatgaataaaaattacttccttattttacactaatactaataaatgcctctgatttttagagaactgtaatagatatatgatgtgttactctctttgactatttgtataattttgttttttaaagatacatctagattaaaaactactgttgtaagctgttgaaatcttccatatggccaaaattctgtcactgcctatagaaattccaaaaaaaaaaaaaaaaaa

SEQ ID NO: 1385 - DNA, 712 bp, Homo sapiens
gctggaaccaacaagaaaaccttaatatggaactgcaatgatgggaatttggggcattgaaagaagttgggttggcaacattgcttgggtgatttccttgctaacattgtactgtaaggtgtgagggcctttgcattagactctgactgggctctgtaaacctgagcctcattcttagaacctcttgagccccttgatgttgcccagtcaagtccatagtgactgtaggggctgaacttcaagggccacttttgcttatagccatcacctgagagcacctccagaatcaaaatggccttgggaagtacttgccccagagagagttttaaaaattattctgtcaatctgactcaattccttgtagatagttcatttccaggcatgtattttcttggagtttgttaaaaacaatggaaaaatcttatcttaaaagtacctcttgggccgggtgcggtggctcacgtctataatcccagcactttggaaggctgaggtgggcaaatcacctgaggtcaggagtgtaagaccagtctgaccaacgtggtgaaaccctgtctctacaaaaatacaaaaattaaccaggcatgatggcaggtgcctgtaatcccagctacttgggaggctgagatgggagaattgtttgaacctgctgcattccagcctgggcaacagagtgggactcaaaaaaaaaaaaaaaaaaaaaaaactcgag

SEQ ID NO: 1386 - DNA, 1702 bp, Homo sapiens
ggcacgagatcacacatcatgcggtcattctctttgtccttgtgccagtcgcacagaggctccggggagaccttggggacttctttgtcggctgcatcttcacggcagaactgagcactccgtttgtgtcgctgggcagggttctgattcagctaaagcagcagcacacccttctgtacaaggtgaatggaatcctcacgctggccaccttcctttcctgccggatccttctcttccccttcatgtactggtcctatggccgccagcagggactaagcctgctccaagtacccttcagcatcccattctactgcaacgtggccaatgccttcctcgtagctcctcagatctactggttctgtctgctgtgcaggaaggcagtccggctctttgacactccccaagccaaaaaggatggctaaatgctcctgggagtcaggcgcagcctcacaccagctgcctcctccactcagcattccatggaccaaattgtgccctgggtagcctcagactttgggtattgataagccgatggatttgagtttttctaaagaatattcatattacctccttcttctaacttgccctatttgcaaaagcacttttgtagtaacaactattgggtcctgtcagacctccacggacagcaaagtggttttaatgcaagcccaaggatccttcttaaggtcttatctcaagagctctgggaagtggaagcatggggtgggatcggtggaccagggtggtaagtgtctgcacatctgcctgtccctgtatcagcggctacccaccttccaaaccactcaggacagtacccgtggcactgggcccgcagaagcaagggatgacttggttcttggaagtaatgtcgtcttgtgacattggcctgggacaatcattgtgggtaggtagttattgatcgtttactagataacccattggttctttgcctcatcctctcatccatgggtcagagttgaattcttatgtctatagacttccaatcagaagtctcactggtggggctgggggtgggggcaggcaggaggcatggatgggaacctgagtaggtagtgtggccaagagatcagcacaacctttgcaggctgacttgctaagtctgacagtgacaaacttgtgagctactgcagtcagtcacagaggctgtcttttcacacacccttcatgcccggctttccccatatccacatgcagagggcgagctcataaaactacagggaagcgtgaaatgatggctttggtagctgtttactgggtaaccccactgtgacactgtccttttcatgtgatgtggaaacctacttctgtcctccaaaccatgaaatgtgtcatctagactgcagagtacttgagtgctttgcctcccgatatgccagagcttgtggtccaaagcccattcctgtgtgtccgtcctgccatttagccacagaaggctgcggagtgaggcggcagctagcctggccagtggctgtcccgtggaccgacacctgcgcccccttctgcaagcaggattttctggtgccaacactcattcatcattcccgatcaactaggatgaatttaagactgtgctaccatgtgttctcaagtggtagtttaaaaagtggatttttaaagtgcctttcaattgtctgtgaacgtctaaaggactgatttgtctcaaaaaaaaaaaaaaaaaaaa

SEQ ID NO: 1387 - DNA, 1720 bp, Homo sapiens
ggcagaggcccgtttcatcctttcctgccttcttaagatcttgcactgccaaattcctcactccttcaccttcaggctcttttgtcctctccctaaaaacagaaactaaaacacccttctgaccttttaatgttactgtcctctttctgttctttctgtcaccatcagacttctcagcttaccatctccatttttcacctttaacccattctgaactcattgaatcatgcttctgccaccaccatactactgaaacaggtcatcggtgacccacccccggatgagaccacttcatcaagtggtctcatcttcattcctcttcccacttcacttcagtaacattttatatattcacctctcaccttgccacattctactcccttggttactgtacagcagtgctgttcagtgtcttcccttccattctcacctccttcgctcttcctgtcttctttttaaatattagtgttccctagggttctgacctcagtctttaccctttcttacgtttctccagggatagtgagcttgtagcccgaagactgcattctctacctacagaattattatgggcattgtttttatttatttatatattttaaatagatttaaatgccttaaacgggatgtatacgcctttctattaagggcccctcttttcttaaccagatagcgccacatagttgttacytggtgsscactgaagttacctgatttgtgactcttgccctattttcaacctaaatggtttgatcccttatgattatcacccttgcttaagtattaccatgacttatgttgtctctgtggatctgctgccaaagtgtaaaacattattcccatatctaattarctaactgctaaactttaaatttatactcctaattgtttatcagaaatgtgtatctaaattagcatgaccaaaactaaattcccccaaaagaactgctctttttcttctcaactgggaatattttccccataactctactcgacattctaaccaaaaactttttgttttcttcgcctttcctttctccgttctcctctctactcccaagcaatttccccttcagtcttctctgtcttagaaaatcatccactcactcacatgtttgctgaagccaaaattttagcagttatctttatcatttaggttccagtcaggagacagttatttgaacagagagaattttttagaaagaattgtgaactaggtaaaaagtagctaaatagataactgaaaaagtaaaaagaaaacgaagatatcatggagttaaaaactggaagaagcaacaaccacctgtagggctgggagaacaggaagaaaagattggaacaaataagacttagaaacttaatgaagagggcttgtggaactgagctccctggtgctggagtctcttggtagaggcagaggtggggtacgtctgtgataaagctggttctccaaaggctgagaaaagtgccaactgtatttagttgctcttaaggaaagaagtgctgctgcagggatgagaagccttgccaggggtgacagtcacaggaacacaagcaagcccacaggaagcagttagggaggaagcagccatggtgtcttccatccagggccagcaggcaaagctgatgcgtagtgtgcagagtccttggtgcagcatcccaaagcacagtatagaagggtggggttagagatgacaaaaaaaaaaaaaaaaaactcgta

SEQ ID NO: 1388 - DNA, 505 bp, Homo sapiens
ggcacgagcagctgtttctatggtaattttttgttcattgttatcacttatagcttactctattatggcttttttaaaaaaaaatctctgtatattttctcatccttacttgtttgcttacttttctaaccattagtctaaattgacatttaggtaaatttgcttttaagttgaatacttaagccaatgattcagtcattttgtcttttctggggtgggtagtgcctactagacatttaattgtgctgcattttaatatttcttaccattcattataaactttttttttttagacaggctctccctccgttgcccagactggagtgcagtggcaccattttggctcattgcatccttaacctcttgggctcaggcgatccccccaccttagcctcctgagtagctgggactactggtgcgtgccactgccatgccttgctaatttttgtaccttttttttttttttctgtagagatgggattttgccatgttgctcgggctggtc

SEQ ID NO: 1389 - DNA, 485 bp, Homo sapiens
ggcacgaggttatgtacatatcattgttaatacagtcctggcattctgtacatatatgtattacatttctacatttttaatactcacatgggcttatgcattaagtttaattgtgataaatttgtgctgttccagtatatgcaatacactttaatgttttattcttgtacataaaaatgtgcaatatggagatgtatacagtctttactatattaggtttataaacagttttaagaatttcatccttttgccaaaatggtggagtatgtaattggtaaatcataaatcctgtggtgaatggtggtgtactttaaagctgtcaccatgttatattttcttttaagacattaatttagtaattttatatttgggaaaataaaggtttttaattttatttaactggaatcactgccctgctgtaattaaacattctgtaccacatctgtattaaaaagacattgctgaccaaaaaaaaaaaaaaaaaa

SEQ ID NO: 1390 - DNA, 2007 bp, Homo sapiens
cggcacgagtgaactcctgacctcaagtgatgctcctgcctcagcctcacaaagtgtggggattacaggtgtgagccaccgcacctggccagaaaaagagaaaataatttttattatagattatcagtagttatgtatattaatgaagaatttggcttcatttacctaattagattaatcataaatcatttatgaatagtaatagacttgaattgttactttatattacacagttggccctctgtacctgcaggttctgcatcctgggattcaactgtggatcaaaaatatttgggggaaaaaaagcaatacaacaataaaaaataatacaaattaggaaaaatatactacaagaactatttacatggcatttacattataagtaacctagagatgacttaaagtatatgagaagatgtgcataggttatatgcaaatatgccatatgagggactggaaaacccagggattttggtgtcctgggggctcctggaactaatcacctgtggatactgagggacaactgtaattaaattgatttttggatggatgcaactgatgttaaatttggcgggggggaaatgttaggattcacaataacgtgagtactgtgggttggagtagagaatatgcttttcagactcattttcctttggaaattaatagtaaggtctcaagtgccccctacagccttgctactcaaagtgggttccacaaagtgttgacagtatggtactaaatagaaagtggctgaatgagaaatgtaaattgcagagggcaactggtgtgtttatatgcctgacattatttgggttttcccccctcaggcagaagctgaggaagattgtcattctgatactgtcagagcagatgatgatgaagaaaatgaaagtcctgctgaaacagatctgcaggcatgtttcttcaattgtgtctttgatttttattccattgttcccatacatatgcagaaattgatcataatcatgggtatttgtaggttattactgtttgcatggaatttaactgtttccatactggtttatagaatacttaaaactatgttatggctttctttgtgaaaagaaatatcaataatggttgcttgtagtttaacatgggtttaaagtattcaaactaaggcttacgcatgactcaaaacccataatcttaaaaagattgatgggtttgaccacctaaaagtttaaaacctgtgtataagaaaaggcatcataaataaagttaagagaaatagccagctggaaaaactgtttattatatatgggcagaggattcatctcattacatagagcactcatatatttggaagaacagaggataaaaagatatgagtggactgttaatggcaaaataatacaaatggccattaaatatttgaagagataattagcctcattaataatttaatcagattggtgaataatgtgcatcgctgtccaagctgtgagaacactcatgcagtgtacatgaaaatgtaaattggtacagctttctggagggcagactggtgatatggatcaaaatgaaaaacatgcattcccttgatacagcaattctacttccaggaaattaattttaaggaaatagtggggaaagtaaatatgcaactataaagatgtttagtatagcattgtttatctggaaaaacatcatacaacttaaatattcattccctgttattaagtaatgatgcatccatacagtgaaaacactacagccatttaaaaggatgaagtaaatctttatacattaaaagagaaaaaaagttgctgtaactagttaagtgtgtctcactgcacttgtaaggttaataataattatttggaacagctcatctagtagacattgaatgctgctaaagattctgcaggtcagagatctatgtgtaacaggttaaaagcgtagcaacaaagcagtgtacagaatatagagaaaaattaatttaaaacattctagatacgtctttttaaaaaaaaaaaaaaaaaa

SEQ ID NO: 1391 - DNA, 1499 bp, Homo sapiens
  SITE (867): n equals a,t,g, or c
ggcgacaagtgacttaaacactctgtgcccagttttccgcatctgcaaaatggggagataaatagcccctacctcctaggatcatcatgagaatgaggtgtgcgaacttggccggcatgggttccatagcaggcactcaggggtgtcggccacgaagattattctttctcttctctctttgccgtcttatttcatctctctccgttatttggttcccctgtccttagtcccctttctcccccaatggcatcccaagatgcacaatagtggcaagtgcccagcctgtttccacagcctgatccccaccactgcgttggccagtcacccaagaagcagctggaccccatcatctggctctagggatgacccagttccagcacccccgcaaacctccgtctgtccccctacctccctcagcagaggcccagcccaatgcaggcccgtggctggatgggagtagctcttcccaccacccctgggcagggctctgcggagcttgggagcctcacctggaatcggccctcatgcctcagtagagaaggagagcgaggagagaggtgatggggctccgcgggcacccccgatgcacagtctccttctgggcttctgatggccacaaggccagaagacctgcccagaagaattcagtataacccagttcagtgaaattggagagaacgagggcctgcgtcttccgggcagaaggcagggttcctgccctctggagcccttggcctggcgcgggctgattaggacctaaatctgcctgggtggctgggtggccgagtggcgattgggctggttctgtaccgggtgtgctccgtggggggcgtgatctggcaaagccttggaggtgggactgtggangcaccattgattgaactgtgtcccctgcaattcacatgttgaagcccaaacccccattgtggctgcatttggagtagggcagtaattatggttaaatgaggtcgtatgggcgggtgctgatccactaggattaggatccttataagaacctgccaccttctctctgccacgtgaggacatggggaggaggcggctgcctcccacccaggaggagcccttactggacactgggccctggctgcaccttgaccttggacttctagtccccagaactgtgagaagtagatttctgctgattacgctttcctgtctgcggcctgagctaagacagcagcgcttggggagaagcagaatttgaggagctcctcagtggcaggctgccctggccctgctgtcagcagaggggaatggccatccatgctggcccctcaccagccgggccttcagtgagctccccgggtaggtgaagctctcccagctctgtgtcccccgccaaagcaggcccacaagcgagcgcctatggggtggagtgagagtgaggaagaaacattacccgaggggtcactctcttcagaagacctcaatgactgtagactactgaattatttccttaaaaaaaaaaaaaaaaaaaa

SEQ ID NO: 1392 - DNA, 1626 bp, Homo sapiens
ggcacgagctgcagtctccctagcatctgttatttattgactttttaataacagccattctgaccgctgtgaaatggtatctcattatggttttgatttgcatttctctaattgttagtgatgtggaacattttttcatatgtttgttggctccttgtatgtcttcttttgagaagtgtctgttcatgtcttttgcccagttttaaatgggatttgttttttgcttgttcacttgttcacactttttttttttttatagattctggatgttagacctttgtcagatgcataatttgcgaacattttttctattttgtaggttgtctgtttactccactgaaagtttcttttgtagtgcagaagctctttaattaggtctcacttgtcaatttttatttttgttgcagttgcttttaagcacttagtcataaattctttcccagagccgatatctagaatggtgtttcctaggttttcttgtaaaattcttatagtttgaggtcttacacttaaatatttaatccatcttgagttaatttttgtatatggtgaaaggtaggggtcctttcaccatagaataaaacgttgtttcattcttttgcatatggctagccagctatctcagcaccatttactgaatagggaatcctttccccattgcctattttttgttgactttgtcaaagaacaggtggctgtaggtgtacagctttatttctgggttctcaattctgttcccttggtctgtttgtctgcttttgtaccagtaccatgctgtttgggttactgtagctttatagtatagtataaagtcaggtaatgtgatgcctcagctttgttctttttgcttgggattgctttggttatttgggttcttttttggttccatatgaatttcagaatagttttttctagttctgtgaaaaatgacactggtcatttgataggaataacattgaatctatagattgctttgagaagtatagccattttaacaatattgattcttgtaatccatgagcatggaatgtttttccatttgtctgtgtcatctgtgatttctttcagcagtgtttcctagttctctttgtaaagatccttcacctccttggttagatgtatttctaggtactttgtttttttgatggctatcgtaaacaggattgtgttcttcatttggctctctagcttggatgttattggtgtatagaaatgctactgatttttgtacattgattttgtatcctgaaactttaccaaagttgtatgtcagttccaggagccttttggtggagtccttagggtttcccatgtgcagaatctcatgattccttaaaagcatgcatttctacttaaaccatcatgtttacttttctagagagcaattaacttggaggtgggtgccggggaggttaggttgcttttgtaatattaatggatgtacaccaagaatattgcttctgagaatgatcttatcctcattgggaaagatttttctgtttttagttgaaattgagatgaaatacatcttattataaataaattttgactcttactaatgattacaggattgtagacaattaactgtcttcctcatgctgagtacataaaaaaaaaaaaaaaaaa

SEQ ID NO: 1393 - DNA, 2397 bp, Homo sapiens
  SITE (155): n equals a,t,g, or c
  SITE (1195): n equals a,t,g, or c
ctttttttttttttttttaggttgaatcaaagcaagttgtcttcagagactgggatccgagatagaaaacacacagtgaagtttaatcaggaacccaacctccggtcctctgctacaaccacggaaacggctccaaacttgaggggggacccccnaacgcctgcttttggcccaaagctctgccttccagccctcctcatacccactggccacctaggaccaggaaaggggggtagagccctgagaattctgggtctggggtcaccagctcccacacctgtgctccccggccccacacacatgatgcccaggggtgggcaatccctgacagcggtggccggcacttgggagctcctgctcagccacctgccacggcccaccctgggggtccggcaggagccagggcagtgcatggcagcataaggccccgctgcagatcgactgccttcagaaacaaaaagtcccggcgcaaaggcgttcccggagtggcagcctggcctgcaccccagctgtgctgcccctgcagagccccagcagcgagscacacccaggtcaggggagggggcttgggtaccaggggcctcactggctcttcaccaggaccctgtagagtgagaagctgaggactgcggccacggcggccccgacaacccccagcagcccccggagccagaaggaagagggatgcagctctgcgtggaccaaatgtgggaaggcggccatggtggcgagctgggtgaagatggtggtgctgggctcggctgggccagcacaggagaacggcacgggagcgggtagccggtgcttgcggcaaaactcggccggtgatgggccagacaccgcgacacttcgggcaggtcggccttggaggagacaaagaggcagggggtctgcccgtccatgtaatggtgcttgtagacgctggcacaatgtgcaaaggactttgggtcactgccatcaaacatcaagcaggcaacgtcacaggtggcgtccagcgatgtggccagcagaccatctgtgcccacctcacagaggatcaagtacttctcctgcccattgacctgcaccgtgtcgatggcgtagccgggaggctgctccctcgtgtcctggtgccccaggccgcggccgagaaaggcctgcaggaaggcagacttgcccactccacgggcccctaccaccttgcacaggaggamgntccgctgcgtctgtcccttctcctggtccagcctcttctcacgagtgactgtgatggcatgggcctggtcctgctcacagagggtggggtagcccaggtagcctaggtgtccaaggcagctccggacgtccaggtaggtcaccagggtccactggcagaggtatccgtgcaggggcaaccggccggcctctgtgcggactgtgcgtgggagctcggggccccagggcgctgctgggaacacactgaaaaggctttgcagctccacgggcgagagggcgccgtcgcggtcctggtcgtgcttctcaaacactctctgcacaaactggtagccaaggtggttgagctccgtgctgcagccggggggcacgtggatcagaggggagagatagtccgcagtcagctccagggcatcgctgtagccgaagcgccgcaggatggtccaggtggtctcgtgccggccgcgctggatgaagagcgtgttcaggaagaggaaacctgcaccgagacaaagcagggggagcaccaggcacagccccctccccacactccccaggcacaggcgggcacccggcctcaccatccagggtcagcyggtcctcccgcacgccgcccgccacattcctgcacaccaccgtcttcacgtcctccagggcctgcggggccagggggtgccyaaagcaggatttctggaaagcgttgagctcttcgtcactgagcgcctggtccaggtcctgatctgagagcctgaagatgcgcgtcagcgcctgggcgcacgcgggcctcaactgcttggcctcagggtcatagaggggggctgtgggatgcaggacggccttctgggcgtagtagaacagctctgagatgttcctcaggttcttggccgaacactccacgcaggtctcaatctcgggaaactggctcatgatggggagcacggcctccatggagctccccgaccgcaggtctgacttgttgcccactaggatgatgggcaccctgggcccctgcgtggtccccccattcaccagtgggatccacttagttcgaatcttctcaatggtggcctcctcagagacgtcatacaccacacacaccacgtttgccttgtggatctcctcccgcagctcctcgtccgtctgctcggcttctgagtagtccacgatgtgggtgggcaccttctccggggtgacgtccctcgtgcc

SEQ ID NO: 1394 - DNA, 641 bp, Homo sapiens
ggcacgagtttccttgctactttgctttggtgtaagcagagttctttctgtaggttttttcaaatgaaaacattgcaagaatatcaaagagagcagtgtttgcgttagtgattataaactgcagcatggtgctgacattgataactgaaagtcaactaatgagaatttgagacttctgaagtacacttagttgctagtgtctcccttttggtgtcactggaaagtttagaaagcatggttttgtttttgctcaggtttctctttctgtgatgcagagactctcagctgttcctcctctatgtctacattatgtctgaaggaaagaatttaacaaaacttgaaatactgctgtttttctacaatgtttgtaaatatttatcttgctgcttttctaggtttgtcttctggatttaaaatttggggcggctggggtggaattgcatggtttgggaatgggtaattgagctgctgctcattatggtatgtaacagtgatttgtctgtttaatatgtacaagaactggaaggtcaataaaatgaaagtggttgtcttgactgggtaatagtgttacatattttgttaaaagttatacatcttttcaataaaaacactgcatacttcaaaaaaaaaaaaaaaaaaaa

SEQ ID NO: 1395 - DNA, 2163 bp, Homo sapiens
  SITE (2118): n equals a,t,g, or c
  SITE (2136): n equals a,t,g, or c
tttgctgtccggctgcctakggtctgggaagctcgggcaccctccctctccggggctcctgctcccacccctccggcccccccaccgtcgcgctcctccaggctgggcctgtggccgcggtgctttttaattttcccccagctcagaatcttgctgctcggcccccaggagagcaacaactcaacgggaacgatgtggaaggtgtcagctctgctcttcgttttgggaagcgcgtcgctctgggtcctggcagaaggagccagcacaggccagccagaagatgacactgagactacaggtttggaaggcggcgttgccatgccaggtgccgaagatgatgtggtgactccaggaaccagcgaagaccgctataagtctggcttgacaactctggtggcaacaagtgtcaacagtgtaacaggcattcgcatcgaggatctgccaacttcagaaagcacagtccacgcgcaagaacaaagtccaagcgccacagcctcaaacgtggccaccagtcactccacggagaaagtggatggagacacacagacaacagttgagaaagatggtttgtcaacagtgaccctggttggaatcatagttggggtcttactagccatcggyttcattggtggaatcatcgttgtggttatgcgaaaaatgtcgggaaggccctaaagagctgaagggttacgccctgctgccaacgtgcttaaaaaaagaccgtttctgactctgtgccctgtccctgagctcgtgggagaagatgacccgtggaacacttgcctggcccactcagaatccacggtgacctctccgcttgccaaaataaccgaagaaagaccgttcaccagacttggctcctctaaacatttgctgttcaaacatgtttttgaatatacattctataaaagattatttgaaagacaaaattcatagaaaatggagcaaaactgtataaactgatttgtaactaacactggaccattggatcgatattayatgctgtaaccatgtgtctccgtctgaccattcttgttattgttaaaatgcagaggaatctggaaatatttatatccacggagtccttggatccagtgctacgtcagtaaatagcaccagcattttgcaattgctgatctgctgaaatgtacacattctggtctagtttggtctatcttttaaagcctgatctggtgtgaataatcaactaggaaatctaaacttggataacacgtggtgaacaactgcctttagctggtccagattaatcatttcaaagacatccattttagatcacaagcaggaagtcgatagtctcaaaggcactttgtttctcccaagtaggccaccaggcagcctctagagttgctttacccaaatccttctccagccatgacttggtgactctaagcttgctcccacctgccccctccacttccctcagatgatgaggagccagggctaagggggcagccttctctcttcccagtgatgcacatccttcacattggctgctttgttctggaatatggatatctcagcctggatgccgaggaagctgctggatgcttaatggtgctagaggctcaagtgtgtttgaaaccaagagccagttgtcccccatgcagaaagaaatcctgtgtgagcctctggtatgagaaataaaatctgccagttttataacattcactttctgcctctgaggaaagatacagggaacaaaaatcaatttgtacagtcttaatattaaaagcagcttgactaaatacctgatttaaaaatagaagacatccccagtcctcatgacataccgcaaatatctgtggggtcctgttgaaaagaacaaaataaaggagcccaaggggtcattctgtctcagcaccatccagcctggcacttctcttcccatatatccattggattttttttttttttttcctaaacaaagtttttacactgagcagatgctctgtcatgatggcggttgtgcaattctggtatcctctaaatttgtaagcattcataaaaaaaaaaaaaaaaaactcgagggggggcccggwcccaattgccctatagggagtcgtattacaattcactgsccgcgttttacaacgtcgngactgggaaaaccctggngttacccaacttaatcgccttgcagaa

SEQ ID NO: 1396 - DNA, 1312 bp, Homo sapiens
  SITE (1168): n equals a,t,g, or c
ttgcaggaattcggcacagtcacggcatcccactctgttctgccgaggacgtgaatctttcctttgttcagtatatcccatgctgtatacactacctgcctgtcagtcattcagtagcggcctatgttatcagattggctgatcattgtattgcagtgctatgttcaggtaacacttattttacttatagtggtcccaaggtgcaagagtagtgatgctgacatattattataacttctattttattattcttattgttaatcttactatgcctaatttataaattaaacttaatcataggtatatatatataggaaaaacatagtgttatatagggttcaatactagccccagtttcagttgggggtcttggaatgtgccccccacagataagaggggactatattcttatagaagaagagtttgattttttaggacgttatttcctgttcaaaccattgacccactctttgagataagttattctgaagctttcatataagtaaaagcaattaaattttgccaccagcaccatcctcaaccattctgaattataaagtgttaaaattaagaacaggaagaatggaagtattcaataaaaaatgaagtattttcagttccatattgtcatcaaataagggtgggaaaggcaaaggagaaaatcaataagtatggagaagaaagaaatgagtagatagaacaaaaaagatgagaaaggaagccatattgaagtcaggagagagtgcagagcaagaaaggatgggcagaaaaaaagaaaacaagaaaggagtttaatgagtgagtagaatgtgctcttgttgcattctactgccagtctaagccatggaatagttcactattctgggaagtattcttaagatcatcagtgaccttcaggtcatgaaatctaataagcattctttcagacctgttcttatttgacctctcagtggtgtttgacactctcaaccaccaactctttgtgaaacctttttttccctgaaagctgtgaggtcgtgctttctcggttctcttctcatgtctctggtaactcctgctttgtctactttgggttttttgttttgttttgktttttgktttttaagagttgggatcttgctctgctgcctaggctggagtgcagtggcgcaatcatagctcactgcancctcacactyctgggcttaagtgatctacctgccttggcctyctaagtaactgtgttcatttgacacagtttaggaactaaagatcaggtaaaaccagccagttcctgagctggaattgaatctgttcagaatgtctgggaact

SEQ ID NO: 1397 - DNA, 1966 bp, Homo sapiens
ctgttcctggcggagcgggctccgctcgtcttctctgtcttagggctggtgctggccctgcccacgcctagggctccggcgcgtcacgggcctcagctgggattcccgcgcccctcggacggccacgagactcggacatctttccaggaacagcgtgaggaggacagaagcacccaacaggactgctcaagccacctgcgaacactgctgctaccatgcccaagagaaaggcaaaaggagatgctaaaggtgataaagcaaaggtgaaggatgagccacagaggagatcagctcggttgtctgctaaaccagctcctccaaaaccagagcccaggcctaaaaaggcctctgcaaagaagggagagaagcttcccaaagggagaaaggggaaagcagatgctggaaaggatggraacaaccctgcaaaaaaccgagatgcctctacactccagtcccagaaagcggaaggcactggggatgccaagtgaaatgtacatttttgagagctctgtacttatagtgactctactgtttgaaatactatttttttaaatcaagttttataaaagtgtagaattttggcttttttaagttatgttgttagcacacaggacacttccttgttgtcttttgtggaaagggcaagtaccactaatagggtgtatctcagaaactgaattgaaataagggaaaataggattttctgtcctggtttttgaagattgttcttgattcccttgattcccaggagagattctctgacattcacgtgtcagccactttggcacggaagccttacagtgtggggaaccaaaacttcgtgtctcctctttccccgatgccatcagcatagacttgacttccttaaaccgagagttttgatgtggccttggcaaccctaaaatcagctgtgttaggtaacaaaactcaggctttctgttgatgacatcgagatggtgtcacttaaaagagccaagattcctgttttcagtttgtggattcatcctgctggttttactttagtccctccatgtcaaagtgggcctgagaaaagctcatacatgcctcatgtgaagtgtccaccctctctgaaaatctttcttgttcaaaacagcaacgacatatcttgttaacttttacggtgacttttggaggaggggagtttggaaattgtaaaatgttatagattgttgcctatttcctgctgaaagtaaatgtttttaaaaagtatcatataaagctgaatacaaattggtttggggggagatcctttcctacccaaagtcataaatatattctttactgccttgtggaaattttatagttttgcctttcacatttgtctttagtctgtcctgaactgatttttgtgaaaattatgagttagaaattcaacttaacatttttcatattcgaagtggttgtctctgcactatttactgaaaagttcatcctttccccagtgatttgtaacactgcctctttcataaattaaatttttgtgtatgtgtgtgggtcttttgatggtttctattctgactgacatcaatttgtctaatcttgtagcagtacagtacagtcctgattattgcaactttaggaaaaggtctgataaaaaccaagatgcctccacattttgtcataattgtaaccaatttcacctctgtctccagtatcaccacaaaattgttcttccttggagtgtcttggctattcttagccaactgttcctccatattacttctagaattagaccaacaatttataaatcaaacaaacccaagagcattgaaattttgattggatttgtattgaatttatagattaatctggtaaaccatgtcatctttacaatgttgtcttccaatacatgaatatggtacagctcttcatttacttaggcctttgaaatatctttcaataaagtttataattttctccaaaaaaaaaaaaaaaaaaaaaattc

SEQ ID NO: 1398 - DNA, 1726 bp, Homo sapiens
ggcacgagttgaggaggagggagcgcttgaaggggactggcctggcgtgcactccgcacctcggggacattattgcgcgtggaacggctgcttttggaaggcacaacttcctgaatggaccatgactcccaccaaagatccctgtctctgattcaccaaacagcttcaaccctgaaaccaggacgagaagttgacaacatctgagtggacagctaattgacctaagacttcagaccaggcctgtatgatctcctgtctaaacattcttagagtattatatttactttggggactattggccttgtctgctttgactcagattataggatatataacctggttaatgtttctgtacacatgatggccacctatgtatatacacttgacttttcagggtctctgctggggatggaaaaatagttcattagccaaactctcctaaagtgtggcaatggaggcagtctctcagattgctggatttgtcaccatcttccaagggccattcaagatcattacatgctacttgttgcaccagagattgatttttctgacactccaaatgttaccatatacttacatcagttccctccaaatgtcactttccaaattcaaattcagcttctaaagccaggccatattttcattctgtgcttagtaataagccctaagtctcacccttccccaccgcccccaggtctatctatcagtaagccaattagggacaaattctctaacttatctagaacacaaacttaattcctcatcttttccaggtccctgcacattcctggcctcccaccgttactgtcataactggcaactgaatgtccaaaggagaaaaagcaaagcagattgtgccagcacgtctcatttgttatatatcatgcttatgcaggcctttgtaaggcctgcagtaaaaccaatccatggctcactcatgttttaaacaacttacctattcaaactattatgaatgaatagttaagagatacattttggtatgtggcattgggccacacccaccaactcaaggatgggcacatagtgtaaatagctggcaaaatagctggcaaattgaagggcgctttttttttttttttttttgagggagagtcttgctctttcgcctaggttgtagtgggtggtgtgacatggctcactacagccttgacctcctgggctcagggatcctcctaccttagccttccgagtactgggccaaggagtctgtgcagtagcatcaagagcctgtgccttacatcaacacctcgggtgaagtagagacttgcacagaaagaatttccaagcaagctaaatggttacagaggcacaaactactgatcttctcaatgactatttattggcttcctatttcttccagtctgcagttcaacccctttttcatgggtaaagtgccgacgtcataacaaggtttgagggaggcactttcaccgtgtgaatgcccagtcatcacacttacaaatgacaaaaggattcaaaccttgatatagtctctatcctactttcttactatcacttaaattactcatggtatttataaccacttacgtaagtctattgctaaaaccaaattataggtcaggtgcagtggctcacattcaatcctagcacttgggaggccaaggtgggaagactgcttgaggctaggagtttgagaccagcgtgggcaatgcagtgaaaccctatcttgataaaaaaaaaaaaa

SEQ ID NO: 1399 - DNA, 2006 bp, Homo sapiens
ggcacagctgaggaactgaaaagaaatgctgagacaggaaatctgcctcattcgtaccggctcatcagtgttgtcagtcacattggtagcacttcttcttcaggtcattacattagtgatgtatatgacattaagaagcaagcgtggtttacttacaatgacctggaggtatcaaaaatccaagaggctgccgtgcaagtgatcgagatcggagtggctacatcttcttttatatgcacaaggagatctttgatgagctgctggaaacagaaaagaactctcagtcacttagcacggaagtggggaagactacccgtcagscctcgtgaggaacaaactcctgggttggcagcatgcactgcatatttgttactgctgcccacctcacctttcctctgctgaaggagaatttggaattctacttgatgcgggagcaacaaacagctcagggccaaaccaaaagacaaaaattggagtaacgtagaatgctccatgctattttatggaaactttggtctcacatccgtagctgattatcctctttttctcctatgagtggcacttcttttgtcttaggaatacatgttgtaaatatatatctgtgtatgtgtgtatacacacacacagacacacacacacacacacgggatgaatggagccttaaagagttaggatgagccaccagaatatgcctgctcaaaattaatagcacagcagtttggagaagaaatgaaggtgtcaaagagtccattcacctgagaaatgtgtgaagacatacttatcagttggcttttagcttttatgttccttgagtagtttcactcaagtctgtaaccttttgtgtttccttattagtaaaattcactggaaagccagctcttcatgttacactaatgacagtttgttctctttgcaagagaggggcattactgtcacctgacttgaggagctgttttgttgttgttgttgtctgcaaatttcatgaatttgtgatgtctttgctgtttacatgcagtcccaagaaatggattgttggtgctttggaatatgttacagtcccacatttgatatttcttatatactttgttttctctaaggagatttcttcacacagtatgttcatcatatatcatcatcattattatggtggtaaagatagaatcttttttcttttttgtcattctgscatggagcagcattaccctaatggattgcaaccaaaactttaaacaagtagaaagataatatttctccaattgggactccccagcaggaatacttagggataaggaagaatgctagcatctctgtctctcaracatagggaggataagaagagtgktcttctggkaaagctaaaattctggaccactgaagctaaaagccctattgcaagtatgaaattaagtacttgagctataggacaaaccttgggcatttaaccatttactgtctggctttgcccttaaaatagggttgcaattaaaatgtgattggcttaggtaatcccaaaaactaacaaataacaaaggtgcataatttatttatctactttttaggtgctctgagttgaggcaaagtagagcggcaacattaagtgctatgctagtcacttagctgacgtaaccagcttggttaagcagcttatgaaaccatataaagaattcttttgaggatggaattctgtccacaaaataattttgtgagcccagatatcattaggatcacacagagttaaatatagaaaaatgaaaccatcattatattctttcgtgttttttcttttattataaacaaggggattattctttagttctcagaggtagggacaaaaccacatcaggttttcagaaggaaaaaacatttaaaaacccaccatcacatgagagaatcacttgaacccaggaggcagaggttgcagtgagctgagatcgcatcattgcactgcagtctgagtgacagagtgagactccatctcattaaaaaaaaaaaaaaaaaaactcgag

SEQ ID NO: 1400 - DNA, 1175 bp, Homo sapiens
ggcacaggtcttcacaacagcagaggcccaggcccgggtacagctccgtagtctcctgggacatggtccgaacccacggatggctgggggtggtctgaaaaggtcctggccctggggaggtggcttcctcgctgctgactgccgagggggccctggcctggatccatgctgggcagaagcagctggacactgaccaggaccccccagggccggagaaccaagcttgacagccccccagacaatacacagagcctggacccagacgagacctccccacccccccatctttgtccccaccaggacaaagagctcttgccagtcttcccactgggccatggtgccagctgtccccctagttctcctgccagggaccccaaggctgggaccaccccgccagcctgatgccccagcacccactctgcggcaacttttctgccacggcagccccctctagtggacattggagccctgccgcggaggcgggggctggaggcttgtggagcccttcccagggtctcctagaccccggtggagcagaagggcgggggccggcccaggtcactgcccttctgcacccacagaagctgcagctggtgctggccccactgcacagcctggcctcgcaggcactggagcatgggctcccggaccccggcagcctcctggtgcactccttccagcagctcggccgcatcgactccctgagcgagcagatttccttcctggaggagcagctggggtcctgctcctgcaaaagactcgtgactgcccagcgccccaggctggactgagcccctcacgccgccctgcagcccccatgcccctgcccaacatgctgggggtccagaagccacctcggggtgactgagcggaaggccaggcagggccttcctcctcttcctcctccccttcctcgggaggctccccagaccctggcatgggatgggctgggatcttctctgtgaatccacccctggctacccccaccctggctaccccaacggcatcccaaggccaggtgggccctcagctgagggaaggtacgagctccctgctggagcctgggacccatggcacaggccaggcagcccggaggctgggtggggcctcagtgggggctgctgcctgacccccagcacaataaaaatgaaacgtgaaaaaaaaaaaaaaaaaaa

SEQ ID NO: 1401 - DNA, 1402 bp, Homo sapiens
ggcacgagacgctctggacgagcgaccagcaggacgacgatggcggcgaaggcaacaattaaggccccaggggaactggcagcgcacgcggatgctactactgcagtctttatttttttcccatgagttgggggtcgggtgggggagggaaagggagggatgaccttcccagggagaaacccacgacctgtcctgtctttgatcgcctctttgacatttttgccaaaataccactagtggaaagtcaggctagctgtgctggtattggaatagcagcctcacactggcgtctggactgttctgtagattcatgcaagtggagctgtctgtctctaatttaacttattgctagataatagggttttcagatgaaaagaaaacttaaagaggaatggccctcattcagtaagttctgtggttccagtaaggatttttatgtacatacgctctcgtctctcgttttgggtactttctatctcatctgtctcggctctgcatgttttccagggtgtagcctacagacatggaacagtgtaaatcccagactgacagacttagaacctgaggtctcattcatccttatggtttaggccttgccagttttccgaagtctctgattagttgacagtattaacactaaattgcagtttacagtatttctacattacagccatatgtaacatcaagccatcgattgtgtacttttcctttgctagttgtttgggctttaacatccttattcagccttatccaggttggttttgctgttgatcggtctcctaggctaaatgagaatgaaagcgacttcaggtttttgggttcataaggtgctcggcaaggtggctgtgggaattttttttttttggtccttctttcctcttaacgtaaatccaccaccaaaattattaatcctcttgaaaagaaaacgtgaaacgccacaaaaatagagaaaattcaggtctgtatgtcatggatcgtgttggtattttcagagaacatcccgcttctgaagctgctgcagctccctcctcagggatcacactgccgtcacccactctgcactggggcgtttcctactgcgcctcgtgctggcggacgcagctgggtgcagaagctgtggggtcggagaggcgtttggagaaggtctgtggtgcagtgtgtgaaaattcaggtgctagaagcctactggtagaaaaacccaaaaggaagagctatatccttaaccattctgtccaatttcgggagccttgtcagtgtgtcagtttttcctccccgaagacactccttccccaagtaattgtaggaagataaaaaaactgttaccagataacaaacactgaactcctatttgaccagaactttttcctctcaaaaaaaaaaaaaaacaaaaaaaaaaaaaaaa

SEQ ID NO: 1402 - DNA, 1221 bp, Homo sapiens
  SITE (1220): n equals a,t,g, or c
ggatggcgtcccgcaaggaaggtaccggctctactgccacctcttccagctccaccgccggcgcacagggaaaggcaaaggcaaaggcggctcgggagattcagccgtgaagcaagtgcagatagatggccttttccacagcccctggaacgtgcttaggatgcataccagggtacaagcttaggaagtgtgggcacccaccccagcccatggacctgtgtgctccctgcgttgagcctgagatgccatgcttctctctactctctctaccactgtgggatcccttggtgattttggttttctgttagtaaacttctgtgtttgggatctcgttgtctagacaaataaccaccctcatccctgccatctgcccagtgcttcacaccctcgctacacacagtgtggtcctcctgtcaggtgtcagcatcactggagaatattagaaatgcagagtcttaggccctatcccagatctaatagcttcaaatgaatcttcatttttataagatcccgagagaccctgtgcccactgaagtttgagaaatgctcccaacttattactgccactccacagctgtcacctcctcagctccacccaacttccggagttattgtcatcaccatttcacaagtgaggaaatgtccattgagattaagaggcagagagtaagagggactcagatcgagatctgctgccttccacccagggtccctgaaataccttggcctgactttccctgtgggtaccaggcaaaaggacacttcgaagagcttcactgagcaatcgacctgcccaggcctcctgagacrtgcaatttamcawwactgtgggtcacctcatccacacctctaacaaagtcacaaggggaactggagaaattcaagatgccagcaaagaaataactgccgggctgaaagacttcataattgccagatggctgaagtgttcagagagtcggagctatggagaagggctaattgatcttgacatgggctaagaaacaacatyacacctgcggcaatgactgcaagcttttctagtcccaagagggaaaggsaaaattctgctcccaacaatgagagagaaatggtctccacccccagtcagtggcaacacagagaggaggtacaagcacaggctgatctgcttgtgaattgtcaccacacttaactagtcagctagcctggggaaagttctgatttattctgagacgtagttnt

SEQ ID NO: 1403 - DNA, 942 bp, Homo sapiens
ggcacgaggggcttcagacttgagctctgcctccccagatcgaccgcttcatccccatcaccaagctcaagtattactttgctgtggacaccatgtatgtgggcagaaagctgggcctgctgttcttcccctacctacaccaggactgggaagtgcagtaccaacaggacaccccggtggccccccgctttgacgtcaatgccccggacctctacattccagcaatggctttcatcacctacgttttggtggctggtcttgcgctggggacccaggataggttctccccagacctcctggggctgcaagcgagctcagccctggcctggctgaccctggaggtgctggccatcctgctcagcctctatctggtcactgtcaacaccgacctcaccaccatcgacctggtggccttcttgggctacaaatatgtcgggatgattggcggggtcctcatgggcctgctcttcgggaagattggctactacctggtgctgggctggtgctgcgtagccatctttgtgttcatgatccggacgctgcggctgaagatcttggcagacgcagcagctgagggggtcccggtgcgtggggcccggaaccagctgcgcatgtacctgaccatggcggtggcggcggcgcagcctatgctcatgtactggctcaccttccacctggtgcggtgagcgcgcccgctgaacctcccgctgctgctgctgctgctgggggccactgtggccgccgaactcatctcctgcctgcaggccccaaggtccaccctgtctggccacaggcaccgcctccatcccatgtcccgcccagccccgcccccaacccaaggtgctgagagatctccagctgcacaggccaccgccccagggcgtggctgttgttacagaaacaataaaccctgatgggcatggaaaaaaaaaaaaaaaaaaa

SEQ ID NO: 1404 - DNA, 2103 bp, Homo sapiens
  SITE (456): n equals a,t,g, or c
  SITE (457): n equals a,t,g, or c
gttggtgctgccatccactaaggagaccttcaggttcaagctaactccaaatcctacgaagcccttctcttctgctctgtggctggcagcccagctcttgtaacaaaggcatggaaattgacagcagctatagccacaatctgaggaatggcagacaagaaacagcagagtaggcctcaaggagtcactgaagaacccagggctcctctttttagctcagagccatttagctgaaattgatgagtggatggtctttaagtcattctcccttgattggtcagtggcctgtcacagataactggcttgggagctgcctccatgctcctgagggtcttcttggtggttgtcacacagtgtggctgctgagtggggacaggctccttgtgaatggtgtgctctgtctaacctctctcattcccgccctcccgactcaccgacgtgcatgctgcccacatnncccctgcccaagacaccccctgcacccccatctgctcccctcgtgggcagcaggtgcctatgccttgtctacctttctgctcctcatccctacagtgagggagactctgatgtggactcggagctggaggaccgtgttgacggggtcaagtcctggttgtcaaaaaacaagggaccttccaaggcagcttctgatgatggcagcttaaagagttccagccccaccagctactggaagtcccttgcccctgatcggtcagatgatgagcacgaccctctcgacaacacctccagaccgcgatactcccacagttatctgagtgacagcgacacagaggccaagctgacggagactaacgcatagcccaggggagtggttggcagccctctcaccccagggcctgtggctgcctgggcacctctcccaggaagtggtggggcaccggtctcccccacccgactgctgatctgcatgggaaacaccctgaccttcttctgtcaggggcactttccaggctatgggtgtctgatgtctccacgtggaagaggtgggggaaagaggagtttctgaagagaactttttgctcctctgtctcaaaatgccagactcttggcttctaccctgtgtcaccgtgggcagtggcaggtggcctggcactgcatggagccagcacgttgacctccctctcagctccctgctcagggacggtggacaggttgcctactgggacactctaggttgctgggtccatggggaggattgggggaggagaagcagtgccttccctctcgtgtggggtgggggctctctcttcttggtgcctgctgtctttctactttttaatttaaatacccaacctctccatcacagctgcatccctgagagtgggagggggctgtagtggtagctggggctcccaagaacgactcgggaatgtcatctccatcttcacccttcagagagcagtcctttctctgtgcagctggagacgctggtgaggagagccgggtccaggttcttaagaatgaggtgcggaggggctctccggtgctgctgggctgggttgagcaagcctacgcagacaagtgtgtgtgtggaccatccgcacctccagcccccaccccaccctctttgtctcagcgtgttatgtgcaatgacctatttaaggtaaacccattccaactacagcagttcagggctgatccaagcactgcctccctcctgctctgtccaggtggtctggaccataaactcaacttgagagggaaggcttggggttgaggacttgtgatcagaaaaactgaagatggaagttttggccggtgctcattagacatgagtcctcactctgtgtcctgagcccgtgtcattcttccaacctccctgcccccacacacttatcccagacacaacaccatgtggtctggaggtcccagcccccaccctaaaaaggttatccctgagaactccaccagacttgggagcccaagtgcagtgcctggtgctgctcccatctgccgccccccttctctcctgcaattggtttgtactcactgggctgtgctctcccctgtttacccgatgtatggaaataaaggcccttttcctcctgaaaaaaaaaaaaaaaaaaaaaaaaaaaactcgag

SEQ ID NO: 1405 - DNA, 1255 bp, Homo sapiens
aactagtggtatcccccgggctgcaggaattccgatacattggtctttaaacccaaaccccctttaaggcatgttggtctcaaggggatttgggattgaagcrcagctttctgttgaggaaacctaggtgtcactttttagaacattaaaaagaaagttgtagggtgggcttttccatttaaaggaatgtgatgatcctaggttctgatgagtgataggtggtctccgtttataccctttcttcttttggcacctgtaagttccggtagtggccatcttacattctcatgtcctgctggaagtgcctagttgcctgcaaagccagctaaggcttattatttcaaaagaagattatttaaaacatgagtgacaggtagtcagaagagaacaaaaggacgcaagatactctatagccaagtcagcttggaggcaggatgggttgctgagtgaagtcgccgctcacttttggattcttatggactgtgagttagtcttccctctacacggagtcacaggaagggtataaatgcatgttcctgaggtgccctcccccaaagaatgtacctgcactcaaaccaggatctgtttttgctgttttaatcataaatagactagttagtagaagacttttgaagaacaaagtaaaacttttttttttcattaaaagatgtcccagaggaaaggccctgtgcagccagtatattctaatgactgcctggrccatgtcctaatawgggtggttttaagttgttgggccaaaaatcctttaaagacatacgaaacatctgccaactttttagcaaccccacagagcccgcgamamgctcgctttcttccccgccctgcccctttagtccccgctctggaagscccaggcagtttaggtgtaaatasgtatcttttatggtttccaaatgaattatttgtgtgagagtaattaaatctgtaagaaaacctgttgagattcttcacwatgaattatgacttctacaacatgtattttagcaaaaacacgatgctggcctccactggatagctcagtatgctgattgccagtgatagttctgtacgcgttaccaacagcgtctttattaaccctctcccacatccagtggaaatcattgctaggcggtatttgttggttggctgttagctttgctttatgatttcatgtttcttttaaaggttgttttgcatgttgaatattaaattttttttttctgtgtmaaaaaaaaaaaaaaaaaaattctcggcg

SEQ ID NO: 1406 - DNA, 1642 bp, Homo sapiens
  SITE (1369): n equals a,t,g, or c
tcgacccacgcgtccggtggaggggaccctgtggttagcagcagctatcgcagcgtcggatgttcagagcagcagaagccggcgtcgtcggatgttgtgttgcccgccaccatgagctacacaggctttgtccagggatctgaaaccactttgcagtcgacatactcggataccagcgctcagcccacctgtgattatggatatggaacttggaactctgggacaaatagaggctacgagggctatggctatggctatggctatggccaggataacaccaccaactatgggtatggtatggccacttcacactcttgggaaatgcctagctctgacacaaatgcaaacactagtgcctcgggtagcgccagtgccgattccgttttatccagaattaaccagcgcttagatatggtgccgcatttggagacagacatgatgcaaggaggcgtgtacggctcaggtggagaaaggtatgactcttatgagtcctgcgactcgagggccgtcctgagtgagcgcgacctgtaccggtcaggctatgactacagcgagcttgaccctgagatggaaatggcctatgagggccaatacgatgcctaccgcgaccagttccgcatgcgtggcaacgacaccttcggtcccagggcacagggctgggcccgggatgcccggagcggccggccaatggcctcaggctatgggcgcatgtgggaagaccccatgggggcccggggccagtgcatgtctggtgcctctcggctgccctccctcttctcccagaacatcatccccgagtacggcatgttccagggcatgcgaggtgggggcgccttcccgggcggctcccgctttggtttcgggtttggcaatggcatgaagcagatgaggcggacctggaagacctggaccacagccgacttccgagtgagtggaggcagccttcccctctgggaagcttagttcccactggggcggagctaagggccgggtgccatgcaccctgacacggcttcccccccttatgacccagaccaagaagaagaagagaaagcagggcggcagtcctgatgagccagatagcaaagccacccgcacggactgctcggacaacagcgactcagacaatgatgagggcaccgagggggaagccacagagggccttgaaggcaccgaggctgtggagaagggctccagagtggtaagtggctctggctgggcattttctgtctgcaggcagggcgagctggcctaaagagtggtgctctccctgggggccagaggcaatgctgtgtcagctctgcgtgcatggtgaccagcatggggaggcagtgtggtctggcasaaagcacaggctgcctagctggangcacagtttccttgttggaaaatgggatgagcccctgtgcaccaggtagtgggaggatgtgaggtttmtggcacatagccgggccttgtcatttaaagccattgtaaataactgggctactctgggccaccctgcctataggatagccctgctctgtctatggagcaagcagctgttttactatataccgttgctctaataaacttggtttcttttaaaaaaaaaaaaaaaaaaaaaaaaactcgagggggggcccggtacccaattcgcccg

SEQ ID NO: 1407 - DNA, 1621 bp, Homo sapiens
ggcacgaggctagatagtgctatgaaactaattttggcaaaagactttgatgaagatagaaaatagtaaaattgatggaattcaccaatttggtgatattgacaatgtttcttaagctaggactttcttttcctttttggtttgtagcctatgatgttggtttacttggaataaaatctagtaagaattcatagaatattgaagctaaaattttacttagacatccctgtcctagctctttattttctgataaagaaattgagacatagaacatggcacacaactcaacatctaggtttagcaaatgtttactggaaacctgtaaggagcctggtactgtatttgcagaggcatttgggacacagagctgtagttcccgacctggagaaacttagccatactttctgactttcatttcattgttctttccatcataccgtgctgcctcccttctcctcttccctctaactttaaataataagctgatttaacttcaaagagaacatttcaattttaattcctagtatttaggatctctcgttataacttaaaaaaattcgacactaatcttagaaataactgctgtttaccactaaggaaagatagttattctccatgttataaatggcttcaatatactttagggttctgggtttcccccagcattggcatctgaaaaagaaagatgtcttagagcagcaggagaagtatgggatacatgagctgttcattcttgcctgacatgaactggcctgtagaggatgagctgggcatttgggatcaaagtttagagaaaatctgaccagaaaagaaatttcactttcttgggattcacaggatcatagagtcttaccaacgagagaggcactcaaagaatgtgaaggttcagttgattattttttaacttgggcttggctgtagaacataactcttcttcgtatgactttttcatttcctggaattctcctaacaacaaaacaagaggcttagtatccaaaaggaatggagtaaacactgcaggcaagcaggagcacattagaaatttttacctattctttattagatagggatttagtagtcatcttaaatggcacgatagtttgaatgcccacacttctgcatgtggtctttctcttggttcattttttaggtatcccagtggttcttaaatataatatgtaaagggattactgtagtgcaaggttgtatatacatatctgtatgtgaattttagaagagtttaaaaggattttcttaatgttaattctgtagcatttggctacaggtgatgttacaacccatccccaatgtaagacgttagtactgtaatgacgcacttgtcccactgtaactaagtagctggatatgttacaatggaaaagggagaatgaatgattgaaaatagatttttattcaagaggaaaagaatcattatttcctagtttctaaatatccttcaaaatgagaagaggctaaagacatattaactaagtatatcagcagttgtctaccaatattatttattctcaaaggacatagtggttctttttcctaagagaagatagtacaaactatttaaatgtagacgatttcctggagctttgaaaaaaaaaaaaaaaaa

SEQ ID NO: 1408 - DNA, 1978 bp, Homo sapiens
ggcacgagtttgcacatgtgtcccagaacttaaagtataatttaaaaaataaaaataaataaaataattagaacaaagtccagcagtatagagaattaggtaataatcaataggaacagacaaatctaatgttgaaatagaataatagatccagaaattaattctaaagtcttatttatggttctttaatgtgtccttgatattagcttgcaattagctccatcaagtgatagtatccaacgtaaaatgggcttagcaatttcttgcttctcatgctgcttttatatctctcttctttcacattcttggagtccccaacaacagggcagaggctgaagggcacagatcttttgtgtcgtatggcttggcctccattgaagtaggtgagggtgaccatccctggtacggaaagacaggtccgggcaggccacagtctggctctcctgcctggcttcctgggaataattgagcaattgctctgtaccaggcggggttctgaatgcttccacgtcccaatttcaatcacttctgcaaggtgacgcagctaggaaagatgtgactcaggccactctggcatccaggactcacctcctcttctgacctctcgtcagcctgctgtattagctgggccgcccttcccatgttgacctcctcccatatctgagcgttggcctcacaggcagcgtcatgaagctgccaccatccctgtccccctttggttcaggccacagggatgcctggagctgggaacggccctgcgtagcactgactgcagagtcttcagtgcgtgtgtctctgtctcctttactgaactgtgagcgcctaaggaggggccttccatctgctagtttatccctggaatgtatctcaatgcttggcagaggataagcgttacatgttggatacattaattgatcctaagattctaagcactaaattttacgagaagtagcaaaaatgacctgaatgtagtcgcactgtatcttttcaatgatccaaacagctgactccctgggcttacgccttcataacgctggaaccccctcccgcccgctttgttcctctccctcttgcagcagatgggatcagagcggatggagatgcggaagcggcagatgcccgccgcccaggacacaccaggcgccgccccaggccagcccggagcggggagtcgcgggtccaacgcatgctgcttctgctggtgctgctgttgtagctgctcgtgtctcactgttagaaaccaggaagatcagaggcccacaatagcttcccacgaactcagagcagatcttccaacctgggaagaaagccctgctcctactctggaagaagtcaacgcctgggctcagtcatttgacaaattaatggtcactccagcaggaaggaatgcattccgtgaattcctccgaacagaattcagtgaggaaaatatgctcttctggatggcctgtgaggaactgaaaaaggaagctaataaaaacattattgaagagaaagcaaggataatctatgaagactacatttctatactttctcctaaggaggtgagcttagactcccgggtgagagaagtgatcaacagaaacatggtggagccatcccaacacatattcgatgatgctcaacttcagatttacaccctgatgcacagagactcatatcctcgattcatgaactctgctgtctataaggacttgcttcagtccttatcggagaaatctattgaagcataggatttttcaaatatatttattattaataaaataataaaagaattcatgggctacaactagcacagggaatttagaggttgtagcatcttctgctggagtaatactcaggctattctaataacagatgattccttcaacagactgctatatattcaccatgtaaactgcagccacctttagtgatacttttgaaaaaaaaaaataaagggatatggctgttgtagaaaaaaaaaaaaaaaaaaaaa

SEQ ID NO: 1409 - DNA, 932 bp, Homo sapiens
  SITE (929): n equals a,t,g, or c
  SITE (932): n equals a,t,g, or c
ttccactcctgctttttgttaccagctgtgatgtttggcaagttaataaacctctcaaaacctcacctgtaaaatatggataacagtacaataaggtttcakcaaatagtagatgttgtcaataatgctttgttttctttggaacatgataatcttactagtggcttcttcggcctattctggttgtgaccttgcccttcctggaacttcggcgttatgactgtwcttaactgctgaagratggctgratgtctggaaatggraaaatctgtsctgtggatgaaatcttattaatagatgtggragmcactaattagamcaccacaacttaaaagagtgtggatgaatgcttaatgtctctttaagtcatggagatggtgttctgggaaagaggtgagtgtagtgggggtatgatggcatctgactccttgttacccacttcctgcagctagatacactgtcagatcctttggcatccggagaaatgaaaagattgctgtccactgcacagttcgaggggccaaggcagaagaaatcttggagaagggtctaaaggtgagcctaatcccctaatggagtgatattgatcagcactcctttagtaacacatgtagataagttacatttaatgttctgttctttggtgtcttgatatttatttacttaagcttctaaaaggctttttctacaatcagcagggttaaactgttcttggtggtttaaaagatgcttgaggctgggcacggtggctcaacgcctgtaatcccaacactttgggaggccaaggcggttggatcatttgtggccaggagttcgagaccatcctggccaacatggtgaaacaccatctctactaaaaaaagataaaaattagccgggcttggtggcgggstcgrgtagtccaagcaagagagttccagttacggtgngcn

SEQ ID NO: 1410 - DNA, 3052 bp, Homo sapiens
  SITE (2994): n equals a,t,g, or c
agcgctcccgcccaccctccggtctcggcggctctccagagcgtctgtaaacacccagagactgtcatggagggggaggaggaggcggcggcggcgaagggaggcgtttggggccgcctccagggtccgctctgccattcctgaactggtccctcgtccccgtgactctggcatcagggaagcgaactgttaggcgagaggaggaggcagccagaaccatatccccttcttcctcggggcgggggccgggccaggccggctgagccgggggagggctccgggagggagtgcctggccaggccggcctgtctgccgcgatggatgacagtaaggtggttggaggcaaagtaaagaagcccggtaaacgtggtcggaagccagccaaaattgacttgaaagcaaaacttgagaggagccggcagagtgcaagagaatgccgagcccgaaaaaagctgagatatcagtatttggaagagttggtatccagtcgagaaagagctatatgtgccctcagagaggaactggaaatgtacaagcagtggtgcatggcaatggaccaaggaaaaatcccttctgaaataaaggccctactcactggagaagagcagaacaaatctcagcagaactcaagcaggcataccaaggctgggaagacagatgctaatagcaattcctggtgaagattatataaagatgagtcagtgattgaagccaatattctgattcccatggaagatggatgggcaagagtgtacttcttggctccatttactacctactgctcagtagtcatctctgtaaatctgcaatttctaccaaaatgtgtgatcgtagatctcaaaggatcttgctttaactttcaacacttagaaaatctacaaacattcagacctgtctgggttggtattgccacccatgacatttaacatgttgtgatgcttgaaaacacaggagtagagaaaatcgatgaagattgtatttttgcaccttaactccacattgctttattggttaatttatattctttccatgtaattcatgtaattgtatgtctgtgtgtgttttatgtgtcaccacctttcatgtttttgattgccctacaaagagaaaccaaatgagctgattactgactataagttctcagcctttatggacctaatcttatttttatttacttgagtaatgtttattctctgcatgaaccatgatttctcctgtgagccattccagcataagctgtgaatatgtattaacaaatatatacatttctatttttataatccataaggatatgcctgttttaaataacatacatattaacaatatctatcaggaaaaccctcaagacagcttctagttaaaacctttgttgctgtcctctcaaactatatttataaaaatttgctagggccaaatccatacttgcagaataattcatcaaattttatttttaagtgaaaagtaacctttcaggcatttcagcagcatacattgacaatctagggtatatatgtatgtatgtttcttattgtatgtctatatatgtatgtggggaggacaggagtgaatgttcacacacttttcttgcgtactcaactaaattggagaatgtttctgaagaaaattggatgaaattagctgctgagattgagtttctgccttaaaatctgaaacaaaaaaagggacaaattgctggtagatctactgactgtagccatcaccagaacacttagtttcttcccagacatgaatttcctgacaggctctgagccagaaacacactgtgggcgtgcatctggttcagccctggatatgcctccactgtggagggaagcattggaactggagttgtgcacagcaccgcagctagtgggcctggctgggggtgcagaagggcagggtagttctttccatttccccttgcagctacacttactttctccctgactaccaaatggagtgacggttgaagaatcaagctcataatatgatacacccagacagacccagaaatcttttgatttccccagcgagatacttaccactctctcttctctttcccatggttaaaacaggagttgtgttctctgtcgctgctaaattattcttcacttgagtgaagcaaatatttagcttccaaataaagtatattttgttctgaactggcagtttaagaggagataccgtagtctagattgtctttgaggtagaatatatgatggaccacatagtttaagattacaaggtactttccctcttctctcaggccatgcatttgaataaagtgcctcccttagcctgagctcctaaagacctcttgtacttggttgcaaactcagatctctagtctagtctagtctagtctagtcatgtgtgactgtgtactgagataccactagcccagtttgctgggtctctatgttttggaagttgggggtttaataatatttaatgtctttttaggatcataaacataaataggtttgttgatattcaggccttcagaatttaagggttttaaatatagcattcagattgtaattggtatgtttttgccatctggtccactcaattgtatatttttattttgcaaaacaacccaaaacttactttatgttgctttgttcagtaccttttgaattcccccagaagagttgttttcaaaacaaacattccagaatgaatgtcgctcttcaatggaacgtctttattgtgcttgaagtatttcttctctggttgtaattctaaattacagagtcatttgagctttctcccctcccgctagtatctttacaggagcagggaagagcagtagaggatgtataattttgggcgaagttaaattacaatttatttgaggttattcctaaacctatttatttggtgttttggaggagatcacacactaagagaacgttgattgcctcggctattgtgctggctggacactttggtcacttttgaagcatgttaataaatgtcactgattaaaanaaaaaaaaaaaaaactcgagggggggcccgagtacccaattggccctagaagaggcga

SEQ ID NO: 1411 - DNA, 1280 bp, Homo sapiens
ggcacgagccacaatattgtttttcatttactatcttgatcatagagtttggctggggaggggggcagttttagaggcttccacttggtgttcctcagaatgatatctcttactccgggggccaaggtaggggttagcttttgttctctttgtagtttagattgtatctcttgccttgttcaagttcacaaatctttttgtgtatacacatatgtacatgaaaatgatgttcatgctttttattattttacccttcattatttcattttttatagttctcatagctatgtctttcagttcactaatcttttttccacagtgtttaatctgtcattaatcccatccaaagtatgttttctctcagaaattgtaatttttaacctctaataatttgacatgggtttttccctgttatatctttcatatctttatttatcatggttttacttttaacctatttatgctttcatatttaaagtgggtgtttagtgggcaacatacagttgggccttccttttttatccagttaacaatctctgtctttttactggggtatttagatcatttacgttcaatgtattgatgtttttaggtttaaattactaacttactatttgttgtttattctatgtcttctttgttctccttttcttctttttctgctttcccttagagtagctgagtgtgtttatattacatattgtctcctttgttggcttattaactgtaaatccttgtcatttgattccttgagattttatagcatacatcattgtgagggattgcatatttatgtcctctccaaatttacatgttgaagtcctaatccctaagggatggcattaggaagtgtgacctttggaaggtaattacatcttgaaagtggaaccctcatgatgagattatgtgtcttatgagacaacacagaagagagtttgttttctctttctctgctctttgccatgtgaagacagaatgagatgaccatgcataaaccaggaaatggactctcactggacactagacctgccaacaccttgattgtgttttagagtccagttctagagactcctcagcctctggaacgtgagaaatgaatgtttgttaaggcagtcagtcagtctatggtgtattttttctagtagcctgaactgactgaaagaaaatcatgaacttatcattctaacttcaaggacattatatcacttactgtataataaaataatcttacagtaaaaaaaaaaaaaaaaaaaaaaaaaaaaaaaaaaaaaaaaaaaaaa

SEQ ID NO: 1412 - DNA, 3620 bp, Homo sapiens
catatgctgcctgccctgcaatctgcgtacaaatacgcatctgttgtataatccaaggcgaggtgatattaagctgacgcaattggcaatgctactggcagagatttccagtgttgcccaccagaaagatggcagcttctgccctattgttatgtgtggtgactttaattctgttcctggttctccactatatagtttcataaaggaaggaaaattgaattatgaaggacttcccataggaaaggtatctggccaggaacagtcttcacggggacaaagaattttatctattccaatttggcccccaaacctaggtatctcacagaactgtgtgtatgaggtacagcaggtaccaaaagtagaaaagacagacagtgatctgacacaaacacagctgaagcaaacagaggtcctagtgacagctgaaaaattgtcttcaaatttacagcaccatttcagtttgtcatctgtttattcacattactttcctgacactggaattccagaagtgaccacctgtcattcccgaagtgccataactgtggattatattttctactctgcagaaaaggaagatgttgctgggcacccaggagctgaagttgctttggttggtggcttgaaacttctagctagactgtcacctcttacagaacaagacttatggactgttaatggacttccaaacgaaaataactcttcagatcatctgcctttattggcaaagttcagacttgagctctgactctctttgatcacatactaattttctttccaatttgtattgtttttcaaagaatgtaaagttcttaagtgtatgcatgttgtttatttttgcactgtggagattctgaagcggttatgttagatgctttgaaactccatatcagaagaaataactttataacaattttttttaataatgaaaaatattttcctgacaagtgagctctaaattctctttattgtaaaagagatgtaaaggttttatattctaaatcctagtaaaattgacagtgatttttaaatataatgcatcttcctttgtctgcttagtaaaaaatttcatttcataattttggcaagctctgtagtggatccaaagtatctttgagttcttgcaaactacaagttgtttcctttccagaaggcttgatttcattaggagacccctctattgagttctaaatagtttatcttagaaagccttgggtcattcacaggtatccaaccagccattgtttagtttgtttttgaaggggtttgataatgctttttaagttgtacagaatgcttaatccatcttattactgtcctgagccatgtaatatgcctgcatcgtgttggggaaatgtttgggaaatataagccagcataacgtgtaaagctcactctttcaccctggaacagacaagaggtgggcttaatagaggcagagactggggatatacctttgtttccctagcatttttatttatttatttttattttattttattttttgagatggagtttcactcttgttgcccaggctgggggtgcaatggcgcaatctttgctcactgcaacccctgcctcccgggctcaagcgattctcctgcctcagcctctcgagtagctgggattacaggcatgcgtcaccactcccagctaattttgtattttcagtagagacagggtttccccatgttggttaggctggtctcgaactcccaacctcaggtgatccgcccacctcagctctcaaagtgctgggattacaggcgggagccactgcacatggcagcattttttaaaaattcagttttaagatctctggtttaggggagagattttattttactgaaccagttctatagaaatttattttattaggaaatttgtctttggaacaaagtggcagctataaaattatttttgttaagcctcagaaatatgaggaagcctgtaaaactctagtggggagatattaacttggagacctaatgctctgtaaatagtcatttaaactgttggttttagtggttttgtttctaaaatgttttcttttaccgtgatgcaccagtatgagatggtgctgacactttctatgaagtggttatgagcaggtttaataaatcctctatacaagtgtttgaatcaattttaaaacataaaaagtggaaatttccttttttgtagacagtaggacaaggaattatatgcatttttactaagtagtaattttacactgaattgtaaatgtttttacagtgagttttattaatagaatgcttcaccttaaattggaaaacaataatagtcttggactaagtctttgtactaaagcatttgctataattatttttaaaaaaacaaacagatgaaaacctcagagaaggcatgtggattataagatttgtctagtaaaaattgtaattgaatatgtttaaatatttaatttctcattttggggggtttttatttttttattttttagatggtgtctcacgctatcgcccaggctggagtgcagtggcgcgaactcggctcactgcaacctccgcctcctgggttcaagcaattctccttcctcagcctcccaagtagctgggattacaggcatgcaccaccatgcccagctaatttttgtatttttagtagagatggaattttgccatgttggccaggctggtcttgaactcctgacctcaggggtgatccacccgcctcgggctcccaaagtgctgtgattacaggcatgagccaccatgcctggcctttggggggattttaattacagtattaattatagttctaggatttcccacattttatagtagtagtttgcaggatattatgtgccctaattagcagatatagacattatcaaattataatgatagtataattatccctttttaatattggggaaagaaaaatgaaaattcattagttaattactgctttgtgttgtgtgaatttattaacaaataacattattacatataggtcattgttaacaaacaaacatccctgaaaacctctgtgaaaatttaattttttatatcctgattaatatattgtgactttaggcccatttttcatgtgcttcactttgatagagttaatccataaaattgctctttactttagcttatcaaatgaagtattattttgtggactggaggccaaaaagtcaatgtgagcttctcacaggtttttaaagctccactaaaagtaattatccacttgtctttacttttgttgaccagaatagttggtaactctgccagagcctgtacttacctgccaaaaacaattaaatctggttaatgcctgaaaccaaatctctcagtctcaagtgttatactatccaagttttaaatggaaaggtaaactgtggagtaatgaaattttggttttactgtaccttttgctatcaagataatattcatgtttgaaatcttgtctttatttggaatttagttactgtctgcttttaacctttgctttcctaaagaaagtttgagatccagagagttcaagggattggggaaagagaggcgtcaagtcatttgcactttgtacctgtaagttaggtaataaactattatactcgtaaaaaaaaaaaaaaaaaa

SEQ ID NO: 1413 - DNA, 1896 bp, Homo sapiens
ggcacgagtgaagatggaccagaagtccttgatgaggaaggaactcaagaagacctagagtacaagttgaagggattaattgacctaaccctggataagagtgcgaagacaaggcaagcagctcttgaaggtattaaaaatgcactggcttcaaaaatgctgtatgaatttattctggaaaggagaatgactttaactgatagcattgaacgctgcctgaaaaaaggtaagagtgatgagcaacgtgcagctgcagcgttagcatctgttctttgtattcagctgggccctggaattgaaagtgaagagattttgaaaactcttggaccaatcctaaagaaaatcatttgtgatgggtcagctagtatgcaggctaggcaaacttgtgcaacttgctttggtgtttgctgttttattgccacagatgacattactgaactatactcaactctggaatgtttggaaaatatcttcactaaatcctatctcaaagagaaagacactactgttatttgcagcactcctaatacagtgcttcatatcagctctcttcttgcatggacactactgctgaccatatgcccaatcaatgaagtgaagaaaaagcttgagatgcatttccataagcttccaagcctcctctcttgtgatgatgtaaacatgagaatagctgctggtgaatctttggcacttctctttgaattggccagaggaatagagagtgactttttttatgaagacatggagtccttgacgcagatgcttagggccttggcaacagatggaaataaacaccgggccaaagtggacaagagaaagcagcggtcagttttcagagatgtcctgaggcagtggaggaacgggattttccaacagaaaccattaaatttggtcctgaacgcatgtatattgattgctgggtaaaaaaacacacctatgacacctttaaggaagttcttggatcagggatgcagtaccacttgcagtcaaatgaattccttcgaaatgtttttgaacttggacccccagtgatgcttgatgctgcacgcttaaacgatgaagattctcgttcgaaaggcatttatataactctgcagccttcaaagctcgaaccaaagctagaagcaaatgtcgagataagagagcagatgttggagaattcttctagattttcagaacttgaagactattttctaatttctatttttttttctatttcaatgtatttaaactctagacacagtttttatcttggattaacttagataacttttgtagcagtggttatattgcttataatttaatgtacaatactattgaaactggtgagttctgattattaaatattctctgtaaatcagtaaacatgtataaagtatttgtaatgtttggtcataatttatttatgaagacagcaaaagactgatttcatgatggggaaaacaattagccaaagtttaatttcttacactgtggttgtcaagaatactgatttactataatgatatatacatgcaagatatttaacttaatatcttagacaagagttctgggtacaattttgggatctagttcccctggaaaagctgctgtatttttaatttttaatggaatgtagcttttaaaatcctgtcactggcatcaacaaaaggaattataccatgagaccttatagctgtacttaaaagccattcagttcagctattgggagttcatgatgaattagcatatgccagaaaggttgctaaccttaacatctgagagcagtaacactgattttatctgctgtatgagactttgtgcattttactttgaaataaagatttttttcccactgaaaaaaaaaaaaaaaaaaaaaaaaaaaaaaaaaaaaaaaaaaaaaaaaaaaaaaaaaaa

SEQ ID NO: 1414 - DNA, 1361 bp, Homo sapiens
agcatttggtggacttctgagcggtgtccaccttttagctgtgatgaacggtgctgttgtgaacacttgtgtacaagtttcagtgtggacgtgtgtcttcgtttctctcgggtatatacctaaggtggaatcactgggactatggtaactgtgtttactcatttgagcagccgccagcctgctttcccaagtgtctgcaccatctcacgtcccttcctgcagccttgggagttctgatttcgccacatctttgccatcacttgtttttctctgactttttgtttccagcccatgttgggtgtaaagcagtgtcttgtggttttcatttgcattttcatgatgactgataatgttgaacatctttttttgtctttcttggcgatctgtatttcttctttggagaaatgtctattccgattcttgcccacttttagttggattattgtctttttgttgttgatttatgagttctttacatcatctagatagaagtgcttcctcacatatatgattcgcaaatatcttctcccattctgtgagatgtcatttcactttcttgatggtgtcctttgaggcacaaaacttttaagtttttacgaagtccaatttatttttcttttgtcacttgggcttttgctgtcatatgtaagaatcttttgccaaatccaaggttatgaaaaagaaaaccttcaaaagtttttttattttagctcttttatttaagagctaaaataaaaattttaatagctgcatgtggtgtgaagtagggatcccagttcgcccttttgcgtgtatctgttcgttggcccagcaccgtttgttgaaggctgctctttcctcactgaacagtctcgacattcttgtcaaacatgagttgcccgtaggttatgagtttattccagaaccctcagttccactgcaccgatgcgtgtgtctgtccttgcgccactcccacactgtcctgttaccatcgcattgtaagtcttaaaactgggaatgtaagtcctttgacttttttctaatccaatactatgaacaaaatagatggcagatgaaattgaaaatttcctagaaaggtgcaaactactcaaactgattcaacaagaaatagacaatgtgaatagatatataacaagtgaagaggttgaattagtaatccaaaaacacccataaagaaaagccaaggaccagagagcttcccagctaaattctaccaagcatttaaagaattaaaaccaattctcacaaactctttcaaaagactaggagagtgggaaatgcttctcaattcattttatgagaccaatattactctgataccataatcagacaaagacattgccaaaaaaaaaaaaaaaaaa

SEQ ID NO: 1415 - DNA, 643 bp, Homo sapiens
ggcacgagacaaaacaccatgacacctattttcaaatgcttcccagggcaaccccagcgacctgcagggcagtccggaggtggggcagggtgggaaaggaggcctcctaacttccaatccaggacgctctccatgttgtctgaggcccttgtgatcccatctcttggcttcttcgtctcctctctctgttctgaccagtggcctctttcggcccagcccagctcatggctctcggcggccttcccaggccccgcttttgacttttggcagcctcttcaggcacagaacttgatctccagtcggcctttgcaggcccggcctcctgcctctcgaaggcctgcacgggcccggcctcggcctcggcctcggcctcacagcggactctccacgcccagctagctctcgcctcactgcggcctccccagtccaaagctcctgcctttcggccacttcggcaggtccagctcctgcctgccagtggcctctttaggcccagctcattctcacgtcggccattccaggccccgtgtttcccttccggcagcctcttggcctctaatttgtttatcttttgtgtataaatcccaaaatattgaattttggaatatttccaccattatgtaaaaaaaaaaaaaaaaaaaaa

SEQ ID NO: 1416 - DNA, 1323 bp, Homo sapiens
aggcccagcaccacgggcctttccccaggccagggggaggaccacctaaggattcaagggcagctcctgttttcttggttctgtgaacactcgagtctgagccagcccctcaggaattgcctcaaaagagaaaaacaaaaaaaagtcctccttcccaaggcctgctactccaaggtttggctccatcccttgcctttgggtcctgcctatttccccactcctggtctcttatctttggggccaccagtggggagtcacccgggccccaatccctctaaggcgctaagttgaaggaggccttcccagagtgactattggtgccaaagtcccagttcctgttggacttggggtaaaaacaggagatggtgagtgggtgtaaggcccaaatgcccagagaagttaactcgaacccatgggacctgtcccagcctgtcagtccctgatgagtgtaacttccttcccctgggggcctggccyttctctccaacccagtggccatgctttctcacccagccttgtgcccggcctgcatttctgtatatattgctgtgtattgtgtgtatgtatgtattcctggacaagtgtgttcatctgcagcccttgcctgaggataaggtttaggattgggtaaagatcagaataccagggccagctaaggcaacgactccctccccaaacccttgggacctcagccagtcccaaggctgccctgacaatcaggcaggctccccaccgtgaggccaagcctcctctgccactgccagcatggcccaagggaggcttggccttgggcttgccagcctcagctctgccctgacaagggtcttgtatccagggcagaggcctgaggtgacccaggcttgctttgtggctgatgccagcaggcttggttctagtgggcaccactggtgggcaacctccataactggcccttaggccctaccttcctacacagctaggctataatgggcctgagtgagagggtagcttccccagccccaagcacaggcagaggggtggagagcaatttttggttttatttttgtttctgaagtggtgcctgtacctccagcccccagggggccttccctggccacacttctctgccccacccaggcatcgccatcccagcactttgctccatgtcacccgtaagatgccctttgctgaatgtacctgagtgtatgtatttaaaaggactcacatgggcatcagagaatttatggctctgtatccaataaaaaagatggtgaaactggwmaaaaaaaaaaaaaaaaaaaaaaaaaaaaaaaaaaaaaaaaaaaaaaaaaaaaaaaactcgag

SEQ ID NO: 1417 - DNA, 2083 bp, Homo sapiens
  SITE (1781): n equals a,t,g, or c
  SITE (2057): n equals a,t,g, or c
ggtgtccttctaatgccatctctgtagaaaatgtgccctgtaagtcagtttcctggaagctcttctgtgtgttgtcccttctccagcagtgggtcgattgtcagggagcccaggatggaagctaagtgcactggtcattggttgttctttcagtgcccttcagacagcccttgccctggtggtcttgtgccctccctgtctgtttggtgcctcttttataaattagtgatgacttcaggaaatggtcctggatttcaaatagctattcctggagacattctaattctgtggtttaaaccttaaaacaaacaaaccaaagtaattccctggatattggtggctactggtgtgaagagcatggtgcggcgcctgttacttggatgagctttgatcaaagaatggcatcaaatgataacagacattggaggtataagtgattacaaggagaatcatagatctaaataaaaatggaatggtggttaatactttaattgatcgagatgatacagcaatatttttattcatatatcagtacaatatttaacttttaaaggaagtgatattcatcttagcagaggtctcttagcaccatatttgcaacattggatgttatccattgagccttgttttggggaggaaaaaagacaccaactttcttgagtaaattgttctctgaaggtgttttacacaggaatacaaatttgcctgaactcaaaagggtcttgtttacagtactttaatcttgtttttcacttcataagccctctgtaaactgaaatacagagctacaggcaaacctcattttattgcacttagctttattgctctttgaagatactctgkttttttttttttattcaaattacagatttgtggtaaccctgcctcaaacaagtctgttggtgccatgtttccaataacaggtgctcactttttgtctctgtgtcacattttagtcattatctcaatatttcagactttttcattactggtatatctggtatggtgacctgtggtcccagatctttgatgttactatkgtcattgktttggggccccataamccatgcccatataacgtggcaamccttatcaataagttttgtgtgktccgattgctycatgaaaccagctgttccccctctctctccctcttctcgggcctccctattgcctgagacacccaatattgagattatgccagttaataaccctgcaatgcctctaaatgttcaaatgaaaggaagaatctcatgtctctcactttaaataaaattctagaaaggattaaacttggtgagaaaggcatgttgaaagccaaaatacgctgaaggctagacctcttgcaccaaacagccaagttgtgaatgcaatgaaaagttcttgaaggaaattaaaagtgctacttcatagaacacatgaataataaggaaaacaccttatttctgatatagagagagttttaatggtctggatagaagatcaaatcagccacaacgtttccttaagccgaagccagagcaaggctctaactctcttcaattctctgaaagctgagacaggtgagggagctgcagccaaaaagctggaagctagctgagggtggtttatgaggtttaagaaaagaagctatctccgtaacataaaagtactagacgaagcagcaagtgctgatgtagaagctgcagtgagttatccagaagatctagctgggataattgataaagctarctacactaaacaacacattttcactgtaaaccaarkagccatctyggaanaaagatgctgtctaggactttcttagctagagagtacgaggcatcgccttttcttaaagcttgaaaggacaagctgacccttggtaggagctaatgcagctagtgacactaaattgaagttagtgctcattttcccttctcaaaatcctacggcccttcagaattatccttaaatctactctgcctgtgctctaggaatggaactacaaaggctagataacagcacatctgctgacagcatgatttactgactattttaagcccactattaagacntactgcttagaggcaaaaaaaaaaaa

SEQ ID NO: 1418 - DNA, 917 bp, Homo sapiens
ggcacgaggctttccggtacaggatacagctgtgcttctcctactttgtatttgccatatacggatagatacaaaacctcatgactgatttttccctatttattttgagtggctctgtataccattttcatgtattacttcatttttctgtttttcagttatgttctctgttttcgtatatttttggaagctagttctaagtcatgttttgtaggaaataagcaatcttaaatacatgcataggggatttctttcttctgaggatccttaatttcttctatttttaagattcaaattgaatgattaatcagtaacagtttatgttttaaataaaagtctttaaaatgttaaatatcagcctttcatttctgatatttggtctttgaagaggaaacataatgcaatagtaattcataatagtggagggttctttcctcacatccttgaaagccaccagtcttattcttcagcctggctcttgagctattgctgtattaattttaaataggttgtgatagcataagctgatggaagcctgcagagatctcactttgaaatggtgatacattacatgggaaaagattagagaggtgttttatactgcacatcggtgaggcctaataagaaagtagaatagacgtaaaccattgttttcatcatcctttaagacagggatttcagactcaagaaccaggcagctacctatttaaatgagtcaagtgggccctaatgtaagacaatgtgatgggtaaggattgattctgagggaacaggagcaggcatgccctctctaacagaggccgtcagttctgctgtacctgaaatgtgggcattgttgctggcgattccacacttacatctaaaatttcctgattttttaagaatgacaataaccaatttaaaaaaaaaaaaaaaaa

SEQ ID NO: 1419 - DNA, 1014 bp, Homo sapiens
  SITE (820): n equals a,t,g, or c
cccacgcgtccgatttgagatatttccttttgattcagacgtaacactgtgctttcaagcttaacatcctattattttcctatatatagctagtgtttatgaaagtttctctactccttatttttaaatccatataaataaagcatttattggatttatactgaggttgaattaaagaagtgtaagtttatttttagcatcgtgagaagtgtctcacttaaggtagtttttaatctggttgtgtttgcaatgaaacaatattagacagttttataattgatttctttctttttcctaccatttcatcagcaagtcccttcagctctttcaaaataaaccctgaatctgatcattgtggtctgaatcactattatattttgccagaactgctacaatagcctccaaattcttttttcctcttttcttacactcaattaatgaaaattttaccttacccaagtaaaatcagctatgcccagtgatcttttaaagacmaatcagattaacattcacctgctgaaaacccttcagtgaatttctgtctcttctagaataawwtctaaagtctttattgtggcctccaatgctctatctagtctggcccatatctatctctaactgtatctttgatcaatctctatcttaatcattgtgttccaggcacactaaccatctcgctattccttgaatagcatatttctgtctggaatggtcaactaacagcaaagaggacagtgtggttggataggaatgagagagggaggaagagggtgatgaggttacagaggtaattaggggaaagattatatggtcttatagnccgtagtagtacttttagatttttctctgaaaaaatagagagccattttagggttttgaacaaaggactgatatcttccacttgccatttaaaaggatcattctggctgttgcattaagaatgactatagaggctgggagtggtggctcacacctgtagtcccagcactttgggaggccaaggcgggcagatca

SEQ ID NO: 1420 - DNA, 1720 bp, Homo sapiens
ccacgcgtccgaaactttgtgctggaatcatgataactgcatctcacaatccaaagcaggataatggttataaggtctattgggataatggagctcagatcatttctcctcacgataaagggatttctcaagctattgaagaaaatctagaaccgtggcctcaagcttgggacgattctttaattgatagcagtccacttctccacaatccgagtgcttccatcaataatgactactttgaagaccttaaaaagtactgtttccacaggagcgtgaacagggagacaaaggtgaagtttgtgcacacctctgtccatggggtgggtcatagctttgtgcagtcagctttcaaggcttttgaccttgttcctcctgaggctgttcctgaacagaaagatccggatcctgagtttccaacagtgaaatacccgaatcccgaagaggggaaaggtgtcttgactttgtcttttgctttggctgacaaaaccaaggccagaattgttttagctaacgacccggatgctgatagacttgctgtggcagaaaagcaagacagtggtgaatggagggtgttttcaggcaatgagttgggggccctcctgggctggtggctttttacatcttggaaagagaagaaccaggatcgcagtgctctcaaagacacgtacatgttgtccagcaccgtctcctccaaaatcttgcgggccattgccttaaaggaaggttttcattttgaggaaacattaactggctttaagtggatgggaaacagagccaaacagctaatagaccaggggaaaactgttttatttgcatttgaagaagctattggatacatgtgctgcccttttgttctggacaaagatggagtcagtgccgctgtcataagtgcagagttggctagcttcctagcaaccaagaatttgtctttgtctcagcaactaaaggccatttatgtggagtatggctaccatattactaaagcttcctattttatctgccatgatcaagaaaccattaagaaattatttgaaaacctcagaaactacgatggaaaaaataattatccaaaagcttgtggcaaatttgaaatttctgccattagggaccttacaactggctatgatgatagccaacctgataaaaaagctgttcttcccactagtaaaagcagccaaatgatcaccttcacctttgctaatggaggcgtggccaccatgcgcaccagtgggacagagcccaaaatcaagtactatgcagagctgtgtgccccacctgggaacagtgatcctgagcagctgaagaaggaactgaatgaactggtcagtgctattgaagaacattttttccagccacagaagtacaatctgcagccaaaagcagactaaaatagtccagccttgggtatacttgcatttacctacaattaagctgggtttaacttgttaagcaatatttttaagggccaaatgattcaaaacatcacaggtatttatgtgttttacaaagacctacattcctcattgtttcatgtttgacctttaaggtgaaaaaagaaaatggccaaacccaacaaactaacattcctactaaaaagttgagcttggacatattttgaatttttgtaagtgaagatttttaaactgactaacttaaaaaaatagattgtaattgatgtgccttaatttgcataaatcataaatgtaaaaaaaaaaaaaaa

SEQ ID NO: 1421 - DNA, 1730 bp, Homo sapiens
  SITE (455): n equals a,t,g, or c
gggtcgacccacgcgtccggaaggatggaaataggacccttgagccgattactccgtgatggctcagactgcatgcaaagactaggatggggctcttgctctggctcagtgttgggcatacttcccctcagaaggcccccgccaaagagcttagattttggcttgggaaaaacattacccctcttcagtaaccctgaagctctgtatttggtatttgggattcaggtaggtcagctgctcatgttgmctggcccaagtgtgtaagaacaaacagtaatgccagtcattttcccactaagatgttccagtgggaaggggggctggtatgaaaaagagaatttttttttctctgtgtaatgataactttgttcacgtagtaagaattcagttcttactattggtgtgaatagggggtaaatattatttttatttaaaagcaaaattaaatactttcntgaacctcatccatgtttgcaagtagatgtctactgtggttgccttttttcctcaagagaatattttaataaacttgtaagtaattttgttacatttttctgtctgcctgtgtactatgtattaaaactcacatgggggctttcatgataaaaagataaactgttaagcagttggaaattttcagtgttcttccagtggacacctgccttggggcaggagcttctttgtagtcattattgatagaatggggtcacacacattgtgctcctgcattaagggcagctccaaggtttggcatgagactatgcatgtgtgtggacacggaggtttctcagtgagaaagagtcctaagacagtgaagtggaacgargccttaaaaatcatctagtcagctgacttccagtttcaggttctcaggctccttttggtattttaggaagcccacattggactagagagagacttcagaccaagatatcatgtttatgttcttttagctagaattgtgttaaggcaatgactatctcctacagcttagaagttctgaagtacatggccaggagcggtggctcamacctgcaatcccmgcactttgggaggccgargcgggtggatcacccgagctcaggagtttgagaccagcctgggcaagatggtgaaaccctgtctctactaaaactgtgaaaaacacattagccgagcatggtgatgcacgcctgtaatcccagctacttgagaggctggggcacaagaatcacttgagcctgggaggcagaggttacagtgagccaagatggtgccagtggactccagcctaggcaacagagcaagactctgtctcaaaaaaaaaaaaaaaagttctgaagtacagttatatatgtatttgattaatacaaaagtagagaagttaatcactccttaaaaaatgcagtttgggaggccaggcacaatggcttatgcctgtaatcccagtactttggaaggccgaggaaaggcggatcacttgagtccaggagtaggagaccagcctgagcaacatggtgaaaccccatctctacaaaaaatacaaaaattagctgggtctggtgacgtgtgcctgtggtcccagctacttgggagactgaggtaggagggtcacgtgggcccaggagattgagacttcagtgagccatgattacaccactgcacttcagcctgggcagcagagtaagaccctgtctcaaaaaaaaaaaaaaagggcggccgctcttaaaagatccaagctttacgtttcc

SEQ ID NO: 1422 - DNA, 2018 bp, Homo sapiens
  SITE (672): n equals a,t,g, or c
  SITE (1609): n equals a,t,g, or c
attggctacaaacccactggtataagcagcagtgtgccttctctctaactgtggacaagtcgggcatgtggcgggtgaggagcccccaaataactcttgaactggaaaataactctttagctatatactggcagaatatttgaacaactctagcaagaaatgtcagtttagggatgcctcctctaaatgggggcttagaatataacattttgcaggaagtcctttctgatacatagctgactagatgaaggaccagattaacaagttcatgagttgtaaatataaaagttgtgtaccacgataaaaaagaaaaagaagtatggctgcactgttgatggctggtcaaacagcccccaagaatcctggggtgactccaatactgccaccttttctctgtgggtgcagttgcctgcggatgtgtgtgcacatctgtgcctcggtatgcacactcgagatgcccgctctcatagacggtgcagagcgtcactgcattcctatctgattaatgtgaccttagtgttgtagatacactgtgtcactttcatcctccctcctccccacaaaagatgccacgagaactcgtgaactgtgataagcaatgaacagaataactgttgaagaagcacctcatgaacctccccagagaaacgggatggaggagcacccagggtnctcttgctctcttgcctgcgctgccatttccttccagcctgggtttctagctctttggggagattccccgttttgtggaatgctttctgtgtttcctacttctggatgcctaaggagtggccagtcatactcctggctgaccactgccaggcaccgtggttttcctcactgaactcaaggagtcaccctccgtggggaggccacactcacagctccaggcctgccatttagccttggggcttggctgtaaagttgcccaagaggattacaggagctgccagccaagtttaatttggccaccttagagaactgcagcaaggccctatcagcttcccattagacaaacaactgcatttaaattaaataaagtttgcacctctagggagtgctgacctgaaaataagaaccttctgtctgtgattatagagtacacttgcttttattaattgctgattcttagtttacaaaaaaaaaaattagaaaagcattaccatttactttccaaggggcaagagattctctacaatacccttcccccaaccctctcctcaaatttccaaatcctaaatactttgaagaaatttgtgtgactgtttaaaattgagtatttccttctaactattgtcttttgaaaagggatggttcaccaggccagtgatactctatggactgcattttgggacctctaccccagcaaggatacaggttcctggggtcttgaagatgggaaaagttgtctcagaatttacccaaatgtcgttctcaccataaaagatatacttgtagaaatgagaagcttcagtataactcaaaacactggacgcagcaataactataaacattttaatttcaaaaacaaaggtgtgtgcgatgttgtgtgcacagtaagggttgcggggcttggagaacaagcacgcgtccctgtgaagcccgcagngtgctggcggcccaccaatcgcctggactacagtgaggagcattgtgtgactccgcggtggatttccatgcaccgaatggactcagtttctaaactcacatcctaacgtatcctggcttttcacagaatactggagacatgactgcatgcatgatcacggttcttgttgtgaagctgccaccatgttacgcttaacagctgcataaatattataaagaaatagggttttcttgacacttagatttaaccttaatgcatctgcccagctgatggtatcagacgtgctgctgttcatttctttttcatggtaacagtaatgtataaagtgccgatgatgtaaaaaaaaaaaaaaaaaaaaaaaaaaaaaaaaaaaaaaaaaaaaaaaaaaaaaaaaaaaaaaagggcggcc

SEQ ID NO: 1423 - DNA, 1020 bp, Homo sapiens
ggtggaaatgaaataaatttgtacatgtaaagcacaagaacatggaaggtgcttactaaatgttacttatctttactttctctgccttggtcctctcatacccactcctgattttaggtgattgggtggaaatggccattgaacatcatactctactaacaaagaccatttgagagttagattaatctctttcccgtttcaacaacaggaagaagccccacaaatcaagtatttcccttgttctataccttgtcattttgttgctactcccaccagccaaagagggaggaaagtttcttggtataattaaaatgttataggctgggtcgggggggctcatgcctgtcatcccagcactttgggaggctaagacgggaggatcgcttgaggctaggagttcaagaccaggctgggcaacatagtgagacccatctctacaaaaaaaaaaagatagccaggcatgatggcatccatctgtagtcccagctacttgggaggctgaggcaggaggatcacttgagcccgagggtttcaggctgcaggaagctatgatcatgccactacactccagcctgggcaatagagcaagactgtctctctaaaaaccaaaaattgttatagaatatagagttgaataacttttctggaatgagaaagctctcattttagatatccattcattcattcattcaatagtgtgctggatgccargaatttaatggtgargaaaatagacatgatctctgccttctgargctcaaratcctccctctatttttaaaaatcaggtttattgaagtataattgatgtacagtaaaawttactgtttttagtggaaacttctgtgggttttggcaaatgtgtaaccaacacaattaagatcyagaacatcctgtctctcccctcccaattttcttgtgctcctttggagtcaacaactctcccccaaccccatggcctccatgactttttcaaaaaaaaaaaaaaaaaaaaaaaaaaaaaaaaaaaaaagggcggcc

SEQ ID NO: 1424 - DNA, 957 bp, Homo sapiens
cccacgcgtccggagactgagtggcttaaacaaaagacatttattttctcacagtcctggaggctggaagtccaagaccaaggtgttcgcagggttggtttcttctaaggcctctctccttggcttggagatggccctggttggtcttctgagtgcaggtgtccctggtgtctctttgtgtgtccagattttctcttataaggacactggtgagattggatgaggggccccctgacggcctcatcttaatgtcatcacctctcttatctccatatccattcacatacgggccattgcgagctaccggggattaggggttcaacacataaattgggggtgggggggtgcagctcagcccataaacatgccccctctggctcgctctcccagggcatccatcgtagcacttagaaaaatgatcacttcttttttggctttgtggtggcgtgtgtgtgtgtgtatttgtatatacacacatatatatataaatacacagacacacatatatacaaacacacgcattcattttcgtccacagttcctggctcataactcccacagcccttgttacactcttttgttacaacattgggtgtgtcaggcctcaggagacaatcactctaacctcctgcccttccttttacctgcccaagacaggactctaatcttccctacctttctgatggtgggtcataaaactcattccagagacggtcccaccccatatcctgctagaaggaatgctgctgtcatgaagcttccataaaaaccaaggggactggattcagagagcttccagataactgaacatacagaggttctagaagggtggtgcgcccagggagggcacaggaagctccatgcccttccttcatacctcaccctatgcatctctttatctgtatcttttataatatcctttataataaaccagtaaatgtaaaaaaaaaaaaaaaa

SEQ ID NO: 1425 - DNA, 1034 bp, Homo sapiens
cccacgcgtccgttttatttaatttatacttaagtttgaatagccacacatggctagtggctatcatactggtcaacatgggctatctaattctgatgtacagtctctgcatcatcattccattttctaaagtgggtttctcccacagcagttgttaaaacaaggatttggatacaaagagattatttaagaggtgatcctagacagcaggagagggattgaggaggtgagatggagaaggtgaatactagtaaaagactacattgatatgctgtaggcacttgaggtttctgtttgtttgtttgtttgtttttttggaaaccttcgagagacttatggaaaacactgtataattgtttcattgaggagcacggaactgatcatgtttattcaccaactctcatgcctttttggttgaaggatgctcctaggggcattcacacctgctctgaactccttcttcatctccagcctgcctcccttatgggccatttcatgccactgtacctagataaagccttagggccaagagattcaggtgcttgaggctgggtctatccttctgagctgcaaataacttccagggtggatcaagggaatgtggggtcaggatagattatattgcctctcatttacaaccaaccatattagctcatattagtgttttatctggaataggaggagaagcatttgagactgttagaaaaaaggttctgctatttaaaaaaaaagttttgaaactgtagctctaaactacattcctacctgttttcctgaccacctcaattactaacttgtatcgtgttccatattatttctagcacagcatggattctctaacattcttgcagtctgggccctgcaaggtagctgtaaaaatgctgccctgggactttctcagtggagacataagaagactcaagcattccagaaagtgtttgtttggttggcttttattgatgtatataaaaagattagagacagcaagagaagaaaatcagagagaacctatacttggttaaaaaaaaaaaaaa

SEQ ID NO: 1426 - DNA, 1150 bp, Homo sapiens
ccgggtcgacccacgcgtccggttttggtacaagttcacagagaatcaacgttcatggtcggtgtgatgagagactgagatgtgaattgctcagtagagagttggcggtggcgtatcccagagtgtacttagaaacatgaaaacttctttgaaagggagctgatcacttttggaaaagatttacagttcttaggaatgcaaatatttgtttcttttccttttcatctaaaacatttaccagataaagttgagtccagagacaactaactaataagagaataattttaatatgtttttccattttggtgtcaacattgcatggattttttttcttgttccaagactggctttttccagtggaaacttagcagttaaaattaatttgttccaaatgaaatattgcatctgaaattaggctggaattgcagtagacgttcctggttcttgcaaaccagaggacattcttgaagctgtgtggtcccaggctctcccctctctggtttcctgtgttccctccctgcagcctcagactcgccctccagggctccactgtgcttttccaaactctcatcctttcctcccaggcgtcctgtgcagcacgccactgcctctcacttctcacatccacagctcctgcttggtcagtgttcctagttgagtgtcagaaattgaacaacccaattagctggtatttcatttgtaccaacctatgaatggaggagtagccttaattcccttgggggcttccacttctaagagaactgttttccgtccaggtaggcagacctgtcatggctgaagcttcatcacctggcctggtcatagcccccaggccctgtaggcaggacaggggcttggcagattggcatccttcccacaaaagcatgaaagtaggatgtctgtatgtagcgacaacaaatacaagaataaggagagtttaacaacattctcaaagttggtggaaaagaaaaagaatcaatgaaaacatcaccctaaaccagctagtgctttctgtttacagggatcagaccccttcccacttaaaaaaaaaaaaaacaaaaaaaaaaaaaaaaaaaaaaaaaaaaaaaaaaaaaaaaaaaaaaaaaaaaaaaaaaaaaaaaaaaaaaaaaaaaaaaaaaaaaaaaaaaaa

SEQ ID NO: 1427 - DNA, 1761 bp, Homo sapiens
ccacgcgtccgaagagaccttgggtaataagcttgccactgagtggctgctttatgtcctcaagggattgtaccatatcaagcactcagcattggtgtctgttgctaatggtcaggcattcagtagtggtggtagctagatcagccttggagagagagagcccatcatttcaggccatcacgactaatccattcatttatgggccctttgtaaggattgagatggctgaggacaggggctgacaggcattcattagaccagtcatcctgtccatatgcttattcagtgcttcttctgccacacgtgctctctggtgggctctagtgtgagacacaaagatcaacacattatgtgcccattcttatagctccagccacatgcctcttcctcagacatgcttggtttcaatcctctagtgttgttcccttgaggcccttgaccaagcaaccaagccattctccaccacctagaagtctgtgtatattcttacttttggccgcttctctccagacacaaagcagatgaccactggacttgaattggcacccagagttattttgggtgtgtctttagtgcagcaccagtccatctttttagctcacgccagcatatcatgctagcctaatccttataaagcccttttcctgctccttttctattctgtcaactgtctgtggagaaatccccaaggggccataggtattatgtctggaattggttctctccgaggggttcttggtctcgctgacttcaagaatgaagccatggaccctcgcagtgagtgttgcagttcttaaagatggtgtgtccggagtttgtgttttcagatgttcagatgtgtctggaggagtttcttccttctggtgggctcgtggtctcgctgacttcaggagtgaagccacagaccttcacagtgagcattacagctcttaaaggtggtgcgtccagagttgtttgttcctcccggtgggtttgtggtctcactggcttcaggagtgaagctgcagacctttgcagtgagtgttacagctcataaaggtagtgtggacccaaagagtgagcagcagcaagatttattgtgaagagtgatagaaaaaagcttccacagcgtggaaggggacctgagaaggttgccgccactggctcgggtggccagcttttattcccttatttggccccgccctcatcctcgtgattggtccattttacagggtgctgattgccccattttacagagtgctgattggtccgtttttacagagtgctgattggtgcgtttacaaacctttagttagacacagagtgctaattggtgcatttttacagagtgctgattggtgcatttacaaacctttggctagacacagagcgcttattggtgcatttacaatcctttagctaggcagaaaagttctccaagtccccacccaacccagaagtccagctggcttcacttctcaatcctccttctaaacaggacaccacaagtgttgttgggaattggccgatgaccgctctagctatttcctgctggataggggcaaagaaggggccctgcagttgtagtgtcctccagaggggaactctttaggccagtgaaagggccagcaggttggtctggggtcctcagtagaagttgttagttgagctcatttggggttccatttgtaagaccatctgtagcttgatggcctcaattctagaggaaacaaatttgacaaggagattaaaaatacagggtccaaaggcaaaaaaaaaaaa

SEQ ID NO: 1428 - DNA, 616 bp, Homo sapiens
  SITE (610): n equals a,t,g, or c
ccacgcgtccgaaaattagttaggcgtggtggcacacacctgtaatcccagctacttcggaggctgaggcacaagaatcgcttgagcccgggaggtgcaggttgcagtgagccaagatcacaccactgcactccagcctgggcagcagagtgagaccgtgtcccaaaaaagagaaggagaaacagagatcatgtggaaaaagttattttttatttatttacttagttttcagtttggtttgagactcgtgttttaaaccagagggcatggttactgagggataacatcaatagaactcctataattgaggggataattatcaaggtattagatgattcactggctattacaaagaacacagaaattatgaaacctggttctgtaacttatagtttttcatattatttttataccatggataactcttctatgtgtattcataggtgtaagattactggcagtgtcatatgaaacaacatattacattttttaagcctggaaagcatctagtatggctgtgcacgtagtgatgacattgactttttttacttaaagaagagctaccacttcaaataagaaaaaaaaaaaaaaaaaaaaaaaaaaaaaaaanaaaaaa

SEQ ID NO: 1429 - DNA, 573 bp, Homo sapiens
gctccaaactgttttccatagtggttgtactgatttagatttccaccaagagatatgtatgagagttcccttttctccacattcttgccagcatttgttattgcctgtcttttggataaaagccatttgaactagggtgagatgacatcttattgtagttttgatttgcatttctctgatgataattatgttgagcactgatatggtttggatctgtgtccccaccaaatctcatgttgaattgtagctcccagtgttggaggtggggtctgctggagggtggttggatttctcatgaatagtttcatactgtcctcttggtgctgttcttgtgatagtgagttctcatgagatttggttatttaaaagcgtacagcacctccccgctcactctctcttgctcctgcttccgccgtctaagatgccttactccctctttgctttctgccatgattggcagtttcttgaggcctctccagaagcagaagctgctgtgcttcctgtacagcctacaaaactgtaagccaattaaaactcttttctttataaaaaaaaaaaaaaaagggcggccgc

SEQ ID NO: 1430 - DNA, 1384 bp, Homo sapiens
cccacgcgtccggaggaattgctatttaagtggaaagtgcttgaacagccaaatgagcacctgtcatgtttattttcactttgaaaagtagaaacatgacagtatagtttccactgcctatccaatatgaacttctggcattcttgttatcttctcaggaactgcactgtttgcttcttgtgttcaattttttttttttttccagggatgaggatgtatctctcctcctgaaactttcactctaaaatatgcccccaaatactgacattttcaagcttgtgcttttttacttgatatctgattttttttaaatttttatttaatagggagaaggtcatgacttatggaatttactctaaggatagggatctgagcaggttcctgagtacttgaaaggctttatttacctcttacacttttttgttacatccaggtttttgctcatttctctatcatttgtgtcttgaactttacctgaaatgcatgtcttgagtgcctactaaggtccaggcattgtgctggcagatttgatatatttttgtttattccttattacaggactattacatagtagactctcattctgacactcactttttttttccagaaaaaaaaattaatggagattgattgctaatgggtacagggctgcttttaaggctatgaaaatgctctaaaattagtttgtggtgatggttgcacatctctgaacgtactaaaatacattgaattatatactttcttttttcttcgttttgcagcttttgctcaaaggagaattagatatttaaaatgagtgaattgtatggtacatgaattagatctcaataaaactattttaaaaaaagaaactaaagcttagagaagtataatatcttgttcaatatgacactacctggtaaagcttttgtccaaatttttctgagaccaaagctattctttcttccactgacgcatgctatctctactaattatatagccacggtatcctttttctttaaaaatgtaggaaaaaatggctgggtgcggtggctcacgcctgtaatcccagcactttgggaggccaaggcggacggatctcttgaggtcaggagtttgagaccagcctggccaacatggtgataccccacctctactaaaaaaaaaaaaaaaaaaaaaaaaattagccaggtgtggtggcgtgcacctgtaatcccagctactcgggaggctgaggcatgataatcacttgaacctgggaggcagaggttgcagcgagtcaagattgcaccactgcactccagcctgggcaacagagtgagactccgtctcaaaaaaaaaaaaaaaaaaaaaaaaaaaaaaaaaaaaaaaaaaaaaaaaaaaaaaaaaaaaaaaaaaaaaaaaa

SEQ ID NO: 1431 - DNA, 706 bp, Homo sapiens
gcccacgcgtccgtgcagagagactgggtgctccgagctccactcaggtgaaagaatttgcggcaattgttgacgtgaaagaagaatctcattacatcttggatccaaagcaagcactgatgaagctcaccctaggtactgcaggcagtttatttccccaagcattgtacattttgcttgacttcatatgggtaaattttattgatggctctcattacatttagttgtggggtgatgtcaccttcgtagctcattttaagtctttagaccaccatcagtcataattttcaaagaagctaattttgtctattaaatggaacagaaacttcctcactctgaattttggataagtttgtcatttagcccatggtgggggtaagagtcccactttctaaattggtgatttctgtcacatgtctaaggtagaaccagctgcaggcagtggggacttggggactagaacaggcagggaggtggagagctattctggtgggatgtcctaggggctgatgaaagtgagccttgacagcagctttgttctaaaggagcttaaagagaaagcagtggccgggcgcagtggctcacgcctgtaatcccagcactttgggaggccgaggcgggtggatcacgaggtcaggagatcgagactatcctggctaatgtggtgaaaccccgtctctactaaaaatacaaaaaaaaaaaaaaa

SEQ ID NO: 1432 - DNA, 419 bp, Homo sapiens
ccacgcgtccggaagaggaggtttgtgttgccttcagatgactgttgatttaattgacaggcagcttttcttcattgtgtgctttttgcttttgctcacaaaagtgcattcactattctatagtatgttgaaacttttaaatggaaacggcttttcattaacaaaggaagcattttcttccccccttccatgccttagctttctccgctaagtcttggcttcttcagcagctgtacctccaccagaaatgacaaaaggtgcaattgtgctaggagatggcgatgaagatatgccagtggagttttgtgtgtgggctgctggggactgttttccttctgtgtttggttttgttttatttttgttattccagaaagttgagagcacatctaaaaaccaaaaaaaaaaaaaaaaaaaaaaaa

SEQ ID NO: 1433 - DNA, 1025 bp, Homo sapiens
gccaagcttcaaacatagatctcctgactccattcatatgaccctataaactgtctcaaaacaaaaagataaattaatataaatatttattgaatatgtctttgtagagaaagcataataagcataaagggcaatgcgttaacctttatcacaagcaaccctattggaatgtgtcaacttatcagaatgaatcaggccagaatatcaagtataaatgaagcctgtagttaactgaaagttgcatatcaatcaggcactccagtttctctcctcaaactctgaatattcaatgaataagataaagaaatggctaatttgattttacctttcatttttttgacctaattctaaggtgactactcactcctcaagatttaactaatgttgctttatttttatccctctggggagacagaagagatgattgggaaacacatgtttgaagtttgtaagttctgctgctttcaaccccacagatgtctcttactgcccacttggsscctkgtgattaagcaactagatttggagccagtcaggcttttgtttagacattttaactttttcttgctttccttgcaaactcctcagccttcagactggttggaaagtaaatgtacaatcttacataaattttcaggtaatagcatttcagctttttccccargattttttgcttgggaggagacagattagactggattcggagtcttgattttgcaaaggtaacaaaagacatgtttttttataagacttttcatcataagtttattttattcaacagaagcaaaatctaatataatggaaaaaataaagatctgtgataaatctgatctgtgtkgataaacacaattagaaagatttaaagattaagtattgaaacaaactaccaaaatattttaatactgatttgtaaaaatttcagtacatttttcttctttgcttaattctactgggtcctgtttttcatcaaaacattctatcatgttagtatacaatagccaaaaaaaaaaaaaaagggcggccgc

SEQ ID NO: 1434 - DNA, 1390 bp, Homo sapiens
  SITE (1301): n equals a,t,g, or c
  SITE (1308): n equals a,t,g, or c
  SITE (1327): n equals a,t,g, or c
  SITE (1347): n equals a,t,g, or c
  SITE (1355): n equals a,t,g, or c
gttgaggtgagtcagtttctgatgcagttgggctccaccgcatgctaggttccagcccacttatgctcatttgggctaccacatttgtaagatctagcattgcttgctctctgtctgctcttttttccccaaggaatacctttctgtaactctcatctctccaaagtcctggaaatctacctcgatgaaggatgaagagaaagaagacgggaatcacatcaggcatttagaacatagcccataattaaccactcattttgcccttctggcatgctgcactcacccaatttgtcacaaagagagcagtacgggttggtgatggcactggtgatttaaatgaaaaatggctctttcttacttattctaagaagccaagttgatttttttttatatatgttaccttccagaccctgcagatggagaaggcccagagacattaagctcagcactctctaaaggagcaacagtttacagcccttccagatacagctaccaggtgagatgagaaattgctggtctctagccataggagtgtgttctgggtcccaaattgtcctggtcatcctttgccattgagatgctgtctttgcatatagtttcagcagccttggraaataagtcatcatctgcttgtcctcaggtaataaattatgccagaagatgaatacggtgatcaaagacagacattttactgcctttggtttccyaaaargawtacatggttaaaagatgaagaaaaaagaatgtagggtattataaatgttcaccagccatttaagggacttgttcgcgtccttattcgtttcctcccaactttgtctagctcctgcagtgtgatagtcctcggacagaatcacaaagcctccttcagcagagttcctcccccttcagaggacatcctacacagtctccaggatacagttatcgaactactgcactgagacctggaaaccccccctctcacggttcttcagaatcatccctctcttccacgtcctattccagccccgcccaccctgtgtccacagactcgttggccccatttacggggacaccagggtattttagcagccagccacattctggaaacagcactggcagcaatcttccaaggaggagctgcccttctagtgstgctagccctamcctgcagggaccctcagactcgccaacctcagattcagtttctcagtccagcacaggaactctgagttccacctcctttctcagaactctaggtcgtcattggcatcagacttacggactatcagtctgccagtgctgggcagtagctgttacangcctcanggtatctgcggttccaatnacagactaccacacgtggantgggtggnacataccgattcagcatgaaggtagagtagactaa

SEQ ID NO: 1435 - DNA, 783 bp, Homo sapiens
  SITE (14): n equals a,t,g, or c
gactcactataggnaaactggtacgctgcaggtaccggtccggaattcccgggtcgaaccaccgtccgcggacgcgtgggttttaagttgtcgtcttgcctctgtgctcttgaagttttgagccctttgcatttggcagtgtccaggcattcaggcctggagcccgtgtagtgccagtgcctccctccacgctcttggcctggttgacctcacctaaaccctccaaaaagcagatggtcagactctcttcccttcaaactcttctctgccctgactcacacctgggccatttcatccagtgagactgagggaggagcgagggagtccatgtttcccctccatgacgccgggacaggaagctagactcagtctcttccatatggccaggaaggggagtacctgactgcccatcttggttttgggagagagaaaaaccagtgctcagtctgggaaatgaggttttgggggattgtgataaaatagaggacaggactctgcaggtcaaggacagaggtgcatcctgagggcgcactgcagtcagggccaagtggctcactctttgcagctttagcagcaccttggatatagttgctgctccgtaaacgtgttgattgacagaggtgcaggtaaaaacctcagaacagttgggcttaaggatgctacaaaaaaagctctgggatgggatttaattttttttttttttaactgttgttatcagcctggccaacacggtgaaatcccatctctactaaaaatacaaaaaaaaaaaaaaagggcggccgc

SEQ ID NO: 1436 - DNA, 909 bp, Homo sapiens
  SITE (909): n equals a,t,g, or c
ggctggggtttgccattttgtgtcttttttagtgttcttccaaattaaattttcaagatcaaatatgggactcattgtcctgtttatggagctttttttcttttggttgactattcttttgtttcctacagtcttcaacaactgttagtgcttacaatggatacatcatgcatcttaattgataggatggatatgataataccttttttggtccaaggtcccgctcattaaaaaaaatagtttataaagctgaaaagtttttatttctattttttgtaaaatgattttcatgataggattttatataaaggggaagggttttttgtatcatttttataacatttttgaaatgagtacttattctctttcatcatctattttagactcacagttttatgagtaatgcagtaaaggtcatgtggcacattagtaaaatatgttctgaacacagaaactattctccttatcacaaattaaattttatgttaagtttgaagagcactggcctggggtatactttgctgtgaaaagatcattttggtcacttaaattacaatagaaatatttgtgttaagaaaattaagtaaaaattaggctgggcacagtggctcgcacctgtaattccaggactttgggaggcctaggcaggtggatcacctgaggtcaggagttcgagaccggcccgaccaacacggtgaaaccctgtctgtactaaaaatacaaaaattatccaggcgtagtggcaggagcctgtaatcccagctccttgggaggctgaggcaggagaatcgcttgaacccgggaggcggaggttgcagtgagccgagactgtgccactgtaccccagcctgggtgacaagagtgaaactctgtctcaaaaaaaaaaaaaaaaaaaaaaagggcggccgn

SEQ ID NO: 1437 - DNA, 766 bp, Homo sapiens
  SITE (758): n equals a,t,g, or c
  SITE (759): n equals a,t,g, or c
  SITE (760): n equals a,t,g, or c
  SITE (761): n equals a,t,g, or c
  SITE (762): n equals a,t,g, or c
ccacgcgtccggtctcagcaacaagagcaaaactccatctcaaaaaaaaaagaaaaaagatggcttgccctggcattggcgtttgtccttcttgtacacacaaaagcatcatgctttgtacactgttcgtttttgtttcgttcactgtcttcacggtaaagatgaactaagagccactgagaaggctgtttatgggaaccagaaggttgtttgcttcccttaagttcgctcttcctggcacctggtgcccttgcagcccatggggaatgtgatggtcacgttttctcgtctctcctgcctcatcccatcagccagttcactgctgtgcctgaactcctgtacagggtgtctggtgcatgtccacataacaaaaagatggtactgatcattgagtttatctccaaaaatttttttcaatttgattgtagaaaatacatttttaggcggggcatgatggctcatacctgtaatcccggcatttggggggccgaggcgggcggatcacctgaggtcaggagttccttacagcctggccggcgtggtgaagccccgtctctgctaaagatacagagactagccaagcgtggtggcatacgcctgtaattccagctactcgggaggctgaggcaggagaatcgcttgggcctgggaggcggaggttgcagtgagcagagattgcatcattgcactgcagcctgggcgataagagtgaaactccgtctctaaaaaaaaaaaaaaaaaaaaaaaaaaaaaaaaannnnnaaaa

SEQ ID NO: 1438 - DNA, 712 bp, Homo sapiens
ccacgcgtccgggcctccaccacaagaaattggctccaaacctattcccattacatcatcacccactaatgtcattacaccagaatgaaatctgctttgaggcttgtattgttgttttccttccatttctttcccctcatcatttcctttagaaggaaaagggaaggaaaaaaaaagaaaaaaatcagagacctgtaaacatttaagagtgaattggacatccccacaggctaaacctagagttgtcagctttcattccattctgctgtgatagagtgttctgcccagtatgtatccacatggagcctggaaagtaacaagtctggtcatgtgacaactggctttggtgctttgctttcagcccctcagaattagttcctaatggctcacatagctccctgccagcatcccgtcactggcacgttaaaccttttcaaataattcctcagaatagagattcttaggagagcactaaatttctccattctttgtgtttaattaaactgttcttgcattttaatatttgccagataagcgcttaagacattacgatacaggttgagtatccttaatctgaaaatctgaaatccgaaactttttgaccctgacatgacgctcaaaggaaatgctcattttcgattttggatttcagatttgggatgctcaaccagtaagtataatggcaaacttattccaaaaaaaaaaaaaaaaa

SEQ ID NO: 1439 - DNA, 680 bp, Homo sapiens
cctactttgccagtacgatctgttcctctctctctctcgctccaaaagactaatctgcacactctgttacagcacttgtctaattgtgctgtagcgtttatttacatgtttgtttctcctctagccagtgagcacctctcaagcagaattatcttccttgtttctctggcaccctaaatatttgttgaattaatagtccttctcttcttttgtaattttgctttctgtaatagaagcttaattttaagtatagttatatcagtaatcaaaatgaatcacacactgagaaatcaatgtggatgccctttaagggttctgttattttttttattgccattgagtaaaataagatactctgtgataaagtatattagcattaaagtgttcaaatctgatctttattagtaggcctcaagtgaatccttgctgacatttaaggtttatgacatttccttcacgttcgttcttgactggaaggcataaatggctgacagtaaagagcaattaataattttccaagtaaaacattttcagggacatctgcctttattgctccccagatgagagtacagcctgtttcttatgtgttccaaagatgatttccctatcagctttttggtcagttaaccaaaaaaaaaaaaaaaaaaaaaagaaaagaaaaaaaaaaaaaaagggcggcc

SEQ ID NO: 1440 - DNA, 1004 bp, Homo sapiens
ccacgcgtccgcccacgcgtccgcagtgttgtacagcagatctctagagcttattcatcagttaaggaagataagctcaggaaaatgtatttttaatgtgaaatgtcaaaaggacttaggaaagaaagtcatgttttcttcttgctgttcagtaatctagtcattaccaaacaatgttatcaatgcataacatataaacatttcataattcattttcatttctagaggaaactagtgagtaaaaacaatatcttcaggtagcagtgaaaggaagcagagatcatggccgtttggatttgagtgaattctttcaacacaaatcaatgattttatagacatatataggtttttgtcagggttccttagcttttgcatctcaaaatctatttttgctagggaactgtataatagctcatctgtcttaccctccttgtctcagagcccaggcttctgtgccttttccaatctgaaaagcctcctccttgtctctgtccttttgagcctcatgtaactttttaaaggcccactttaaattccaccactctataaaaagcttctccaactattctacctttcaatggctctcagtttcctccataatactttggaccttttagctgatcctgactctcttgcactacagtgtaaaggttctgtatttatgggctgcatactggcatgatgcttctcagttatgtatgatatcatagtcgctttttcaggacaaaactgtgtcacagtgttacagcaaaatctataacacagtgtcggcatgtaaattcagctcagtgaatgcttattaaacattaacgtaatccttgttgctttctttattcaaccctacagtgaaattttctgggtgcttggagtaactaaaatatatttgcagatatttaatttcaacttttacacattaaacaagtagaaaaccatgtcttcaaaaacatattctttaaaagtgattgtttagggcaaaaaaaaaaaaaaaaaaaaaaaaaaaaaaa

SEQ ID NO: 1441 - DNA, 1305 bp, Homo sapiens
  SITE (329): n equals a,t,g, or c
gcggaacgstggtgtgggtttttaaaaaacaaaacaagatacatgctgacatttctggtttggcaggcagagcttgttctgctccccaccctcccttttcccatagtaaccatttataggacatctcactgttgtctactctgtgttgcctctgcttccctgcctggtagatctaggaatcttaggatttcttagttttagctggtgatccgtatctttttcttaattccattgtaacttcagcttttcttattgcttgtaggaaggctgtttccattgaatacaaacaaaataaaagcttttattcttaatcttagagataggatgtntgtatttaaaaataattgtgctgtcaaaattctgtcaagttggcttttaccacattagttttttttaatgtggtttatatgaccctgragtaccttgtcttctcactgttaaattctcaactgagttgtccctatttaaagtgtgagactgtgccagtttgattttaaaatattgcaagtgcgttatggcaagataaaactgcaaagaaagaaccttcatgtccctttgattataaatgcttttggcacttgtttctactttttcctaatgttttttgaggaaagaacctccaactctccagacaggtctgggggcaaatgactaaaacatgaactgaggccctgggctgtctctgtgaggatatcccctctattctctctgaaatgtcccagcatgtggtgcatttcttgttagtgtggactcctctgtatataacacatcttatttatcttctgtgcataacatgaagtagtgccctaatgcaattccaggatgtaattcagcatttctataaaaatacagtgtttttctacatttgcatcaaaaaataaccagataattatatttattaagaaaatagcatttttggctgggtgtggtggctcacgtaatcccagcactttgggaggccgaggcaggcagatcacttgaggtcaggagtgaggcaggcagatcacttgagatcaggagttcgagaccagyctggccaacatggtgaaaccccatctctactaaaaatgcaaaattagcctggcgtagtggtgcatgcctgtaatcctagctactcaggagactgaggcaggagaatcacttgaacttgggaaggggagattgcagtgagctgagattgtgccactgcactccagcctaggcaacagagtgagactctgtttcaaaaaaaaaaaaaaagggcggccgctctagaggatccaagcttaccgtacgccgtgcatgcgacgtcatagctcttctata

SEQ ID NO: 1442 - DNA, 813 bp, Homo sapiens
gaagaaaacgtgaccgtaaatatctgtaggatataggaaccagagagtagatggaacatgactagtaagagacttaaatccaggggacctcaggaggtaatacaaaagaattttgtattacggaattgtttacctagaatttgaactcgggagagaatccctgtgtaggagtatatttctgcaaagaaagtgcttaaagaaatggttcttccttcaatctgtttctttgatttgtatcagattagggaaggggaagctatttgttggacttttcattttggtaaaatctgaatgagtattgagaatggctcttgagacagtagtgcactttatattgctttccttactggtttttatgtatgatttattaataggcaaaaatctcattatggtgagcttaatgacaaatcagtttgttttaaacacattttattaaaatacatttagtttaaaaagtaaatttccaaactaccagctgaatacaactgtccagattcttgcaaggaaaaccaaatgctagagaaggccaggcgcgatggctcactcctgtggtcctagtattttgggaggccgaggcgggtggatcagtttagctcaggagttcgagatcagcttaggcagcatggtgggaccctgtctctacagaaaatacaaaaattagccggaggggaggcatgtgcctgtagtcccagctactcgggaggctacagcagggggatcgcatgggcctgggaggcggaggttgtagttagccaagatgacaccattgcattccagcctgggtgacaggagtgaaatcctgtctcaaaaaaa

SEQ ID NO: 1443 - DNA, 1694 bp, Homo sapiens
ccacgcgtccgaagtaatttggaaaattttaacattcctagtgacttaagatttgattaatagccttgttggtagtattttatatattcctaaatactattgtaaaatactccctcaataaatcctgcatgcctttaaaagtccctctcaaaataatctgtttattcggcaggtaattgccaatgtgttttttggtgggaatctttcatcggttttccacattgttgtaacagtgatggtcatcactgtagccacgcttgtgtcattgctgattgatgcctcgggatagttctagaactcaatgtgagtacgtgcaaagatttaccccttcactctaaaattctctttaaaagataatgattacatttaacataagatgtattttccttaacaaaagtgtcacttttgaagtgggaatcaaaatatgtttgtaatagtaaatatttcaatgatgattctgtgcactttgtgggactatatagttttaaagtagtggttgtttagagacatatggggtcgtcacaactgggtaggcagtgctgttggcctctagtggataaggccagggatatacatcccacaatgtgcaggtctctcacacaaaaaattatctgatccaaaatgtcaattgtgctgaggttgagaaaccctggtttagagtactttgcatatctcatttactataacacataaatgttactaaaaatagctataaattaagtggatttggactttgctgaataataatattctagtgaaatttatgagaaatatgaaaggattcaagttatatccattcacttgctatgacaaaatttctttttctttaaatatttttctttctccagatctttcttttatagtctgcactgccatcaaccaaatagaagtcctcataatatcacagttgaattaatcccagctctgtttcaactatcatgtatttaagttctgctttcagtttatcggcattttcctaccagagcaagtataaattccgttgcttctaccttcttgtcttctgtgtaaaactatttcccatttacttcccaaaatttatgttcagctctagtcaatctaattttttggcctgtgaataagccatatcaattctttccattattctttgtcctatctgctttttatttccgataatgattatttttctttcatttctgtccaaattttacaaaaactttaagatccagtgcaacttctaattcctttattcacattcactgatcatatatttattgagtaattactatgtgccacacaatagaatataaggatgaatgcaataagaaaggacctgtgcattctcacaaataaacataaaagttcaactgcaatataggtgatgaagacagaggaggccaggaacggtggctcacgctgtgatctcagcatttttggaggccaaggtggatggattgcttgagcccaggagttggagaccagcctgggcaacgcggtgagaccccgcctctacaaaaaattagccgggtttggtggcatgtgcctgtggtcccggctacttgagaggctgaggtgagaggattgcttgagcccgggaggtagaggtttcagtgagctagatgcaccactgcactccacctgggcaacagagtgagacccggtctcaaaaaaaaaaaaaaaaaaaaaaaaaaaaaaaaaaaaaaaaaaaaaaaaaa

SEQ ID NO: 1444 - DNA, 865 bp, Homo sapiens
ggcacgaggtgaggtgtgccttttaccttctgccatgattgtgaagcctccccaccacatggaacggtgacagattgactgggatcccctcgcacatcctcaacagctccccatcagaccggcagattaaccagctggcccagaggctgggccctgagtgggagcccatggtgctgtctctgggactgtcccagacggatatctaccgctgtaaggccaaccacccccacaacgtgcagtcgcaggtggtggaggccttcatccgttggcggcagcgcttcgggaagcaggccaccttccagagcctgcacaacgggctgcgggctgtggaggtggacccctcgctgctcctgcacatgttggagtgatggtgcctccagcaaccgctggggagtgtgtccctgagtcatgtgggctgaatcctgactttcactcagagcaggtggttttttgtgtaggtttgttttttatttttgatgatcttcagatggaaggagaaaacagggtttccactagacattacttgaaaggccagattactcagcagatctcccatgttggctcaacaattctttgtttttaattgcttgaagattgcattgttgtaattgttcagtttttaaatgtgtaatggcattttaatagactagtaaatcacagtggttcaaaatatatatccatatatatatatatccatatatatatctcatgtcatcacattacaggcaggtgtctcatatgttaaacatttacctgaatgttgtctgaggactgaactgtggactttactattcataatgataaaataataaaatgcgaattactatttataatgtgcctcactcatgagaaaaaaaaaaaaaaa

SEQ ID NO: 1445 - DNA, 337 bp, Homo sapiens
ggcacgagccagctttaaaaatataaatataattcttttcattttagatggaaatcatttatgtcacattactcataaatgtcgtggtggtgcatgcctgtaattcttggagatctctcaggcagatgtcacccaagtattctacataatatgatttccatctaaaatgaaaagaattatatttatatttttaaagctggtatactgcttttgcaagttattttttttttaaagcaaaggtattttaaaggacaagtaacaagggacagagtaactattaaattaattatcttcttttaaagtgcaaaaaaaaaaaaaaaaaaaaaaaaaaaaaaaa

SEQ ID NO: 1446 - DNA, 1777 bp, Homo sapiens
ggcacgagactccatggattttgatgacacgtggcaccctgccacccacccttctggggctgtccttcctgtcctcacagctttagcagaagccctgccaaggagtccaaagttttctggccttgacctgctgctggctttcaatgttggtattgaagtgcaaggccgattactgcatttcgccaaggaggccaatgacatgccaaagagattccatcccccttccgtggtaggaacgttgggtagtgctgctgctgcatccaagtttttaggacttagctcgacaaagtgccgagaagctctggccattgctgtttcccatgctggggcacccatggccaatgctgccacccagaccaagcccctccacattggcaatgctgccaagcatgggatagaagctgcatttttggcaatgttgggtctccaaggaaacaagcaggtcttggacttggaggcaggatttggggccttttatgccaactattccccaaaagtccttccaagcatagcttcctacagttggctgctggaccagcaggacgtggcctttaagcgttttcctgcacatttatctacccactgggtggcagacgcagctgcatctgtgagaaagcaccttgtaccagagagagccctgcttccaactgactacattaagagaattgtgctcaggataccaaatgtccagtatgtaaacaggccctttccagtttcggagcatgaagcccgtcattcattccagtatgtggcctgtgccatgctgcttgatggtggcatcactgtcccctcattccatgaatgccagatcaacaggccacaggtgagagagctgctcagtaaggtggagctggagtaccctccggacaacttgccaagcttcaacatactgtactgtgaaataagtgtcaccctcaaggatggagccaccttcacagatcgctctgataccttctatgggcactggagaaaaccactgagccaggaggacctagaggaaaagttcagagccaatgcctccaagatgctgtcctgggacacagtggaaagccttataaagatagtcaaaaatctagaagactagaagactgttctgtgttaactacacttctcaaaggacctctccaccagaggtagcttcaaactctccagcatgtaataattctatcacaaatctctcctgaggcttaccaacatctaaatgactttgcatttggggagattcaatgatttggtttgtaaagcaagggtctgctgcttggttttcccaggaaaaatgaacaaagatggagagagtccagaaacagaactacatatatctggaaggagccttctcctgaaaattttgcaggacagttccacttacctaaatcagatgaaacacacacacaaaaatgagtttgtaagcattcacaagggtgaaattcaactcacctgtgatttacttataaaattaatctcttcataggaattatgtgtggacttcatgagcctcaaggttttagagggatgtgaacctgcatgtatattttctgacagtggagagggctctggtgcattgtgtcaccaacagatctcctagaccatggcttattaccaagccctccacagtgcaaggggtgctactggggaatgggtgggtttaaatcctgcctctgccattcactagatgtagccttgagcatgttaccattagccctctgcctcagtttccctatttgtcaagccgaagtaaaaagcagtctggaaaaatcgcaaaaaaaaaaaaaaaaaaaaa

SEQ ID NO: 1447 - DNA, 1940 bp, Homo sapiens
catccgcggcgcgggagacgagccggccgtcccgggccggggggacccgcccgccatggccaccaaggctcgggttatgtatgattttgctgctgaacctggaaataatgaactgacggttaatgaaggagaaatcatcacaatcacaaatccggatgtaggtggaggatggctggaaggaagaaacatcaaaggagaacgagggctggttcccacagactacgttgaaattttacccagtgatggaaaagatcaattttcttgtggaaattcagtggctgaccaagccttccttgattctctctcagccagcacagctcaggccagttcgtcggctgccagcaacaatcaccaggttggcagtggcaatgacccctggtcagcctggagtgcctccaaatctgggaactgggaaagctcagaaggctggggggcccagccagagggggctggagcccaaagaaacacaaacactcccaacaactgggacactgccttcggccacccccaggcctaccaaggaccagcaactggtgatgatgatgactgggatgaagactgggatgggcccaaatcctcttcctactttaaggattcagagtcagctgatgcaggcggcgctcagcgaggaaacagtcgtgctagttcctcatccatgaaaattccccttaacaaatttcctggatttgcgaaacctgggcacggaacagtatttgttggccaaacaactagcaaaacccaaagagaaaattcccatcattgttggagattatggcccaatgtgggtttatcctacctctacttttgacttgtgtggtagcagatcccagaaaaggctccaaaatgtatggtctaaagagctacatcgaatatcagctaacacctactaacactaatcgatctgtaaaccacaggtataagcactttgactggttatatgagcgtctcctggttaagtttgggtcagccattccaatcccttctcttccagacaaacaagtcacaggccgctttgaagaggaatttatcaaaatgcgcatggagagacttcaggcctggatgaccaggatgtgtcgccatccagtaatctcagaaagtgaagttttccagcagttcctaaatttccgagatgagaaggaatggaaaactggaaagaggaaggccgagagagatgagctggcgggagtcatgatattttccaccatggaaccagaggcacctgacttggacttagtagaaatagagcagaagtgcgaggctgtggggaagttcaccaaggccatggatgacggcgtgaaggagctgctgacggtggggcaggagcactggaagcgctgcacgggcccattacccaaggaatatcagaagataggaaaggccttgcagagtttggccacagtgttcagttccagtggctatcaaggtgaaacagatctcaatgatgcaataacagaagcaggaaagacttatgaagaaattgccagtctcgtggcagaacagccaaagaaagatctccatttcctgatggaatgtaatcacgagtataaaggttttcttggctgcttccctgacatcattggcactcacaagggagcaatagaaaaagtgaaagaaagtgacaaactagttgcaacaagtaaaatcaccctacaagacaaacagaacatggtgaagagagtcagcatcatgtcttacgcgttgcaagctgagatgaatcactttcacagtaaccggatctatgattacaacagtgtcatccgcctgtacctggagcagcaagtgcaattttacgaaacgattgcagaaaagctgaggcaggccctcagccgctttccagtgatgtaggacagaacgggccttgaagagaatgccgcgtgctttctcctgacttggggcaatgcaattcaaaactttttttcccctattattcagaaaaaaaa

SEQ ID NO: 1448 - DNA, 1469 bp, Homo sapiens
ggcacgaggaaaagcgttctaggctttcaaagtaacattgcatgtgaggatggagaatgataaaacgattcctgccttcaaggcatcgtcccggtgtttgtcagctgtggggcaacagcaccctctgtgtcagcaacctgcatgaagagcatcatccctgcaagtcctcaaggcctggggaggcctcatcccctcctcatttcagcaacagcacacaggacaatacgctctagaagaactctttgacttaaaggtatatgattgtatttgttcctttaacatgaacgtgagtctggagaaacagctacggccatcccagccctggccaaggggaaaatgccggaagactccagggtgggaggaagcgcgtcccaaggcccaggatctgcgaggcgacttggggaaaacgcaggcaggacctgctgaagctcacacccgtggaccacccagactgcctgccgctacaggatgccctccgcatctcccaggacttctttccggcatcagtgtggacattgaccccactggactgcagtcacagtggactcccaaggggcaggatccacctctgatgttcagtgaagactaccagaaaagtctgctagagcagtaccatctgggtctggatcaaaaactcagaaaatacgtggttggagagctcatctggaattttgccgatttcatgactaaccagtgtggttgaggagtgggcccagggcaccttcaaactcaaccccaatgatgaggacatccacacagccaacaagtgccacctgaaggtggtcacggacctcaggttgtggatgtggcagacctgcttcacgctctcgggcctcctctgggagctcatcaggactatgggggattgggcagaggtcaggttcctgctccagcgtggctcctggactggcgccagatgctggccctgggggtttcaatccaagcataattcagtgaagcatgtgtttggcatgggacccagctcactgttttaggtcagcccaagactaccccgtcggtcattctgttcctgccgtcctgtgagagccccaagccaacaaggcccactggtgtgtctcatgaataactttatccgggaatcttgatggtgacctggaaggcagatggtaccctcatcacccagagcgtggagaagaccacgccctccaaacagagcaacaacaagtacgtggccagcagctacctgagcctgacgcccgagcagtggaggtcccgcagaagctacagctgccaggttatgcaagaagggagcaccgtggagaagtcagtggcccctgcagaatgttcataggttccagcccccaccccacccacaggggcctggagctgcaggatcccaggggaggggtctctctctgcatcccaagccattcagcccttctcgctgtacccagtaaaccctcaataaatatctttgtcagccagaaaaaaaaaaaaaaaaaaaaaaa

SEQ ID NO: 1449 - DNA, 1013 bp, Homo sapiens
  SITE (10): n equals a,t,g, or c
  SITE (13): n equals a,t,g, or c
  SITE (41): n equals a,t,g, or c
  SITE (150): n equals a,t,g, or c
gaagagcatntcntccgtggcagaaacctgaaaatgccccnggggagacacatgcacaagacagtgagtgatgcagccatttcccacgtatctcacaatgtacttctctggtcttactaggactaaatgagtatctcagtccataatcanagggagaagaaccaccacagaccacatacctggggtcttgaaaataattccatgcatgtgggactttcagaagctgtcccatgtctgtccagaagggccccacaatataatggggggactttgtatgtggctaagcatggagcaggggcaggatkttcagtcccactcactcccttggccaagtgcccttgtgcagtgaacaaastgcacaaccatgctgggcagaagcattttatatcagtccccttcggacttagtctcacaggcatcatttgatgggggatgggagatgaagtggttcttcgttttctagatactttattctataagttggatcacctcaagcaaatgcgtgagtgcagctagccaagttctctatctcacagtcttcatatggctggctgtcgctgatgagtgagtgagctacgaaatcagcttaaagcacaacatgttattttgaatttgaataaaataggraaaggcagagtgcattgtgtgaccatggggtaagtaagacactctccctttctccttctcagttttcctgtcataaaaggacmaactactatctaaggtctccgtagttaaaatctttttgttgttttttttttatttgagacagtttggctcattccccaggctggagtgcaatggtgctatcttggctccctgcaacctgcgcctcctgggctcgggcagttctcctgcctcagcctcccagctactcgggaggctgaggcgggagaatcgcttgaacctgggaggtggaggttgccgtgagccgagatcgtgtcactgcactccagcctggcaacaagagggaaactccgtctcaaaagaaaaaaaaaaaaaaaaaactcgag

SEQ ID NO: 1450 - DNA, 1265 bp, Homo sapiens
gggcgtgcaggaattcggcacgagctgagaccctcaccccatcacaaaacaagtcagacagttatggggcgggcacagagggtcaggttctgtcaatggcggatggggggtgccctgggttgggcatccaggggtcctgggtgaagttgatctgcccggacctctgtgacctctttgcccaccatccccagcctcacacgccaaggattacacagtggagaatctcatccgcatgggcatggcaggcttggtcctggtgttcctcgggattctgttatttgaggctcagcacagccagagaaacccccaagatgcagccgggaggtgaacagcggagaggacaatgcacccttcagcgtggtggagctcagggacagatctgatgatcccagaaggctctggaggacaatctaggacgtccagaggggggtgagatttcaggccacacactgtggaaggtaatcatgtctgatcacaaattttgggtctccaccttacttccaatctatgttgtgaatgcccagttgagacccacggaaaagagctcatgggtgagtgtgaagtgcttctctgtcttaagttcccagagatccttgcctcttggaggccagcaaacactaactcttgaggaattcatgacaatatcatctgattcctccttcccagcttgtatggcagtctcccaccctcatgtgttcaatctgatgatcccaggargttctggaacaaaatctacagcctatgctttctggactatctgtcgatcattcctgaagagagggatcaatgttgaggtattcatttcacmtgatgaaaatgacaatatcaaatgtcagaggtagtagggctcacgtagaaatccaatacatccatggtaggactgcaaattacttgaatcaatttggggaaaatatcagaagtacccagtgaaaaagaagaaacatggccgggcgcggtggctcatgcctgtaatcccagcactttgggaggctgaggcgggcggacacgagttcaggaattcgagtccagcttggccaacatagtgaaaccccgtctctactaaaaatacaaaacattagctgggcgtggtggcaggtgcctgtaatttcagctactcgggaggctgaggcaggagaattgcttgaacctgggagacggaagcaagttggcgccagttggtgcagtgagccaaggtggcgccattgcactccggcccaggtgacagtacgagacttcatctaaaaaaaaaaaaaaaaaaaactcga

SEQ ID NO: 1451 - DNA, 2122 bp, Homo sapiens
  SITE (845): n equals a,t,g, or c
  SITE (848): n equals a,t,g, or c
  SITE (1100): n equals a,t,g, or c
  SITE (1745): n equals a,t,g, or c
ggtgcgtgcgtgcctgatacacatggagccgggctgcttcacacatctggtgaggtcgttagaaggtcagataaagaagagggcggacttgctaaccaagctgttagaagaaataatgggagagaacattccttcatttcaggaggacacagagcaggctaggtctgccgcgaagactcctatagagagaagagtattcttaaactagattctgatggacgcaacaccagttgcataatggttatgacaatcagtgcccgggtttttgaccaggcatttcatggtcacccccacgctaatggaaagtttctggatcttattttgttatagtgagtgatttgtagttttcagaacggaggccaggccaaacgtattccaaatgaaaagagaataggtgtcaaatgctwwaccttwtatcttcgtgttggcactgttgccatccccgccctctcccgacatccccgcccttgaccagcatcyctggccttgcccagcattgtctatgtattggcactcttgccatccccgccctttcccagcagagtctcactgtgtcaccccggctggagtgcagtggcgagatcttggctcactgcagactcactgcaacatccacctcccgggttccagtgattctcctgcttcagcctcctgggtagctgggattacaggcacgcgccaccacacctggctaatttttgtatttttagtagtcacagggtttcaccatgttggccaggctggtcttaaactcctgacttcaggtgatccaccctcctcgtcctcccaaagtgctgggattacaggcgtgagccaccatgctcagccctactcttgtatttttnttnttttttttttttttgaratgragtcagagtctcaccytgttgcccaaggtgragtgtascggcttgatctcagctcactgcaacctccccytcccaagttcaagcgattctctgcytcagcctcccgaatagctgggattacaggcatccgctgtcatgcctggctaatttttgkatttttagtagagacgggggtttcaccatcttgaccaaactggkcttgaactcttgacctcgtgatccagctgcctnggcctctcaragtgttgggattacaggcgtgagccaccatgcctggcctcttggaatatttaataagctaaaaaattcttatacacaggtagattaattaggtagccaggagtggcccctgaaagtatgtctggcaaaacctagaactgcatcctagccatcactgtaccttctgccctccctgctgtctcctctgccagttacagttaaaaggttgtgggtgaggacgctgggcagagtcccaggcgtctgctgtcagctccccagcccggcctgcctgccgagccatctgggcgtcccacggtggagagtgtggtgcttgtgacgcggtggtgctgggagccatcctggtggcagatgtgggctctcactgcaagtcagtgtaagtccccagggactgtcagcagcacgtcctgctgcccctctctctgcagaagccctggtaacctgcgtttggaaaaatctctaaggatttctgaggagctgtcaggccatgtccttgtccaccctgtgtggggcacggcttcgacatggctctgctcccgtcgtgggctgagaaggagcaggtggggctgtgccttggaaaggaggccctcccgacatgcctttgtgcgaggtccctgtccatgctgtctccatcccggnrccttacggcgatgggtggccacagagcctattccaagagtctggtttagggctgggtcttcccatcttcacctctgagtcttaggcgatgcgtgaccacgcagccccttccaggagtctggtttagggctgggtcttcccatcttcacctctgagtcttaggcggtgcatgaccacgcagccccttcccggagtctggtttagggctgcgtgctcaagagtctggtttggggctgggtcttcccatcgccctggaggaggcttttgtctcatctcatgattcacattaaactctgtgccatgaagcttaaaaaaaaaaaaaaaaaaaaaaaaaaaaaaaaaaaaaaaaaaaaaaaaaaaaaaaaaaaagggcggcc

SEQ ID NO: 1452 - DNA, 643 bp, Homo sapiens
ggcccttttggttagcatcattgactaatactgacccaaacagctctaattcttaagccccctccaaaaaaaaaagcatacatatttttatttgaaatgaaattattgatagtgattttttttcatttcttgtaaatatttgcaccaggaagccaaaggggggaaaaatcatgctatctgtactagaaaatttaacctgtattactgttatctaatatgctttagtggtcttcagactattcactaattaagcatgttctttaataccaccaaataatattcattgttatgcacaacaactgcaaagagattgagtcccaagatctacaaaggattgtgagagttggtggttgagatttgtcacaatcagaatgggactcaactggtacccacagtcttacatttactcaaatttaatccagttcaaaattttactactgcatgcttttattcaaatgaaccacaaatgcatgatttaaagactgctgggattacaggtgtgagccaccgcacctgaccttaaaccagcccttttggttagcatcattgactaatactgacccaaacagctctaattctcagccctactccaaaaaaaaaaaaaaaaaaaaaaaaaaaaaaaaaaaaaaaaaaaaaactcgag

SEQ ID NO: 1453 - DNA, 608 bp, Homo sapiens
agaactagtggatcccccgggctgcaggaattcggcacgagctcaaactttaaatgggtaagatgcccggctaattttttgtgtttttagtagagacagggtttcaccgtgttagccaggatggtctcaatctcctgaccttgtgatccacccgcctcgacctcccaaagtgctgggatcacaggcgtgagccaccacgcgcggccagggttctttttgtatgcttttctctctgctgcatttgggattttgtgcatatgagtctaacttaatacttttccagatggctatccctatccctgggcagttggttaaaaagtcgtttttcccctcactgatttgggtcgcagggactgggcctgttcctgtgtcttctggtgcttatcccaccctgttttcattacagtaagtttcccctgagctcataaagctggtcctctttcactttcttttcatggtttttttggctgttacttgcttgttaatttttccatatgagcatggtagttccagaactgtggtttttactgggatcgtattaaatttacaaattgtatcggaaaaaaaaaaaaaaaaaaaaaaaaaaaaaaaaaaaaaaaaaactcgag

SEQ ID NO: 1454 - DNA, 1277 bp, Homo sapiens
ggcacgagggcaagcgcgctgcggttccggtggcgccatgtcgttctgcagcttcttcgggggcgaggttttccagaatcactttgaacctggcgtttacgtgtgtgccaagtgtggctatgagctgttctccagccgctcgaagtatgcacactcgtctccatggccggcgttcaccgagaccattcacgccgacagcgtggccaagcgtccggagcacaatagatctgaaggcttgaaggtgtcctgtggcaagtgtggcaatgggttgggccacgagttcctgaacgacggccccaagccggggcagtcccgattctgaatattcagcagctcgctgaagtttgtccctaaaggcaaagaaacttctgcctcccagggtcactaggcgggcagcccacacccaccccagacggccaccacactgaggccacacgttggccattccaccttggagttggaaccctgggcgtcgagacaggaaggcagggcgcagtggttgaaacatcaggacactcccaaggccccggctctgaacaagaccttttcgtttcttggaaaagagactcatttgctgatggttcatgccttctgctgggacaggcctgggctgtgcagccacactgtcggctgacttagccccctgctcactctaggtgcctccaggaggtgagccctgggtgcagctggtctctgaatgacgttacaccctcaccttcttttcctggccctgtctctggactctcccctgtgaggcccaattccaagacagactctcgtcctcaccgaagcttaggcccacatctcccaggctgcttaggagacagaatggaaacggaggccgcccctgccagccgccctggccctggtcactgcatgatccgctctggtcaaacccttccaggccagccagagtggggatggtctgtgacctgctgggaaggcaggctgatggggcacacccttggcctctcgtccacgaggggagaaacctaaaccctgtttcacaatctgtgcggaagtagcttgcctcacttctgcttaggaaagcggctgttgctccataactctaaccagcacagggctgaggcctgcagtgcacacctgcagggaggcccttcccaaggtgtggtgactgtgccttactgtacatgctcggaggcctggccatataggagggtgggtgatgctgaaatcaccccccatcttaagtaattactttctggagtaatcaggtggaaatccatagacaaatgaaaaaaaaaaaaaaaaaaaaa

SEQ ID NO: 1455 - DNA, 1982 bp, Homo sapiens
  SITE (666): n equals a,t,g, or c
ggattgtaacacatgacaaagtttgagaactactgacaggaagagtcctgctgctgagttctaggcccagttctgtcactggctcactaaatgacttcaggcatgtccctctcctattttgaacttcagttttctcttctgtgaaatgaaagccttggactaggcagcgtctaaaggctctgtcactccgtaattgtgtgactttggtaactttgtttgacttctccttgcttaagttttctcatatgggtatggtaaggaaaatacctacctcacaggattttctaacaattttgtgattattaagtatgatgactgatgactaatatatgacagccagctcttacacagtgctttctatatcctggactgttgtaagtgcttttaatccccgcaacaatcccatctccattttacaaatgaaaaatagaggtcacacggctaatacgtgtcagagtttggattaaaacccagaaaaatctgtccccagagacaatgattttaactagcatgcccttttgctcaataaatgttaattccctcaccctttccacacacacacagtctagctgaccattcatagacaataatcccactttcacagtccatccaacaagatcttaaaaaaaccatgaaaatctctaggtttcttttgcaaatagtttncaagcatttaaaaaaaaaaggtggggggcggggagggagtggccaaaatggctgactaaaagcagctaggatgagtggttctcatggaggggaaggaaaggggcgagtaaatacagcgccttcaactgaaacatccaggtacccacattgggtctaatcaaggaaacaactcgatccacagagaatgaagaaaagcaaggcaggatgacagcccacccaggagcaacatggagacagaggaacctcctccacccagggaagtcgtaagtgaatgtgcgatcctgggaaaccacgctcctcccatggatccttgcaacccttgggtcaggagatcccctggtgaacccactccaccagggccttcagtctgacacacagagatacatggagtctcagcagagtagccgcttgagcacgtgcagagacccagcagctttacatactccggccctgggtttcccagcaaaagtaactgcaactcctgcaaagcgggagattagacccctgtacatacccctaggaaagaggctgaatccagggggccaagcggcacgatctgcgggccccacttccactgcacctcacaggataagacccactggtttggaattccagccagccaccagcagcagtgttgcacctacctgggacggaggtcccagggggaagggcaggctgctctctgggacagagctcccagaagtggtaccccagaacagcacagcacagctgctcttcagaagcatggccagactgcttctttaagcaagtgcccaatctgttcctcctcactgggtgggacttttcaaccaaggcctccagcaacccctactggtgttctctggctgacagagatttgaattctccctgggacagagttcccggagggagggaggggccaccatctttgctgtttgggcgacttagctgttccggcctccaggctttggagagcccacaccaaccaggggtggaagcagtgccccagcacagcacagctgatctgtgaaagcatggacagactgcttctttaagcagttccctgatcccgttcctcctgactgggtgagacctcccaaccagggtctccagccttgtcctgcaggcgcatttgggctggcaacaggtctgtacctcgctgggccggagctcccagaggaagaggcaggatgacatctttgctgtttcacagccttcactggtgatagctccaggtactggaaaatccaaggagactaggaactggagaagaagcccagcaaagtacagcagccctacagaaacatggccagactgttaaaaaaaaaaaaaaaaaa

SEQ ID NO: 1456 - DNA, 1600 bp, Homo sapiens
  SITE (95): n equals a,t,g, or c
ctccattaagaattcattactaatagcagaagattttaaactatctctgttggtagatgaagtgattcttgcatagatagagagagccatttgtnaccacagctggctaagtccccctccttccttcacttagtctgtattagtttgctagagctgccataacaaaatatcagagtctgagtagctttaacaacaggaatccactttctcacacttctggaggttggaaacccaagatcaaggtgctggcagggtgggtttcacagagagctttcaaggaaggatctgttctgggcctttctttttgacatgtagatggctgcccttttattgcctcttcatctgtgtctgtgtgctcctgatgtctctctctgtgtgtccaaacatcatcttataaggacaccagtaggaacggattaggtcctaccctaatggtcacattttttacttgattttctctttaaaggctttatatccaaatacagtcatggtctgaggtacaaggtgttagggcttcaaacatacgaatttgtgggagtcaattcagctcataacatagtccatgagcttgtactaattggaagtgaggattaggtttttagttgtttccttccttccaattactctagatctttctccacttccagttgaccaatcccttcatgctgccagccccacatttgacttgactgcctttacctacactctccagtctttgttattctttccttcctcacatccaaatgtaactctgccacaacccactagacctctattaggaatcatttgaaaactaaaaagtaaaacatctatttgacccccttgacccatgctttctggctgcatattaaaaataatagcaaaaatcatgattacttttgcaccaacctaatattaaaatcatctggggtgttttataaaaatacctatgtctgggccctaataccagatcttctggtttggttggtggagtgaggcccgtgttcctgatgatctgaccactctcatacatttctgtctgtgcttctcttagcctaaaatgctctgtgctttttttccaactcatgaattcttatctattcgaatttataggtggactgtcacttcctcaagaaagcctccatcagttaccccagggtagtgtattagggtcagtctagcagagcagtaggtaacgtgaactaaaggcatagagacctgagtgtgaatgtcttactttgatctttcttaaccaggggactttgaacattttcttaagcctgttgagcctcattgkggtaatcatgaaaagggaaagtcttaaagcatgtcacatagggttgatgtgagaattaagaaaattaccatatgtatgcttcctagctggtagtacatgtccatttaataatctctccttctggtggcgggcacctgtaatcccagctacttgggaggctgaggcaggagaatggcgtgaacccgggaggcggagcttgcagtgagccgagacagcgccactgcactccagcctgggcgacagcgagactccgtctcaaaaaaaaaaaaaaaaaaaaaaaaaaaggaattcgatatcaagcttatcgataccgtcgacctcgag

SEQ ID NO: 1457 - DNA, 1818 bp, Homo sapiens
  SITE (1007): n equals a,t,g, or c
cccccgggctgcaggaattccccacacctagcctacattctttttaaattttttgtttttagttgacctataatacttgtagaaagacaaagaatacagtgtgatgtttcagtgcatatatgcattgtataaggatcaaatgagggtaattatatccatcactaagcatttatcatttatttgttgtggtaatattcaaaatcttctcttctagctatcttgaaatgtctatcacattgttatttgctgtactcaccttactgtgtaatggaacaccagaacttattcttcctgtctgattgtaacttaatacccattgaaacaacttctcatggtcccccccttcccccatactccccagccataggtaaccactgttctattctctgcttctgtgaaatcaacttttaaaattcaagggtgaaattacacagtgtttgcctttctgtgccttgctatttcacttaacataatggcctttaggttcatccatattaccacaaacgacggaagaatattctgtttataatgttccattttgtgtgtgtgtatacacagacacacggcattttctttgtccattcatctgtagatgggtgtttaggttgattcatgtcttgactattgtgaatggcactgcagtaaacatgggagtgcaattatctcttcaatatactgatctcatttcccttttgatttacacccaaaagcatagggaacaaaagcaaaaacagacaaatgggattacatcaaactacaaagcttctgcacagcaaaggaaacaaacaatatagatcgaagagacaacctgaagaataggagaaagtacttgtaaactttatgcatctgacaaagagttaatatccagaacatataaggaactcaactcaatagaaaaaaaattcagttaaaaaatgggcaaaagacctgcgtagacatttctaaaaagaacacatacaaatggctgacagatatatgaaaatatgcttaacatcactaattatcangaaaatgcaaatcaaaaccacagtgagatactacctcaccccagtcagaatggctgttctcaaaaagacaaaggataacaaatgttgggaaggatgtggagaaaggggaactcttatgcacttttgatgagaatgtaaattagtacaactattatgggaaacagtatggaggttctcccgcctcccccagaggcaggttctctctctgttgcccaggctggagtgcagtggtgtaatcatagctcgcttggcctcaaacttatgagctcaagtcatcctcttgcctcagccttctgagtagctgggactataggtgtgtgccacgtcatctagttagttcttaattttttatagagacagtgtcttgctatgtttcacaagctggtcttgaacttctggcctcaagcaatcctcctccattggcctcccaaagcactgggctttataagcatgagccaccctacccagctggaggttcttcacaaaaaaagattggctatatatccaaagaaaataaataatacattctttcatagcaaaagagaggatcagcatatattaaagagtgcttattttaccactgaacaagttgtaaaagtagacgttcttaagctcatgagcctgtggtaaatactaggtagtcactcaaaatgtgtagatttcaagcatactttggactttggaagtagacacatgagattgtagcacggaatcctaaaatcctaggccaaagaagacttttagaaatcatagttcatactgtttcttttatgcaggatttagctaatccatcttagaaaaaaaaaaaaaa

SEQ ID NO: 1458 - DNA, 1264 bp, Homo sapiens
  SITE (1101): n equals a,t,g, or c
  SITE (1136): n equals a,t,g, or c
  SITE (1152): n equals a,t,g, or c
  SITE (1156): n equals a,t,g, or c
  SITE (1159): n equals a,t,g, or c
  SITE (1170): n equals a,t,g, or c
  SITE (1175): n equals a,t,g, or c
  SITE (1197): n equals a,t,g, or c
cgtgtgtgtgtgtgtgtgtgtgtgtataatcattgataaagacaaactaattttttgatctaaattctaagttaatttcgtcacttgttatgtgtgtcttatttttattttgtcagaccacagataatttgtttcttactccttgactaccttcttctttttagatggccaaatgtgatgcttgtaagcgacagggtaaactcagtgagtccttgaaatggcgaggggaaatgaaacatttctgtaacctgctttgtatcttgatgttctgtaatcagcaaagtgtatgtgacccgccttcacaaaataatgcaggtaaaattaaccttaggtactgaatggagtctttggtcaatactaggaactactgttcttttacagatcaggaactgtgtaaacagttgtcattaatttcatgaaacctcagtttccttgtattctgtatcaataacatttagctttttttgttgaacaccttatttcactgtcgtccgtgtgaagagaccaccaaacaggctttgtgtgagcaacaaggctgtttatttcacctgggtgcaggcggtctgagtctgaaaagagtcagtgaagggagatggggtggggccgttttataagatttgggtaggtaaaggaaaaaggggggttgttctctggcgagcaggagtgggggtcacaaagtgctcagtgggggagctttttgagccaggatgagccaggaaaaggaatttcacaaggtaatgtcatcagttaaggcaggaacaggccattttcacttcttttgtgttggaatgtcatcagttaaggcaggaaccggccatctggatgtgtacctgcaggtcagaggggatatgatggcttagcttgggctcagaggcctgacaccttagattaaagctgagtaaaaatgagtttttgattaaatagatttctttgagaatattgaatcaaataaactctgtaagaacttaaatttatgggaaaggataacagttaatggtttgtaattgagtataattggcttccttaaaaaatcctttgagactacttataacaaaagacataaagtcaaaatcacaggccttttaaatataccatgtgcangccagatgtgatggttcatgcctgtaatcccaccncctttggaatgctgangtgngangacggcttgangccangagttcaggggtggagtgagcngtgaccacagcacagcaatcccagctggatgatatagtgagaccctgcctctaaaaaaaaaaaaaag

SEQ ID NO: 1459 - DNA, 1366 bp, Homo sapiens
  SITE (758): n equals a,t,g, or c
  SITE (858): n equals a,t,g, or c
gaattccgtaacataaactgtggttctcagtctgttagctattcagatttttcacaatggtttttgatacgtaatgagaaataacctactaagtaaataggaccccttgctcaaagaagtgtgaaaagagcatttccttgctttcctgacatgctaggaagcaaggcaagcctaaggattcttctctgcttattcttttttctccctaggcacagttcgagtgacaactgctgcccatcttgcactgctggtggctaaaaacatctccttctttcccagcaatgtggagcaattttctgagggcaacattgatgtgtggtggattgtgcatgatggggggatgctatgctactaccattcctactgaaacagcacaaggtattttatacaactttttttttacaaaagtctttctcccttctgtcctggttcacaggacagacaaattcttcctctgattataatagtgttggggtttagaatcagaagagttggaagttattctaggctttcccatgatcccactttcaaacaagagaaatcattgtctttgtatttgatacctacttatctccaagtgaaattcagccaattaataaagttccatatgagccctaggggaaaacaacaagtgaacacatctttttttaaaaaatactgaaaacttaaggtatatgtatatgtgtgtattgcacgcatatatgcgctcattccgtggtaagactaattaaatgagatttaaaatagtaaatatatantctgcatgttgtcattgatacactgtctgaataaagtaccctcttaacgtatcgtgaaccatcttttcttttgccagtgttttcttgttatgaaattaangactccttaaaactgtattaaatgtggtgtttagtcaatcttttgccctaatacaataacatagcaagtrggaagctaggacaaatagccttatactacatatagcaaggtcttctagmccacaatgtctaatgtcttaggaaataaccttttttgcctccttgctctaatttttcacatgtgtatgtcactctctcaggtgtggcgaaagtgcagcatacggatcttcacagtagcccaattagaagacaacagtatccaaatgaagaaggacctagccaccttcctatatcacttacgcattgaggcggaggtagaagtggtggagatggtgagaaagctgagtttgagatacaagaggttcattcccccattcctctccctgtcttccttgaatcttttctggtttgggaaatttttcagatctaaatgtggattaatcccctagtgccaaaaaaaaaaaaaaaaaggaattcgatatcaagcttatcgataccgtcgacctcga

SEQ ID NO: 1460 - DNA, 2077 bp, Homo sapiens
  SITE (936): n equals a,t,g, or c
aattcctaagatgatagcagtaatgaagagaaatggaccttgagtttcagaaacttgtattctaatggaccttcaaaagatggcaagtattgtgtctggaattggtgggttcttggtctcgctgacttcaagaatgaagccacggaccctcgcggtgagtgttacagttcttaaagatggtgtgtctagagtttgttccttcagatgttcagatgtttctggagtttcttccttctggtgggtttgtggtcttgctggcttcaggagtgaagctacagaccttcacggtgagtgttgcagctcataaaggtggcgcggacccaaagaatgagcagcagcaagatttattgcaaagagccaaagaacaaagcttccacagcgtggtaaggggacccgagtgggttgctgccgctggctcgggcagcctgcttttattcccttatctgaccccacccacagcctactgattggcccattttatggagagctgattggtccattttacagagagctgattggtccattttgacagggtgttgattggtgcgtttacaatccctgagctagacacagagtgctgattggtgtatttacaatcctctarctagatgtaaaagtctccaagtcctcactagattaactagacacagagcactgattggkgtgtttacaaaccttgagatagacacagggtgctaattggkgkatttacaatcctttagctagacataaaggttctccaagcccccaccagattagctagatacagagtgctcattggtgcatccacgaaccctgagctagacacagagtgctgattggtgcatatacagtcctccagctagacataaaagttctccaagtcgtcacctgactcaggagcccasctggcttcgcctagtggatcccgcgccagggccgtgggtggagctgccnaccwgtcccgcacggcgcctgcacttytcagcccttggcagtcaatgggactgggtgccgtgragcagggggtgatgcctgttgggraggctcggtccatgctggagcccaccgccagggggctcggccatggcgggctgcaggtcccgagccctgccccgcggggaggtggctgaggcctggcgagagttcgagtgtggcacgggcagtctggcactgctgggggatccggcgctccctggcctgggtgctaagtccctcactgcccggggccggccggcttctctgagtgtggggcctgccaagcccacgcccacccagaactttcactggcccacgagcaccacacgcagcccgggttcccacccgtgcctctccttccacacctccccgcaagcagagggggctggctccatacttggccagcccagagaggggctcccacagtgcagcagcggactgatgggctcctcaagggtggccagagcagacgccaaggccgaggaggcgctgagagcgagcgagggccgccagcacgttgtcacctctcagtatgagtgtgttgtagtgtatgtgtgaaagggagttttgcaatgggagtatgggatgatgtgttagtcatagttctacagagaaatagactatctatctatctatatctcagagagagagagagagagagattgagtgtaaggaattggctcatgcaattatggagaccaagtgccaagatatggagacagcaagctggagactcaggagagctgtggcgtagtagtttctgtccaagtccagaggcctgagaaccaggagagccagtagtataagttctagtctgaaagctggcaggcccaagaccaagaagagcccaagtttcagtttgagtcccgaagcaggaaaagactgatattccatttcaagcagtcagacaagtcttatggcagggtcagccttttagttctcttcaggccatcaactgattggataagggcgactcacattagggagggcaatttgcttccaattcagctgtttatctcatcaaaaaacaccctcacagacacacttggaataatgtttgaccaaatgtctggacactttgtgccccagtatcaagcttatcgataccgtcgacctcgag

SEQ ID NO: 1461 - DNA, 1993 bp, Homo sapiens
ccagatatcaagataagaaaggtttgaaatgctcagtgttaaaataggatcacaggtcattgtaaaacagtcatttaaacaaagtgataagtcagtgatttttaaaaagtcaaaacctgtgctctttgattagcaggagactccatcaaagagtaagtttgaggagactgtatcaaagagtaagactccatcaaagactcacttttccaaataagacctaataaaggcagcatgagctcaagaaaatctctctctccctccttttcttttgtagtttactcaaaagtaaacaaaaccttttactatctcctgttaacactacctgaaaatcttgttcaaaagagaaaacgaaatcctacctttgtatcagtatattattaatattaaacctaattttaataaaatcttacaataaacagatccatctgatcccagtcagctttgaccagataagattttcatgaatcttttataaactcttacaattttaatttttctttctccaactttttagttttagctatatcatgtaaattttgaaacaatctttaacctctaaactaggcaaaattacttttcctttagcaaaactcacaccctcctctcttttttataactttcttcaccaaaaacacatcctactttcattgtatactttgcatacaagagtgtttcccatgtatctagtacttttaattacatatattaactacgattttaactcttagtagttctaatttcaagtgaaaaacctagaaagtaagtagtagttaactggtttatgtctgtatttgtagacaaatcatttcatggtttcgtagaaagatatttctataaaatataattgatgcctacttttttgtttattaacagatctaaagattattaacagatctaaatatatttagcttttttataccatgtaaaaacaaaataccaaattatgtaaactaaactaaaacatatctaataattaatgtttttgtatcttaatgtatgtagaaatgactcaaacattttatgattatctattactttattaaacctaacatgacttcaaaactttaaactactgaaaagaattttgaaactgcaacacagatacccttcctaatgtcttcctcagtcatactgagtcgcaactacccacgtggcacccaagtatgattatgaaggggcagggcctatctgagtcctgattttacacacccataatggagcccaggacagaggacagaactgtgaagataatgtctgactcttcccaccatagccaggagacaacagccaggccagagggagtaccacatatgtctgcagtcctcacttgttagagcccagaatctaatgagtctaatacataagctcacagacaagtcaaataagcatcaaacatatcacagaagcaatagttttatgagcttcagacatctagtagagaaagcctaaacctttctgaccagcagacccaggcaaaaatgtctgattgtgtttaaaactgacaagtctgaagacattctaattttattttaccaacaattaaaaagctaattttatttctcaaagattactaaaatcacattaacttgaaaaatatttgggattattaagctatgagcattaatttgtcagtttggtaccatgtaaacaatatacaaacagatctgtacacatatatacataaaaatacaaacataagtgaagatttcatagctttgatataaaaattctagccatgagacaagtaaaactcgctattttaaaaggacattggattcaaagttcataaatagaacaagttcaagtttattgtatatgcctgaagcccttaccaagttttaaataacaagtagcaaatttatatttcaagcacagagaatttaagctttccaaaaggccaattcaattttacgttatctttggcaaaaatcatgttaacagaatccaaaagagtaaaacataaaggcctttcttctacaaaaaaaaaaaaaaa

SEQ ID NO: 1462 - DNA, 1932 bp, Homo sapiens
cgcctccatgggtctgcaagacttttgctccgtccagtgccaaagccttagcagatcctggcatggatgcctcaggctgatggcaccggccttgcaatgagacgagaacccaaagctcagttatcagtgtcctgtcttgctgctatgagctttttgtactgataacgaccatttctttactgagcgccttctgggttctggcagcatcctcggcacccacattatataatttaaccgtcacaacggccagcccaggggtgctgctataccacttcacagagaggaaactggctctcagaggcttcagagcctgtccccagcttcaggtgtggctccctgagttgggggcttcctaggtgaggtccgaggaaacctgctggccaagtgacctggcagggtgtggccagtgtggccagggccgccgagcttgctttctttccctgcagcaggaacccttctggggctgtgatcctgcgatggtgcctgggtgggagtgggggtggggggcgggatggtctccctacctgccagcttcttggtttgaggtgaggacagccccggaagctcagacttggctcctgtccatgtacttggggccatgagctctgcagggaccttggaaagagagagacgggtggtgtagggcaggggaaggcattgtcttcaaacaggaaaaagctgagaatggaaacaggcgaaacttaccaagtgtaacatcacctggaactgaaggagggtgggaaggttttaattattttaaaaatagagatggggtctcactatgttgcccaggctggtctcaaactactgggctcaagtgaacctccttcctcggctcccaaagtgctgggattacaagcgtgagccactgtcccagcagggaggtgttttttttaaagctgattcactggaggcagggtgggcaagtggcactgctggtggccacccctcacagtccctgctgcccccagtaccgcctggcacccatcccccgggcccgccacgactttgcctgcgccagcctgatcttcgtctgcatcctgctcgtccatgtcctgctcatgcccaggtcagttgcagggaggggtgtgggggtccggcctgctgggatccaggctggaaggtgactatgaacctgcaaggagctgtgtgatttgggctggaaggggtcggctgctggggtcctagcaactggaccaggggctgtggcagcacaccttgagttaccaacacttctttttaatagaatgtgtgttttctgccacaggcctccctactccctaacgtctctctcctcagccacctgtcatatgtgtggcctgcatgcattttggttgacagcccttgccttaggtgtttggagtgctaggaggatagactctgaaaactgtaggcgccatcctttttctcttatatatagggaaattggggcacagaggattaatgatttatccaaaactcactgagattcatgcttctggctctagggccctgctggtggggtatagggatgagggtgaagtcagagggaagggggatctaaggtcagctacttggtgctttctagaagagcagttaggccgaagcatcgaccaggattgtggttttggctatgcttactaaagacataatagggaggctgtgcgtggtgactcacgcctgtaatcccagcactttgggaggctgcggggcgaatcactcgaggtcaggggtttgagaccagcctggccaacatggtgaaaccccgtctctaccaaaaatacaaaaattagctgggcgtggtggctggcgcctgtaatcccagctactcgggaggctgaggcaggagaatggtgtgaacctgggaggcggaggttgcagtgagccgagatcatgccactgcactccagcctgggtgacagagtgagactccatctcaaaaaaaaaaaaaaa

SEQ ID NO: 1463 - DNA, 1541 bp, Homo sapiens
  SITE (282): n equals a,t,g, or c
  SITE (335): n equals a,t,g, or c
aattccgcctttgattccttccctctgaagacagacaaaatcctgacttaggcagtattttttaaaataccaagggtctcggaaacctagggtttgataagtaagaggaacagatcaaattctaaatctcctttgtccacattgtcattctccagcttgttgttcttttcagtggtgaggtaagaatataactcctacttaatgttcctgttccttaggtgaaacactaccaccttttgttcaaaagttagatgctggggttgttgctgttgttgttttctncttttcttccttactttttagattttgatggagacgtggtaggaagtctgggnctgggaaatgaggtgaaaaagaaaagcaattagtttgtctttatacaaaataaaaccttctaaaaaaccttattatcacaaaaaagagctctacaaatctagatagttgttttgaagaagagaagagaattgtgaaaaacatgtataatttgggagggctgggcacagtggcttatgcctgtaatcccagcactttgggatgctgaggcaggcagatcacctgagatcaggagtttgagaccagcctgsccaacataatgaaaccctgtytctactaaaaatacaaaacattagctgggtgtggtaacacacgtctgtggtctcagctactttggaggctgaggcacgagaatcgcttgaacccaggaggcagaggttgcagttagctgagattgtgccactgcactccagctttggtgatagaacgagattccatctcaaagctaaacaacaacaacaacaacaataacaacaacaaaaacatgtataactgggaaaaaactgaaagagaatgcaggatcataaaaatatagcaaacaaagtgagtgggatttaaaattagtggaataagaaataatgggtaacaatgaagaacataatttaggtaatagtatagtatcttgggagccctcctggaagtatctagttatggacagtgagcagcagaaacaggatgtaactcaattcagcatacttgatggttgtggtaaccctagaaaatgactccaggaaataggtgagaatccaatcagattgagaggstaatgttcatgacaggggtgccctagcagacaggcaaagctgaatagaaattcaggaggagaggaattttggctatttagtaaaattatgagcagttggtcataggcaaattttatgagtaggtagcccttctgaagtcttaggcatataattaacctaggttggaattataattagacatcaaagtttaaacttttttatctgaaccgagatgcaaaagtaaattggttctgtgttctggagaattgtaaaagaattccttaattccttagcaaaatttggaagtcagtatcaagtggtgaggataggaaagttgaagagactgtggaccaggcaagaccttatcagttgatttaggaagcagcagtgacagaggccagacaggtaacaagaaaaaaaaaaaaaggaattcgatatcaagcttatcgataccgtcgacctcga

SEQ ID NO: 1464 - DNA, 934 bp, Homo sapiens
ctcgaggtcgacggtatcgataagcttgatatcgaattccttttttttttttttttttcagtggagaagaagggagagagagaggaagtagctggaggcaggaaacttgtactgatccatgcacctctctacttgttctctttgtcatcaagggcaccatatagctgaaaggcaggaggatagggagagggccacctcttcatatcacttctgtgccttggaaagctcttctccctggataccaccggataaagacctacacttctctccttgttgtgtgcacctgttcactggagcacatgcgcccggacatgctctcagaccttgcttcctggccatgagctttaaggaatggtctctgaaaatgcactacttttaagagctgggtctgaagcagagctaactggtctgcagggcaatgacacccttgacctcggsctcattagctccatcctcttacctactgagctcacaaccaccaacatcmtaatacttgagagaaagctcattacagcgtatgcggtggcacatctgtatttacttggtttgcgagcagctctcagagtaagccagctttctctattgctgagctcctgcaaatgagaacaacaaacacacctactgctgagtcaaatcaggccaaagggaaaagaggaaggatctgtgaggaggagagaccataagcctccaatcacactcaggaataaaatggggctaaattccaaatgagattaacaaaaaaaataatgagagaaagactaagagacagaaagaaaacccatcacataccctttgtatctgaaaggcaggctaggtaatatattccttgccttaatgtcaagcttcagtaaacccaccagccactccagagaagaggaggtggtgcatttccggcttgcataatagccaccagccaccaccggaattcctgcag

SEQ ID NO: 1465 - DNA, 1625 bp, Homo sapiens
aattcccaagaaaaatctgaactttggcttgagtttccaggacttgtagtcaagtatttatgtgggttgtgaggggataagagaatttagggtagctttatacagtgttaccatttattcttttttgttgttttatttttttcttatgtttggttggtgtcaccatttattcttttgtatgctgtttagcctctggagagggcatctctgtgtttatagaagaaaaatgtgactctcatgttgtacacagccctagactggacatcaaggtcttctaactgtcctaagcttcttaggaagatattgtctatgtattttagtttggaatcagactggcacaggactcggcatgcactatcactcttactgttctattttttcagcttggatttacactgggcaacgtggttggaatgtatctggctcagaactatgatgtaagtggccatatccatgacttccttgattccatgtaactgttttagagtgacttttctttgtttgaggtaaggtgtgacttccagcataaatgtagtccatatggctgaggcaaaactcctgaatattgtagaatggtttgccattgkttgaaaaagtaatccaactcatgaaacagctgtcctccatatcaccacaagagggcaaaatcccttcagtttagctgggctcatgatcatcctcagctgtggcttgttagccgagagtaatattaagttgggctcttaaaattctttgggaaatcatgtgataagtgagaatttaaaaattaattggataatattttcaaccccactatccagtagtagagatgacttagaattttggagatgcatctgggtagggggactgaaaaatatagatctatattccatctccaaaattctaagtgtagcacatttggggacagagttttgtgaagttgtattaacctcactttataggtggtgatgttgaaaaccaggtggtgcagcagcctatgaatggggattctggacaggagtttgaaaaagacaagcaagggaaacatgatactaacttgatttgttataaagcttttcatatgacaaagggaattcctttgtcaaccttcgtttgagtcatacagttttctaggcaaaggctacattatgtcacatttattgttwatatgcacaacctttacttggcaccagatcgagcggaagtgggtatacaaaagtagaagtgggtttcagagaaggagcatacttatctgacaacttctgatatctttcacatgcagttataaggctaagaaataccactattggccgggtgcagtgctcacgcctgtaatcctagcactttgggaggccgaggtgggcagattgctcaagctcaggagttcgagaccagcctgggcagtgtgacgaaagcccatctttacaaaaaatacaaaaattagccaggggtggtggcatgtccgtggtcccaactacttgcgggattgtggcgggaaggatcacttgagctctggaggtcaaggctgcagtgagctgtgtttgcaccattgccctccagcctgagtgacagagtgaaaccctatcttaaaaaaaaaaaaaaaaaaggaattcgatatcaagcttatcgataccgtcgacctcgag

SEQ ID NO: 1466 - DNA, 2128 bp, Homo sapiens
gcgccgcgagggggcgactcccggggcaccgctggctcctggcgggagctctgcgtcttccccgcggcaccaggcgctctcagcgggctggccggttccacgccgcmagccagccmcgtgtgggracttcggtctagtatttggacccgaggagataatwctgtgtgrraaattctctcccttcggttggaaacagtaacaaactggaaacggatgaggwgttatrgacgtgcttggaratgcaagaaaccttcagattacgagccgttgacgggaccagttgtatttcacgtttttcgaattaagctcagaatcagttttcagaatgacatgtgatgcgtggtgcgtggtgtgtgtgcctgtgtgtgtgtgtgtatggatataattcattcatttttgtggcgtcagaaaggttatgtcgagcgttgtagcggcttcttaatttacattcacggcatacaactgaagaggagccattatttattttttttcctagcatttgctgcgactacacactgccggagcgtttggaaatgttgtttgctgttaccctgtatttgtctataaaattcttactgtagggaatggccaagtggaccatcagttcgtcctgagatcttctcatgtctctcacgtctttgaaaatggcctgtgaacagactgcatcatatgtaggatgtctggcaaaatagtgtacagcgttcttttctcaaatgagaggaaatgtgtaccttttcgccgcgttgtgacaatgtaaatgttaagaattagtctaaagatgaaaattctttggccaaaacaagataagccttatcgatatgaaaactggaaaacatcacatgggactggaaatcctgtgagtgggtgctcatgacggaaaccctgacagaccttggattccagcatcgctggtgaaaatcagaccttatcatggataagggttaagatgtaaggtgtctcacccagacgccatctgttccagctgtcaatgcagaagccaggaaaggagagagagctggccaggragaattccagcttttttttttttttgagacattcatgtgaatttctctgcgaggggaaagaagmccaattattttccttggatgctgtcccttcttttggaattaataagatggcttcactcagtgagaggctgtaaagacatttcactggaaacaggcagtaacagtggccagttgtttctgttaataccatcaaaatatccctactcttgtttgtgccttgaagaaagtccttcatttaactgagacatctgagcctgcgttgcggattctgattctctaaatactcctgcaagaatccctttaatttttcactgtgcaactcaagaaggacctttctagggtattgtcaggatacgtatgctaatgatattgtcaggttaggtgagaatgattgatcactcccttaaaatccttttttatgatgttaaagctgtactttaagaaagataaaactgccactgtggcgttgcaagtctgagctagctcaagcaaacaaaggaaattgcgttaaatttgcccaactctattttctcatcttcatatagcaagactctccaaacagcaagtgatctaacctatcaagtattatgcaatagctgaatttccttgcaatggtcagtttaaagaactgttaacttagcagaggcgacgtctcgtggccaaggcccttagggtccactccatggaatcaggaccccttgctgctgctttgcgagtgttcatggaggaagaaaaatcacttggtgttctttttttgcatggaagagtcataataactgacttcagatacagagaaagtgggaagagtgagaaagaaggaggtgaggccagaggatttggaaggctaccagagagargcagccgaggcctgattgtggaaatgatgcttagacttgctttcagcaggagtgatgaagccagaatgagggaggcccagacgcccgggagaggtacaggggataggtgccatgtggtttgcaccaccgcagcaggctttgggtcccaaagacgcgaatggaaatagaagaaaatgcagttttaaataaaaaaaaaaaaaaaaggaattcgatatcaagcttatcgataccgtcgacctcgag

SEQ ID NO: 1467 - DNA, 1309 bp, Homo sapiens
attagcatatccatcatctcagtttttcatttctttgtgttgggaatgttcagtatcctcgctatctgaaactatgaaatgtgttaatgttaactatggccatcctacagtgccataggacaaaaatatggaagtcttcactagtttgtgtgtcatccttgcgcaggtgccatgctcatcttcccagtattattccagttttagtatatgtgctgcctaagcgagcatggaaattcattttagctgtaagtttgtgctgggcagattatccaataaaagtgcccttgtaatctaatagttctgaaatagccttgtgaatggcagatcccctgactgccctgtctgttctgcacccagcctgccagctttgccttttccactgatgtttttgtgggatgcagtggaccccagaagaacagtacctcagatttcaagcttgtgacccactagctcagcctggccaggttaaattggtgtcttaggttccctgtagaaagggtctgtgattgtcaacctggctgcgtgggagtaaagaaggtgatgtctgtgacaggcccagcactcagggactgagtcctgcactgatgcaggagctgtgtactcagcagtgtagtcctagcctccttccaagagtcatgaccctgctcaagatctgattttgcaaggcagccctttccagagcgagaagactatatagttagaaagccattccttatattgaggcaaaataggcctccctgtaaccttcatcttacagttttgtttctggtttttagagcaagagagtcaatctcataatctgcagcatgagaattctttttactcaccagtgaagcattcataacctctgtcaggcacctgcttggaattacaggtttacacagttaatcggaataaatcctgtcttccaaagcttacattstaatcatatawaattcagtaaaaagtgatgtcaggacacagattaaaaacaaaatcatgggaccaggcacagtgctcacgcctgtaatcccagcactttgggaggccaaggtgggcggatcgcttgaggtcaggagtttgagaccagcctggccaacatggtgaaaccccgtctctactaaaaatgcaaaaatcacccaggcctggtagcgtgcgcctgtgatcccagctactcaagaggctgaggcaggagaatcgcttgaacccaggaggcggaggtttgaactgagtgccactgcactccagctgggcaacagagtgacactccatctcaaaaaaaaaaaaaaaggaattcgatatcaagcttatcgataccgtcgacctcgag

SEQ ID NO: 1468 - DNA, 1686 bp, Homo sapiens
ccctttgtggccttccacatcaacaagggccttgtgaagaagtatatgaactctctcctgattggagaactgtctccagagcagcccagctttgagcccaccaagaataaagagctgacagatgagttccgggagctgcgggccacagtggagcggatggggctcatgaaggccaaccatgtcttcttcctgctgtacctgctgcacatcttgctgctggatggtgcagcctggctcaccctttgggtctttgggacgtcctttttgcccttcctcctctgtgcggtgctgctcagtgcagttcaggcccaggctggctggctgcagcatgactttgggcacctgtcggtcttcagcacctcaaagtggaaccatctgctacatcattttgtgattggccacctgaagggggcccccgccagttggtggaaccacatgcacttccagcaccatgccaagcccaactgcttccgcaaagacccagacatcaacatgcatcccttcttctttgccttggggaagatcctctctgtggagcttgggaaacagaagaaaaaatatatgccgtacaaccaccagcacaaatacttcttcctaattgggcccccagccttgctgcctctctacttccagtggtatattttctattttgttatccagcgaaagaatgggtggacttggcctggatgattaccttctacgtccgcttcttcctcacttatgtgccactattggggctgaaagccttcctgggccttttcttcatagtcaggttcctggaaagcaactggtttgtgtgggtgacacagatgaaccatattcccatgcacattgatcatgaccggaacatggactgggtttccacccagctccaggccacatgcaatgtccacaagtctgccttcaatgactggttcagtggacacctcaacttccagattgagcaccatctttttcccacgatgcctcgacacaattaccacaaagtggctcccctggtgcagtccttgtgtgccaagcatggcatagagtaccagtccaagcccctgctgtcagccttcgccgacatcatccactcactaaaggagtcagggcagctctggctagatgcctatcttcaccaataacaacagccaccctgcccagtctggaagaagaggaggaagactctggagccaaggcagaggggagcttgagggacaatgccactatagtttaatactcagagggggttgggtttggggacataaagcctctgactcaaactcctcccttttatcttctagccacagttctaagacccaaagtggggggtggacacagaagtccctaggagggaaggagctgttggggcaggggtgtaaattatttcctttttctagtttggcacatgcaggtagttggtgaacagagagaaccaggagggtaacagaagaggagggacctactgaacccagagtcaggaagagatttaacactaaaattccactcatgccgggcgtggtggcacgcgcctgtaatcccagctacccaggaggctgaggcaggagaatcgcttgaaccggggaggtggaggttgcagtgagctgagatcacgccattgtactccagcctgggcgacagagcaagactccatttcaaaaaaaaaaaaaggaattcgatatcaagcttatcgataccgtcgac

SEQ ID NO: 1469 - DNA, 2153 bp, Homo sapiens
ccattctaaggaagagcccttctttccaccccctttatttacttatttatttctctctctttatatcattatgaactcagggattcttaatttatgtacttattttgatgcttaaattgtcccatatgtggtctgtgagccacccttaacactggttcctttgctctttgatatgcctacatcatttttttagtacttttttgttttctagcaaaagttgtttgaagcttaccatactgtatttttttattgtggtaaaatatactttaacattcaagttacctttttaaagcgtgtggttcagtaacatccagtgcagttgttcctcagtatccacgggctgttggttccaggactcccacagatactaaaattcacactcaagtccgttattttatataagtgtgagatcttagataacctatgcatactctcccatatactgtaaataatctctagatgatttgtaatacctaacaaatgctgtgtaaatagttgttacactgtattgttaacagtacagtaacagacctgtctgttcagattcttcctggccttttaggggatcactgacaaaaaaacttagtgcatgttcagtacagacaaccatcctttttttgctttcgaatatttttgacctgagattggttgaatccatggctgtggaacccatggacacagaaggccagtggtacatttacagtgttacagagctgtcacccctgtcgattccagaatttttccatcattccattagcagctcctccccagcctgctctgctccggaccccggcagccactatctgcttcctgtctctgtggatttgtctacattagatagttcacagaaatggaatcacaatatgtgagcttttgtgtctggcttctttcacttagcgtgctgttttcaaagtccatccgtgctgcaccatacatgagcgctttattccatccatgctgtaccatacatgagcgctttattccatccatgctgtgccatacatcagcgctttattccatccatgctgtgccatacatcagcgctttattccatccatgctgtaccatacatgagcgctttattccatccgtgctgcaccatacatcagtgctttattccttttctggctgaataacatcacattgtatcgataggtcacatctggtttctccattcaccaaacattgggcatttgggttatttccaccttttggccgctgtgaataatgctgctatgaacatgggtgtacaagttttagtttgaacacctgcggtcacttattttggggtatatacctgggagtggaactgctgggtcatgcagtaacttgaagtttaagttactgaggaattgccggactgtttcccacagtggctgcagcagcttttattccagttagcaatcacgagagcttcccaccttctcacctacacctgtgatctgcctctttcgttgtagccatccctgtccatatgagctggtctctcatcttgccgtgatttgcatttccctgatgactgttgatgttgagcatcttttcatgtcctgattgaccatttgcgtatcttctttggagaaatgtctgttcacgtgctttgcctagtttttaaccgggctgtttatcttttgttattaagctataagagctctttatattccaaatgctagacccttaacagatctgtgatttgcaagtattttctcccattctgtgggctatctttttactttcttgatagtgtgcttctacaaaagtttttaattatggtaaaatcacatttattttctcttttgtaacttttggtgtcatgtctgagaaaccattgccaaatcaagatcacaaaaaattgacgaggccaggtgcagtgcctcacacctgtaatctcagaactttgggaagccaaagatcacttgagcccaggagttaggaacagcctagacgacatggtaaagccccgtctctacaaaaaatagacagattagccgcatgtcgtggtgtctgcctacagacccagccactcaggaggttgaggtggcaggattgcctgagtctgggaggttaaggctgcagtgagctgtgatggagccgctgtactccatcctgggcaacagagtgagatccgagaccgtgtctcaaaaaaaaaaaaaaaa

SEQ ID NO: 1470 - DNA, 1790 bp, Homo sapiens
  SITE (99): n equals a,t,g, or c
caaaaaatacaaaatagcaccacagtctccatctggtttatagcaacaraggtactttatttaatgaagcaatggttctaatcctggatactgccatgnactacaattccatccctcccagaggrgtggaggaagtcttgggtggtgtggacagaaggaagagaggagagggtgagtggggtatagggcccagggtggctccctactcctcaggctcaaaaggatgctcagtgggaacagatgatctcttgatgagtgcttcttcagtttcatagtttggaatcgttcactgtgtgctttttggggggttttcaatggaaattcacgttgctttgcatttctgtgtccgtctttggtcagttgtgcaagcctgctcactgtcatgtgaagatggcctttcatctggcttctctctcttaagtgagaaagattgtccttcaggggacatgacatcaataggtttctggaatgagggactctttctccccgtgttttgctttgtgttcacattttcttttctaatggcattgaaactttaaaaaaaatggattcaactgtttttgcagaatgtagaaagtattctgtgtccttggttaaagaaatccacttgtgaagtgtgcctggaaaatgaaagtttgtgttttttaaagaggaatatttgaaactgctttctatgcatgcttagctggagaaaagtacaggcaggcgtcccatctcccagccacttctcaaaggtgctgctgtgttttaaagaccaggtacagccagggcagtatttgcaaggacattcctgcttactttatccctttggttggaaagctctagatgattcccgcagctcctccagaccccgcctccctgccctccccagctggtctgggaagaggtggtctgctgacctgtggtatctcagaggggacgttcctcctcctccctgtgcaccaggtgggctgcaccctcctgcctattcaggatgtggatgccacaggagagcagcaggcagtggaaacttcagttgcactggttctcctggtggcaaaggcatgaagcacaggggtcgattaatccaggctactagaaagctccagagcaaagtgtgcgggtcccacaaatgcttggctggtggggtctggatcagtgctgagatagagttggcagaagaagcagaggcactctgcttgctttcctagccagtcctcccctacacacacacacacacacacacacacacacaatctcagtgcgccattctgtgcaatcccagtgaccaaatcccttccttgcccacctctatgtcagcaggactgaccacatcactcccccgagttcccaccaccagcatttcctccaacctttttccatcacaaccagttagaaccctacaggcaacaaggccttctagaatccgcttaacccttggctgataacaggcaaatttcagtctgctacactttgttaggtccagaaggagctgcccatactactttcttatgagcatgctcagtatggcatatggacatgtaatgtcacatctttgtggagtgtgattttcttttttyacatatttgtatgcagtagagagcctgttgtagaaaacgctccctgtatcttgctgtactgttaaagaaagctgaattccacattgccaacaaaagcgtgaaaatgttcatgaaccttcctccaggaaaagccattcaagcctgattatttttctaagtaacttcaattaaattgaagaaaaaagaaaaaaaggaattcgatatcaagcttatcgataccgtcgacctcga

SEQ ID NO: 1471 - DNA, 1319 bp, Homo sapiens
aattcctaatttttaatatggtgaccttacagaaaatatttcccaaacatccttttcatcctgtgcttctggaggactgatttgtttgagggaatcattctatgcattatatcctaaaatattctatgactggtttctgtccatgtttgtgggctttcatttttttaatgggatgactattagtcaaagtcagcttgtcatgactcatcataggctttctaacctacttccctgaatccgggtcctcattgtgaaatgcatgccatacgaaatttgaacgtagctttggaaaaagggactatttgtggagtaatggcattaatcaacatagaacatcttatttgaatcaacagttaacttcagtagtcatgtgaataaaattcttattgtctaaattgagacagcctcagatatttgcagatatttactttttgtctgatatcagtacatatttggacaaagtcatctaaataatagtttgtcaccaaataactacaaaatctcattttaaatgagtaaggagaacgtgtacagaagcaaattttcttcaaaatagttgtgggaagagcttatatgtgaaagcttatgactggttttgagggagaacttactggagaaaatggactctatgttaagtatggttttcagatagaattctttccttttttaatgagaaaaaaaaatccacattaatattgaaactgcacctgtaatcccagcactttgggaggctgaggacagaggattgcttgagcccaggagttcgagagcagcctgggcagcaaagtgagaccccatctcctaaaaatttaaatgtatttattaaaactgttctctagaagctttggactgaatcccaaaagtgtttataagttcaaaagccaaaagtatttgtaatttcaacaaccaaaaatggatttctttatgtaatcttggaattattaaaagtccttttagcttctagcacatatttgtacaaagagtttaaggactggtggctggtttggtttgttttttaaaaatgtttactgacgaggccgggcgtggtggctcacccctgcaatcccagcactttgggaggccgaggcaggcagatcacaaggtcaggagttcaagatcagcctggccagtatggtgaaaccctgtctctactaaaaatagaaaaattagccatgcgaagtagcaggtgcctgtagttccagctactcgggaggctgaggcgggagaattgcttgaatccaggaggcagaggttgcagtgagccaagatagcgcctctgtactccagcctgggtgacagagcgagactctgtatcaaaa

SEQ ID NO: 1472 - DNA, 1504 bp, Homo sapiens
tgtagtttcgtttttaaacatttgaggatattttaggtgatttaattcattgtagaacatagactgcatgatttcacttgttttagattgagattgttttgtagcccaggaaatgttttatcttggtgaatgttccatatgtacttgagaagaatgtgtattatattgttggttgtagtgttccataaaagtcagtttagctcattggtagtggggcctaaatcatctgtatcctaactgatagtgtgtggttgtgtgtctttgtttttctttgtcccatctgctttttgggttctttgattttcttctggtgtttcttcttctggattaatcaaggattttataatattcagatttatctcctctgttggggttttagctgtacctctttattttttaagaggctgttctagggattacagaatgcattctcaatttatcataaaatagcaagaatattataccaccttacatgtttcacatgtaataaaacatactttcatatactattttcatcctttgtgcttttattgtcataagttttgcttctaaatgtattatagttattgtattttgtgattatttgtgcttcagaaagttattctttgaagaaactaagaaatgagaaaaattaacatctacctgtatattcaacatctacatatatatttaccatttttgccattctttattcctacataaagatcaaagtttacatctcatatcattttctctcagtctgaagaacttgatttaacatttcttgtattgtaggtgtcttagtgacaaattcttcagcttctgttttcagcttttatctgaagatacctttattaatctttactttttctatatattttgtttgttcgttagagataagtctactctgttgccagctggatccatggccgatcataacccactgcagcctcaaactcctgggctcaagtgatcctcccacctcagcctcccaagtaggtgggactataggcacacgctaccgtgcctggctaattttttaatttttttggagagttggggtctcactttgttgcctgggctggtctcgtacccagggctcaagcatcctcctaccccagcctcctacggtcctgagattacaggtgtgagccaccatgcctggttatttaaaaaaatatgttttgaataatacagccaattctgtttttttaagctgtcactatgttctgtatagccaccaaaaacagggaattagcaaatactgaatcattgttcttaggggaaatacagacttggctcctgtaagcctcttgtcataatatttttgttaaccaatcagtatattaccttgttttatgtgtttttctatttaaagccacctggggtacaaaaatacagttggatagaaggaataagttctagtatttgatagtacagtagagaaattatagttaatgatttattctatatttcagaatagctagaagaattgtaatgtttctaacacaaaaaaaaaaaaaaa

SEQ ID NO: 1473 - DNA, 1645 bp, Homo sapiens
attccttactgtgaatagttgctttcatactacagcagcaatgttgaagagttgtgacaatgaccacatggcctataaggcctggaatatttgctgtctggctctacgcagtttaagtttgctgacccctgtgcaaacttcgtcaaaggtaactttgacttactgcgtactcttgattagtacccaaactctctaaagttagatattaacttagaaaaaattgataagtttcaaaaaaaaatttctctttggtagggaaggtaactccaagagttaacggttttcttgccttgaagggcgttatccagttttgtatctatctctgcagtcttatttcccattgaccagtcttttttccattgactgcatgtgtcagtttctcatgtcctgctttgagccacccattgtcattctgcaggtcccttcattaatgaattaaataaatcttagacacacgctcactatatattccaatgagagtgtttattgtatggagaattatatgttgtctccttgaggcttggcagtgcctcttgaatgtagtcatttaaccctcttgggcctcaggtaacttctctgttaagtggaaataattatccccagtaccttagccaaattactgtctcacccaaataataattggacatagttttgtaatttaagttaaaagatgttatgtttatgaaagagttttgttagctgcaaagcgctatttgttggatattgcttcttgaaaaaatacagatcttaggtattaaagaataggtagaagcctgttaggtatgaattatgaacagatattcgattctttgacttctccattcagaatagttatttttaaaaagcaaatatgtaaagatctttctgctcttaagcctaaccactcatctgatgagtgtactgaaaatagaagtggtttattgcaatatgtcagagaagtattctactgataaccacccatacatgaaatcttaaagaagtagttatgagttggaaatttctaggttgtaatcagaagagggagcaaatgacagaatacagctgtgcattgtttggaagtgggctggaaagaattcattgcctctttaattgaagaaaagcaaagagtgacactaatcaaagtaaaagaagggaagtactcatagctgaaaatggaactataaattgtttgctttttagagcaacatcagttctttgaaacccatacagttccttataatattccaaaacaaactgccatatggaaacctgtttagaaaggaataatagcactctaccctcctccccagccactaaattgaaacatacgtgaaaatttaatgtagttttttaatcaagctcagaaaattttttttttttttgagacggagcctcgctctgtcgcccaggctggagtgcagtggcgcgatctcagctcactgcaagctccgcctcccggtttcatgccattctcttgcctcagcctcccgagtagctgggactacagcttggctagtttttttgtatttttggtaaagacagggttccaccgtgttagccaggatggtctcaatctctcctgacctcgtgatccgcccaccttggcctcccaaagtgctgggattaccagcgtgagccaccgcgcccagcccaaaaaaaaaaaaaa

SEQ ID NO: 1474 - DNA, 1466 bp, Homo sapiens
caaacacatttctcactttttttttcctgaagtatataagtctgtgaataaccatggtggtaaaaacagaaaggagaaacagaacgagaaagaaagaaatagaacaatcaatagaatatagtaatattatcaagctatgtcttttgattaaaatgtattatatggtttaccttgattaaaatgcattatgtgtgcagttttctcaaaaaaattcttattgtgtttwattgttcagtcccttgtttattctcarctgtgtgtccagttactctatccatcttagactataaactcatcaaggcattaamcatgttgttttctttattcctgaatctcaacatctagttaatgccaggcaggctgtgacagtcaataaatgtttgctaattatgtgatgatgctttgggacataagaatgttgctttgtgtctctagggttttagtttatttttaccagatcaaactttagaattcgactaacactaatgtcagaagtctgtgtttcagtaaccatctacagataatggcacccagttgtccatgaggagatgccatttgcatcctgtgtgggtgacagctatgctttgattcctcttggatctgtaggactacttgcctgtaagacctcatgtattgttctgggggtctgccagagagggaagctagcctcagaacacggggaaatgaggcaagggggcttcagaagtggtcatgtcaggattctggcttggcaaagagaaaggcgtgggttgttttatgttccaaagctggagttatttcttctgtgaccctggcatgtcttcatacttaacagacaccaatattgtcctttccttggtttagccaaaaccgggggttagggtgggtagtaggaggtgaaggagcttttcttcagtatgtatgaaggggattgacgtaatatctgctttcataaactgaatctccagtgagccttcctttaaaaaataattgtatgtaaaaaccacataatgattckgtaattacagtgtgttggcacagttgttaaattataaatttaataagctaagatgagctcagtaagagtataggcttttcactggagtgaaaggacattacttgatgagatacagcagagaggaaacaatagactttttgtgtagctgcctgaaacttctgctaggtgaaggcaagccaataaatgaagaagaagggataatggattgcctaacctgtgaacttggtcaccatgttctttgaaaacaaagtgaaatgcaatgtgttgtctttggactgtctcacagtgcttaccctacatcagacaacccttgtctagtatttcacggattttgatttgctatttattttgcatttgccttcatgttgctatgttttaagccatgaaatgaattatttattctgtttatacaagcaaaaaaaaaaaaaaggaattcgatatcaagcttatcgataccgtcgacctcgag

SEQ ID NO: 1475 - DNA, 1828 bp, Homo sapiens
catcagtgtttaaaaaaaaaaatcaaccaggttgtggtaacaaggcattctatttcttcaaaaagactgtatgcctgtgtctgaggaacttacctattatccacctctgttggaactctcttttaaaaagtacatttatagattgatcagaattataaccatggagaattttttcttctgagcattttaatatacttgaaaacaacattgacttgaaaaatttcagaacatttttcagtacctagttttattaaatattacacttgagagacactttttaaaaatgtgttaatgtcaatatgatgagattttagcctttctccagaactaaggcattaaagaaaatagcaaatattaaaaaataaaactgttacttttttccttctttcttttcacctttaggttaatatccagtattatgtgttatccctttggataagtatgctttattttacctctgttaaaaattaaaataaatgattctattcatatttgtcagtaattcaaaacttatatgtgtaactgaacgcgcatgtaaggtatggttttatttatttttttttttttttgaggaaatttaaatgctaaagaaacaacgaaatgaaaaggtatcaggaaaaaaagatcaggaagttgtattcaggtacaaatctttttttaaataagtattttgttgaggttgaagaattgctggcaattaaaagaatagagctaattatggctttcatcattcattcatgtatttattgagcacctacttattatggtgctcaacacttgttactgcaagctaccttaatttcccaagagtggtgccttactctgttttttctgatatggtcttccaatcagtgtgtgtaacatacctgttgtttatcagccattgtaggtggctgtgtctgttgcatcatcataagaagtttaagctttgtgctctgataaattgtgttctgttaaagaggttagtaggatgaaaacagcaaaacaataattttttcaacaaattgtaaattataagaaaaagagttggtttgtgtacaacaattttaatgattcccttgttcatttttgctgtgaaatgcactgaaaaaaatcctcaaaatgagttatagttccctgtgttgggaaaattgacaaataataaaactagagaacaaacaataatgcttctgtctcttttacgaatggagagagaaagtttatattcagtagagttattgccctgttcatttgagaggggcatggattttctgtttaagtccttcagggaatcttcagctaggtggtaaatttaataagagtttctaaaaattgaaatgtttaacttttaaatattctggagatagaagaagaatataaaatgaaaccaggctgatctgcatgcagtggcatttacaactaactgatcacaaccaattatagattccttattttgtttattgtgaggcagagtctgactctgtcacccaggatggagtacagtgcatagctcactgcagtcttgacctcccaggctaaaccaatcattccacttcaccctcccaagtagctgagaccacaggcacacaacaccacaaccagctgattgttgtactgtttgtatagactggatctcactatgttgcccagactggtcttgaattcctgagctcaagcagtcctcccacctcagcctcccaaagtactgggattacaggcgtgaggtacctcgcccagccccagttacagatttctttgttccttctctctcccactgcttaacttgattagcctttaaaaaaaaaaaaaaaaaaaggaattcgatatcaagcttatcgataccgtcgac

SEQ ID NO: 1476 - DNA, 2746 bp, Homo sapiens
  SITE (2): n equals a,t,g, or c
  SITE (10): n equals a,t,g, or c
  SITE (26): n equals a,t,g, or c
  SITE (35): n equals a,t,g, or c
  SITE (2736): n equals a,t,g, or c
cnccgatgtnggaccaatccccctantagccgcanactagatctctggaatttcctcgatattccaagaagccgcctggtaaaataccctctgcttctccgagaaatcttgaggcacacaccaaatgataatccagatcagcagcacttggaagaagctataaatatcattcagggaattgtggcagaaatcaacaccaagactggtgaatctgaatgccgctattataaagagcggcttctttacttggaagaaggccagaaagactccctgatcgacagctctcgagtcttgtgttgtcatggtgaactgaagaacaatcggggcgtgaaactgcatgttttcctsttccaagaagtgcttgtgatcactcgagccgtcacccacaatgagcagctttgctaccagctgtaccgtcagccaatccccgtgaaagacctcctgctggaagacctccaggatggagaagtgaggctgggtggctccctgcgaggggcattcagcaacaatgagagaattaaaaacttcttcagagtcagtttcaaaaayggatcccaaagtcagacccactcgctacaagccaatgacactttcaacaaacagcagtggcttaactgtattcgtcaagccaaagaaacagttttgtgtgctgccgggcaagctggggtgcttgactccgagggatcgttcctaaatcccaccaccgggagcagagagctacagggagaaacaaaacttgagcagatggaccaatcggacagtgagtcagactgtagtatggacacgagtgaggtcagcctcgactgtgagcgcatggaacagacagactcttcctgtggraacagcaggcayggtgaaagtaacgtctgacagaagcatgtgcacttcgggaagcaggcctgcatcttacctgtacagtatttgcattccacagatggarcggtttggagaagcactttttcatacttttgtgaaagtatacatgttggcccagtctctcgtatctgtacctttgtccctagtactgtaactgccaatctgtctgtgtaagctggaatctgtggcaactattaccctgtgttgtatttcccaagtgtctggatggatggagaggtactcaaacaagttactttcagttgtcctgctggattttaaaaaaatagaaaaagaatctcaaaactactgttttacatagattgtttgaagagtccttcctcttgtgcttctgtaccactttcccagctcttagatgtggtagctaaaggcacggaatttagacggccttgtaaatagggcatgaggaactcatctgtgtattgggatggtattagagagagaatcaggaaagaccaactcatgaagtgaacttggtttgatcttactcaactagaaagcttgaaaacatccctggggattctgaaggcttaattttgcaaaggaggatgcattgtctgaactttgcaacttcatccagtgcaagtttgatgcaagaatgtattaggacataaaatagaggctgaccttaaaagggccaggacagaagcggctgccagctctgaatctttaactgaaatgcacatggcaccaggaggtgtctctcatagttggttgctagcctaaaacatcagaatagaacccaaagggcttaggaaggcctgccaggataacaagaaggccctgtattcattgtgtttcatctgcctaggcctactcattattttagagaatgaatgaagcaacaaggaagagagaccatgactctatcgatgacactgtttatagaaacacaggagaggaagaatttggaatgaaaagcacttcgtcagaaccttctgtgggagccattgagagaaaagcatggtccagtgccttctgagaaaggccagagctttgggctttcctgctctgcttttgggtcgtcartttgccatctctggttctgtgctataatcagaattgtaattatgttctccagaggccaatttcattaactctgattaattagaatcagctagccagattagtaacctctttgtccagccttgatttacagtgcagggtaaagtgcagaccttaaaaacagctaagtacctagaagagctccctgcaagtgtaaatattaaggatgacctgtgcaaaattatacccacaccagcactagtggtaattattctaaattattgccaaaaagttttttttaatctgtctttcaagtttacagaaaagaaagcagtaaatgcattgatgtcattttattatgtacatatatcatgtgcattcaagctgtgtgacaagatatatcaatataaaaacaaggtatatactttattattttttgaaaacaaggatattgtgatcaattttaccctgtaaaacatatttctgtatttataggtcttaaacatgatgaattttttctattacaagtttatttaaaactgctttctcaagtcgttattgatacagcaagtgaacctgctgcagacagaagcagaggaaagccaagaacagcctttattggtgaagaaaagaatgaatgattctttgtaggcgccatcagccacttttagaagccatcagccagtgtgttgggaaaagaggtttgtcaagtgttggcctatgggaaggtggtcaatgaatgttttgatgaaatgaatgtttttgtataatggccttaaacttttctggaagtatttcaaataaattacattattaagtcatccaaaaaaaaaaaanaaaaactcga

SEQ ID NO: 1477 - DNA, 1507 bp, Homo sapiens
ccgatctttgagctttcccaaggagaagaagacttgatagaagacttgaaattagcaaaaaaggcctatcatgaccccatgctgaaactctccataatgacagaacaagagttgaatcaaatttttggaacactggactctctaattcctctacatgaagagctccttagtcagcttcgagatgttaggaagcctgatggctcgactgaacatgttggtcccatcctcgtgggctggctcccttgcctcagctcctatgatagctactgcagcaatcaagtagccgccaaagctctgctggaccacaaaaagcaagatcaccgagtccaggatttcctacagcgatgtttagaatccccctttagccgcaaactagatctctggaatttcctcgatattccaagaagccgcctggtaaaataccctctgcttctccgagaaatcttgaggcacacaccaaatgataatccagatcagcagcacttggaagaagctataaatatcattcagggaattgtggcagaaatcaacaccaagactggtgaatctgaatgccgctattataaagagcggcttctttacttggaagaaggccagaaagactccctgatcgacagctctcgagtcttgtgttgtcatggtgaactgaagaacaatcggggcgtgaaactgcatgttttcctcttccaagaagtgcttgtgatcactcgagccgtcacccacaatgagcagctttgctaccagctgtaccgtcagccaatccccgtgaaagacctcctgctggaagacctccaggatggagaagtgaggctgggtggctccctgcgaggggcattcagcaacaatgagagaattaaaaacttcttcagagtcagtttcaaaaacggatcccaaagtcagacccactcgctacaagccaatgacactttcaacaaacagcagtggcttaactgtattcgtcaagccaaagaaacagttctgtgtgctgccgggcaagctggggtgcttgactccgagggatcgttcctaaatcccaccaccgggagcagaaagctacagggagaaacaaaacttgagcagatggaccaatcggacagtgagtcagactgtagtatggacacgagtgaggtcagcctcgactgtgagcgcatggaacagacagactcttcctgtgggaacagcaggcatggtgaaagtaacgtctgacagaagcatgtgcacttcgggaagcaggcctgcatcttacctgtacagtatttgcattccacagatggagcggtttggagaagcactttttcatacttttgtgaaagtatacatgttggcccagtctctcgtatctgtacctttgtccctagtactgtaactgccaatctgtctgtgtaagctggaatctgtggcaactattaccctgtgttgtatttcccaagtgtctggatggatggagaggtactcaaacaagttactttcagttgtcctgctggattttaaaaaaaaaaaaaaaaaa

SEQ ID NO: 1478 - DNA, 1597 bp, Homo sapiens
aaaaaaaaaacaagtgaaattgagaccacatatttagatatagggcattagaagatccctgaagcttaagcctcattagcttcatggcaaatcttcccttgatcttgataatgctggtggtagggatgatgggggtgactattaacacattgagcactcatgtgcagacattgttccaagcagtttttatatattaatcctcgaaacaacccaaggcacggtagcagaggtacagagaagtcacacccaaggtcacacagtgggaagcagagtttttaggagagggaagaagggcagtatggaaaagaatactaaactgagagcagaggccttcatgaatgtcagcttcaccacccatctgtggggaacctggggggaaaatcacgtacctttttgcatgtacgtccttgacttcacctgtgaaaaaggaatattgatgcatgtcatgaatccttgactctgttgttctgaagktkagagaatgtgtaaaagtgctttgtgaaggtaaartgcttagaaacgtagttatattacacagctttctcttccacttcaatacttaaawttcaggcttaaaaattcatttagttttgcttttcatttcacttctaatgtgtctaatttatttcttggacatgatttttgttctcaggttacttgtctgcaagacttttttggtgatgacgatgtttttattgcatgtggaccagaaaaatttcgttatgcccaagatgactttgtcctggatcatagtggtaaggcaattcttcagctaattcatttttccatctttgtaacccctgaaatgaaggcttgggatttagccactcagttggtgcatgttaagaagtctgacatgttgaggaaagatagcattggcagtacaatttttgaaccaatgaaaataaagaataacatgaaagcatttgcctacttataaaaaaaaaaaaaaaacgtccttctcagcctgccctcgacaacagtgaccaacagacaggcagctgggtttcccaggccatccctctgttgccatcagcttgattggcttccccgagggccagcagggctgggggctccggrgacagcaggaagcactcccagccaccagtgcctgtcrcctctttcccctttgcccctgcttcatcccagctctgtgtgtggaggacaaagcttcttcctgcgtggctccaggaaaagatgtggctcacgtaggtggcacctgccaatagctttgtcaatcacagccccataggaacgtctggaattgcttgggagttggggagaactgtcaagaagagtgaagagagtgccaaagcggagatctgttcacctgggggccatggaggggggacccactaaagatcaagatcaaagattctccccatctcacagacaaggaaactgaggccagagggaggagagaattgctcatggctccagaactggtggcaagtttctctggactcttaggtttatttttaatatgaaatataaaaacagtttcaaatatcttattgagggagaagtaaaaacttatttaaacaaaaaaaaaaaaaaggaattcgatatcaagcttatcgataccgtcgacctcgag

SEQ ID NO: 1479 - DNA, 1294 bp, Homo sapiens
  SITE (668): n equals a,t,g, or c
catcttgtagtagcaatttcatatctctacttatagttgggacaattaaggctcagaaaaatggcaaagctgagattaaaattcaggattttctgatttctagccaatgtcatgctcattttctgtgttaattttatggctcagggtccagttaaaaacgtctgaagggagtggtaagtacaagagagatgggagttgggggtggggcttgaaggagagcacacctggccccaggtgacaagactgggctccagccctgcctcatcacagttggacatgatggccctgggtcatttgacttttgaggacctcaggaaaatgagggagcttaaaaaattctatggttcctaatgaaatacttagggatgaaattacagttctgggatttgcttgaagacacaatcagccatggtttgtcactgttgatgctgagtaatggatatttggtgttctattgtgagtctttggtacatgtttggaattttccatgaaaaaaccttctgcttctaaaatgcacaccttgattcttcccatcgccctcctactggctggtcctgtgcagctcactcatttctcaggaacagcagcagactcactactctgarggaaagaaagcccyttgctttggtctgtcctwatgtaccatattattagagactttccgacancctccccatttttwattycttaacagctaatacgatagctgtgcttycataataaattcaaagctgctctctatttctcaccagtttgaattgtagaaaagagtacaaaagattagagtactttaaaataaatctcagctaattatacatacaactgcattcactaaatgtgaatattttcaggctttctttgctaccaagtgccacctgctcatgatttaaatgggcacaaatttagttccattaaacaaaatgcagcaactcttctcctatagcgcaaactcctttaggtcctattttgaaactgagaagctaattccagtgttctcttgttagctctcggtccatgtcaaccaccccacaaggttgtttacttgaatagtttgcagccttgctttaaaagttctagtaggcaaataggtttgttgatgatgaagtggtttgtgttttataagagtccttatggtctagatggcatttgaacttgtggttccagtgattaccaggaccctgaattgaagaatacatgctgtggccttttcagctcaggaaactttttactttctattgccaaaaaaaaaaaaaaggaattcgatatcaagcttatcgataccgtcgacctcgag

SEQ ID NO: 1480 - DNA, 2284 bp, Homo sapiens
ccgaaaattatctgaaattcaaatttcagtgtccttaagtaaagttctattggaacatggccacacatttatttatatatcttcttgtggctgttttctgctacagctgcagcgtcttatactaaacagactgtaaggcccataaagcctcaaatatttactttatgggactcgatggaaactttactgacccctgatctcagtgtttcttttaagcattgcaaagatagtttgcaaaaatgctatgagagctctatgatggcattagatacctaaatgttagccagctgaaaaaaatttcctaaagtggtattaggcctaaaaaaaagtgattctagggctacttaaacaagaagtttttacagcaagagttacatcctctactcattttaatgtctaggtaagccagagctttaaatcctgtattaatttacctgtgaaaatatttcatattctcccttttgtgccgtgtgtgcgttggattccccagtgggtgtatagatgaatttataatttatgtggctggatggaagcctgggtaaatacaagcataaacaacatcaggcaatgccagtcgatagactgcgattccaggatgtgttctgtccaggcctgccgttcattccaaaggcttgcatttcaaaactgcaggcttggacctgggactgctggtaaggtggatggcagggttcacatctggttgggcttaggaaggtaccaggagagtgcaccttctagtacttgaaatgtccctccattttgaggacacaggagtggcctacctttcatctaacaaagacaagagaattgaaagctgattgtctttgtctttgaagggtttattgctttacctcttcacttcacctggctttggcacctctgtcatttcttcatttactgttttttctagcatacttttaacttctttttgtactttctctttccaactgctgtccacatgccacctgtgtatagaatcccaagaaaacataacccaccattagaattttagttgctaaactatataagaactttgagctgtagattaacatcctctaccttcctttggtgccatttgtttacccctttttccgaacaaaaaacaatacctgcccctgttccaaaggtgtcttactattccaataaagaatgcatgcctgggaataaaaagaagcttagactactgttccaatggagctaagtgttcaaagaaattcctgaattcatttcctgggggaaaaaatgtggttagtgacctggaaactactaacaacttataaaactcaatactctgatggcgactctgttcgctttacccctaagacatcttgaaaggaaagacttttgtcagagttgggcttctaaagttttaataggaaattgaggcactttctgtataattcaagccaaagatttttttttttctgggtttgaatgattggataattgcctcaattctctgttccatgtaattgagatcacttgactcttcttagtgctaataaagagatgttgggattcacggtttattaaccaaacttttcagtttgtggacctgtcattcaaaactgcaaacaaggctgatcccatgcaaaatagactactgcctttatgctgtactaagaatcagtccctcttaaaggatgcatttataacctttatgcaatgaggaaatttccaggtagccaattttctttatagtgctaccagccttcagcaagcttaaactctgccctgcaagcctgaaaccctgcttctctaagattctacataacaggagattaaacatccaaatgtgtataatcgcattctggacagtatgaagaagctgtcttggaatattgttaactattagaatacttaaagtgtgcacatcacccaatttaggatttcttggtaatagtagcctatactttagaaaattaaagaggaggaaggggccgggcacagcggctcacacctataatcccagcactttgggaggccgaggtgggcagatcacttgaggtcaggagtttgagaccagcttggccaacatggagaaacgccatctttactaaaaatacaacaaataattagccaggtgtggtggcctgtgcctgtaatcccagctactttggaggctgaggcagggaatcgcttgaacctgggaagcggaggttgcagtgagccaagattgcaccactgcactccagctagggtgacagagtgtgaccctgtctccaaaaaaaaaaaaaaaaaaggaattcgatatcaagcttatcgataccgtcgacctcgaggg

SEQ ID NO: 1481 - DNA, 1395 bp, Homo sapiens
gccttcctgaccctagatgggctttgtaaaaagagcaagtcgtgtgtgccagcctgtgcagcagtgagggcacaggcagcaccagggtcccgggtgtgtgggtgctgccccagcttgcagtgtggtctcctcggtgctggccacagctgtgggtccccaggaatattgtgctgcaggtcttagacagatttgggtactactggttctctgttcagcgtggcctggacagtccacagatggtagtagaccatggggtgttgagatgcaaggagactctgccgttctttcacattctgcttttgctcctgacagcttaggaaagctctctttgaaactttggtatgtgtggacctgagattgaatgtatctgaaaggttgctaatttctcactgtccttgcttcccaggacgccaggaaagcatgtgcagatgcaactctctctcaggtaagagcccactgagtcacgcagagccatctgcctgtgaggaggctagcacggcacccacacctggagcctcgggagggctctgcttgcattctctgttgcgcagtgaggatgccaagccactgcttttattaagaagtcattctgatggtaggcataggaaatagaggggcttattgagataaaaatgagatatctcaagccttgaataatcatctacctgttacagagggtaatagttgtaaaatattgttattgtcttaagatattttgaagctcctctcctcaacagaatctgcctcagaacttctatttctaatatccaatttgataatacctcaaaaagttaaacatagaattattgtatgactcagcagttctgccattaaatatatgcccaacaggattgaacactgcttttcaaacacacacatgtacatagcagcaccattcacaatagccaaaatgtagaaacaaccaaaatgtgcataaatgaatgagtggagaaacaaattgtggtgtctctgtgccctggagtattgtcagccattaaatggacgtcagtacagtcagaggctgcaacgtggataaaccccataaatattacgatagtgagagaagccaaacaaatggctatgtattgtttagttctatttatatgaaatatctagaatagtaacattcactgagacagagtggactagtggccagcaggggtgttaggggagagagggagaggaagtgaacagggagtgactgctgaatcaatgtctggtctccttttggaagatggtttggaactagatggtggcagtggttttacaacgagtgtactaaatgccactgaactgtagactttaaagtgattaattggatgttacgtgaacttcaccttattaaaaaaaaaaaaggaattcgatatcaagcttatcgataccgtcgacctcgag

SEQ ID NO: 1482 - DNA, 1229 bp, Homo sapiens
  SITE (710): n equals a,t,g, or c
aattccctccatgccaggctaactcttttggatttttttagtagagatggggtttcaccattgttggccaggctggtctacaacacctgacctcacgtgatccatccgccttggcctcccaaagtgctgggattacaggcgtgagtcaccatgtccagcccacatacacttttaaaaataatagtttatcttgataaaatctgaattaagctgttgtttttatgaggattgtttctgactcctgtttctcatttcccttttcacctcccctgtcagacacatacactccacgtccacaccacacatatgcacactgcggacttcaccactcacattcactttactttgttaatctggctgcaaggaaatttcttagcccttgacacagtatgtgaagagagttctgttggcagctcaccatggtatttcaaatgtgtgcctcaaattgagagtgccggttggaaataacaattcactctaagcagtgcttttcattgaaatgtaaattgccttatacccgttttcattcttgcggacttctcaggaggaagacaggttttatgttacaagcattgaagagaaaatctttctcctggtatctctttttttagtatgcaacaagattgaggatgattcatttaggcaactctggtctactctaggagcttgcatatctaacaatatgcagtattctcaggaattttaccagngtgggatcctggtactttgaggggagaaggataacttcawatctggatttaatttcygagttaataaaccgccatcaccctggaatgcccatttttatttgtttccttatccatttatgaactaccttaaggcatttatcaaatagtgacttaaatctaaaaataaaattaatgtcctttgtttggaatgcttttagagaccattaggacttaggagcagtgcagtggatgtggagagaatgaaagattcaacaataactatataaaaccctaaggtcccactcaagtggggcggcctggccaaaatgtagctcaaaacataatagtggctatgagaaaaaagctattttgttgtcattgttataacacccagcaaggaactgtataggttatagggccttttaaaatttttcagctggataccactttatttttattgtgactttcaaacacgaaaataccattatgttaaaaaaaaaggaattcgatatcaagcttatcgataccgtcgacctcgag

SEQ ID NO: 1483 - DNA, 1166 bp, Homo sapiens
cgaagcaatttgcttgcacatctgaatatccttcttgtgtctccattttcactcttgaaaactgaaagcaatttgacttttatttttgtttttctaaagaacagctaggtgaaaggaggttaagctgattgtcactctgcctgcccactacctactccccaccatggtgtttcatgaaacatccccaccacctgaagtgatctttttaatccttgtgatagtaaatgcattgataattaacaggaaaaacatgtttttaaataatctacaaatgagaacccaaatggtagtgttttgtttgacagaagtaaatcaaatattatggtttaaatataatgcaaaatttcaggacagttaatttgggcttcccttaccctaaagagggtttttcttataataaggagaagaggtgtggttcaaagaaaattaagagacaaaaccttcaggtacataatgcatgaaaatctttaaatgcctgcaaaaattaagttctgttataataccagccaattctgaattagccaatgccctaaaagcatctaacaatttaaggttatcttatgagtcctatgaaaacaattatttgttgctaaatttgagttttagctaccaacgccatgtttacgtgacaagaaattgttttggccctgtggtttatgacgtgctgctggataagcatttatgtaaaactgagtatttcaaagagaaaccatttacaattggaatttccacctgtgtggctgtttgcagacctacctctgtcttccattttgcatcctgtcagtgctataattagtttgatcactttgtcttgtttttcagtgtctacaattatagcttattcactatgttctaactatttaaaaataatgggccgggcgcggtggctcgtgcctgtggtcccggcactttgggaggccgaggtgagcagatcacagggtcaggggatcgagaccatcctggctaacacagtgaaaccccgtctctgctgaacatgcaaaaaaattagtcgggcatggtggcgggcgcctgtggtcccagctactcgggaggctgaggcgggagagtggcgtgaacctgggaggcggagcttgcagtgagccaggattgtgccactgcactccagcctgggcgacagagcgagactctgtctcaaaaaaaaaaaa

SEQ ID NO: 1484 - DNA, 2375 bp, Homo sapiens
ctttttttttttaagacaacagtaatttatttagctcctgattgtgtgaatgggcaatttgggctgggatctgcttgagtggttcttctggtcttgattggcctcattcatgtgttagctgccatgttggttgggctagtatgacttcagctaggaaagcatgtttctgcttcatgtggtctctcattctccagcatgctcactcaacatgttcatggctgggtaaggttccaacagacatttataaggcctcttgaaacctaggcttggaactggcatacagtcacttcttccacattctattgatcaaatcaagtcacagtgccagcccagattcaaatggtggggaaagagacttcatttatggaagggaggagctgcaaatttcattgccaagaggtgtggatacccagaaagatacatttgacaaaccatctatcaaagttactgtcagaggtatgtttttggaaatatcatttggagtgggatgtgtcctgtatgactggaatcgttttctatttgtaacagagaagcgtgcccactccttgcacccatagataacccaatgccgaaggatatgagagagagagatgtccagtttgtgcctctcccagcttcttgtccagagactccttggtttagattttgatacactacttagaaaaggtggagagtttctttaagatttcatccacagagggccgcacagagggatcatgggcccggcactcatcaatgatctcccgcagctctgaagggcagtcttcacccagtggctcctgctgccgcttcacagccaccagcttgcggatcttctcagaattacagccttgaaacgggatatctccagtggcgatttcccagaggacgattccaaagctgtatatttcagactttacatcatattgataaaatacatcttccagttcctgaggtgagagatatgctgtagatttgactctgtctgtcttttctctcgtagttcccaaactcatggaagtctgtgttttcctcaactcaaatcctgcaagcggtataggcctcgggctgcccccaggactaggaccatgcgcttgccaaatgtgaggtctttttccctatccaacagctccctcagggtcccgagttcacagtactccatgacaatggagaattgaggcggagtcactgtttcatcaatgcaaatcccaaatatacgcaggatgttgggagattcgaatttcttcatggttttgatctccttattgaaagtctgcctcactattgcaatgctgccagcctggagttttttgaatacttttatggccactggagctctgtggtattctcctttataaagtgtgctgacttcattttcccttagcagaatccacggggatcctgaaagctgctccttcttgatctccttgatttgctcttgcgggatctcctgcatgcattttggtggtaaatactgcctcaaagtttccttgatttctttcatgttgatttctaatcgtctcagtgaagcttctattttttcattatctcttcttagcatctggaaagctcgcctgtcttcgtctgcatcctgctgatcttcctgtgcccaggacgctccttggcttatgggtgaaacaggcatgcgttgctcaacctgaagtaacagcgagagctccttccagacatcactcagcttcctgttcacgtccttgaagagtattttgtcctggcttgctgttagaaacctgcagatattggatctattgctgaacttttctatctccccattagcctcctccagggcagccttgaagcggttcatggctgtggttaacttctcagagggcacgctcctctttccttggtcctggagcatctccagaggcttgatcaggccgaggacgcggtggcccaggcgccggcactgtttcttgcagtatttcatctcttcacaccgtttgtggatgacctggccaagggtgataatatgcttcaaattttccatgccttcgcgcctcccgaggggtgtgcgtccaatctgtcccgtgcacagttccaaaaagctcgctcttccaccttctttcccacgaccgcctcctgcccaggcgagaagtttgcaaacgcgaggcccgcgggagttcccctgcgccccctttcctggtgcccgcaccctgcactctgctgactgtaccggacgccacacgtggctggcggcgacaaggcgccccgatccctacctgagggaaaccccggccactgcagctgcacttgagcagggtccctccactcagccacttggatggctgtttctgtccagtgccctccggaggccactgcctcaggtctgtgatgcctgcagagaatggaattcgatatcaagcttatcgataccg

SEQ ID NO: 1485 - DNA, 1330 bp, Homo sapiens
tacacaagcctccacccagcttctaattgtctcactgagaacagacaaaactccagtagaatccttgaatgacagctaattgtctccagaaaaaatccaaaattgcctccctcccttaattgtagtgcagcatgattctgtttttctgctgggcccctatttgcttctttctgtgcaatgaatcattgaaagagtgaccaccacggacttggagaatctttgtagcttttagtctgtgtttgggtgtggctggagagacaaattaacacacagagccggaccttgaaggggaaggtcctcatttgtctcagattgggatcatttggggaatcagaaaatgtttatatcagaaaagaagagaagtcaatgtgtttcgcaggtttgtggttttttgaaggagaaacatctagattctagtcctgttcctctgcctccttcttaggtgatgttagmcaaaataattcacctytctgagtcaatttgcttatctgaaaaatagcawtaacaacagcactcattttactagggcatgtgaataamcagattttttcccattgagtggcaggtatttattgagtgcctactatgtgccaggcaccatcctactctctggggatacagcagtgamcaaamcagacgcacacctagtgatgagggatggagtaaagcccttagccgatgccagacagaggacatgagtcacctgtagtcgctgccactgctgctatttcatggctacattttgacccctgtggacccactgaaacctcctcactgcctcacaggcagaacaaggacagggtcttggccaccaagtttactcacttgagctgcatttagattattcttccagctaggccatgacagtaggtagtggcagctctctgtaaagatgaggggtccccagctcggacccctggtttcctccacctgcctggaccttacagtggtagccaggtgtgtcctgctgactgggaagctccttacctgggtgcttgaagtatggctccttagcatgtgtggagagaaggctattatgatagcaacctgcaggggtgggatgtgtaccagaccttcaccctggaactcccgaggaagtgcctgcagattgcctggcaggtcttattcgggtgatgtagagcagaacgctggggccaggttctgaagtcagacccctggactcaactcacgcacaactccttacctccaaactgtgkggccttggtcarsgraactgacttctctgagcttcattttcttcatcttaaaaaaaaaaaggagaatcacaccacctaccccatggagttgttatgaggcagagagatgtgat

SEQ ID NO: 1486 - DNA, 1470 bp, Homo sapiens
atatctccactcgcacgctgagttgtgcttcacacaagttttgcgcacggagtattccattaaatctactgaagcagtggggcaaggagaaaggagaggtgactgctgatgtttttaaagctctgacagtcacatatagattgtcccaggtacccctgctgcccccaagacactccaaaggcaaagatggatggtgacaaagtaaccttcatgcagaaacaagaacagtcacccccaacaacaagccctgctgaaggtgaagaatgccaccaggctgcctggcagttactgagtgcttattcctgctagcctattggagtcacgtcatatttgttacatggtaacttaattgtgccttccacgccttcacaaaatcagttgtacaagagaaggcacccaccacagtccatgtgacctttctcggtctgatttacatagtggggatgatgacactcgcgttgtagagtagttgcacgattaaacctggcacacagacataaagcactcaatgtctgacacatagtggactctcaagaagtttgtcatgcaggggacacttgaatgcccagtatgggccagacagcatcagctcatttcagtcccacagccctgtgagggaggaactctgccctgttttacagttagggaaattgaggcacaaaggctaagaagtcgatatccaagggcacagaatgattgggtgacggtgagcccaggcagtgtgacaacaaggttgctgccccacgccacctctgtctttcgtgggtatgtcggtgtgaggtgtaggcagccctgcactggcattcagcaggcgggactcccgggcaggctcttctgcgaacactcatgggccaccagccctttctggaacttgccttttttttttttttacctgaaagctacgtgaatcgttggtaaattggtgtaaraatggaactgagtcatctcaaaagttcctttcagttctaaaatyctgkgaattgaagcctactttttcactttaaatgatttattgggtttacagttctttacgctttctgattgaactgatttgaagttcttatttcgtgtgttggggaacacacccccaacccgtcacagcgtggccgtgggtgggagatrracgttaggctggccagtcactagggggcagcatcagcacgggtctggctgtccctggccttagggagcagtttctgcccctcctgccccgtcagaaagtctcggactcctctctgcttgcatgtgtaaagttttcattttcaggggccttttagtcaaaaaaaataaagctgtatgacttagtgctgaaggatatgaattaggcgtagctcttgggttggcagcataaaccaaggggcatcaacccaccaccgacaagctaagaatggtttttacatctttaaatggttgaaaaaaaaaaaaaaaaaggaattcgatatcaagcttatcgataccgtcgacctcgag

SEQ ID NO: 1487 - DNA, 1725 bp, Homo sapiens
ccttttttttctgttgttgttctacttctgggagacttcttcaactttgtattctaatatttctctgaatggaaaacaacttcatatatgattcacacaccacataattcacctatttaaagttcaatggtttttggtatattacattattagttttttaataattgtagtaaaacatataatacaaaacagttatcattctgaccacttttaagtgtaccattcagtggcaataacttagtgttgtgcaaccataaccacaaactatttccaaaactttttcattatcccaaacagaaactttaatcattaaacaataattatccatttctccactctgcaacctggcccctagcaacctctattccactttctgtccctatgaatttgccaattctatatacttcaaaaaagtataatcatacaatatctgtccttttcagtttggcttacttcacttatcataaggttttcaatgttcatttacatagcatgaataaggatgtcattcctttttatggtggaataatatcccattggatgaatataccactttttgggcttttgttatttttcattgacatatgataatcatgtggctggtgtctgcaatcccagcactttgggaatctcaggaggggggatcccttgagcccaggagtttgaaaccagcctgggcaacacagcaagatctcatctctacaagtaatttaaaaaattaggccaggtgcagtggctcacgcctgtaatcctagcactttgggaggcggaagcaggcagatgacctgatgtcaggagttaagagaccagcctggccaacatggtgaagccccgtctctactaaaaatacaaaaatcagctgggtgtggtggcgcacgcctgtaatcccagctactcaggaggctgaggcaggagaatcgctggaacctgggaggcagaggctgcagtgagctgagatcacaccactgcactccagcctcagcaacagtgccagatatctcaaaaaaaaaaaaaaaaaaaaaaaattaggcaggtgtggcacatgcctctagtctcaactactcaggagactgaggcaagagactcgcttgagctcaggaggttgagggtgtagtgagccatgatcgtgccactgcactctagcctgggtgacagaatgagagcccatcacacacaaaaaaaattgcacatatttatggagtacagtgtgatatttcgataacatggatacaacgtataacaatcaaatcagggtaattagcatattaatactctcaaggatttatcacttctttatggttgagaagactcaaaatccattcttccagctaatttgaaaatataaaatgaattgttaattatagtcagtctatagtactattgaacactagtaacttatccttcctatctaactataaacatatagatggtcaataggcatatgataaaatgctcaacataactataaacttcagggaaatgcaaatcaaattttaaaaaaatttttactgttggccaggcgtggtggctcatgcctgtaatcccagcactttggacagccgaggcgggcggatcatgaggtcaggagatcgagaccatcctggctaacccagtgaccccccgtctctactaaaaatacaaaaaaaaaaaaaagaaaaaaattaaaaaaaaaaaaaaaaaaaaaaaaaaaaaaaaaaaaaaaaaaaaaaaaaaaaaaaaaaaaaa

SEQ ID NO: 1488 - DNA, 903 bp, Homo sapiens
  SITE (302): n equals a,t,g, or c
tttagtcctgtgagtaaagctttggttttgatgactgtctcagggaaaggtagaaaggtgcttggtggcagtgaacttcctgctgcagaagtgggtgtgaccccagtgctggagaatgggctgtgagccgagtttcccgcacctgcatgagtgagcgccatggtccttctccacagagcgtcctgctgtcactttggtttgtgttaactttgacgcctttcttgtttcttactctgctttcctgcatggagcacacagccccggctccctttcagtctgcatggcagacacctggcctctrnaggtccagttcattctgtgtcccctttcggtcgtccctatgttccgtcaggtgattgagggtgaaggtcggccttggcagcccagtggaaagtcccttgactcctggccgtcagtggcagtctccagcctttgggargaggaaacttctatttaacaagraatggaattgactttgccacamacagccagagcgatgatttgtagagccaacctgctgagacattcaaagcatcagtcgtagggtcaggaccgccaggtgaggtgtggctccacctgcagcagcctggggcaggttgcctagcctctggctttagcatccccttctgtgaaatggggaaagtgatgggacctggatttgtagggtggttgtgaggacctacaggggtttttgcaaaatacttagcccagggctgactaaaagattcagagacgctgggcatggtggcacacacctgtagttccaggtactcgagaggccgaggcgggaggatcacttgagcccaggaattaaagtccagcctgggcaacatagtgagaccttatttcttaataaaaaaaaaaggaattcgatatcaagcttatcgataccgtcgacctcga

SEQ ID NO: 1489 - DNA, 1773 bp, Homo sapiens
cagagaaaggaaaaaattcttagcacagtacttattacaatctgatttcttttctttgtttttctgtcaccttttactaggatgtatgctccatgagagcagagcttcatggtcttgtttgcctctctgctgtctccacaatgactgcagcagtgtctggcacagagatgccaaacatttgctaaaggaatgagtagggaatcaggttctgttttgtcttacaccccccagtgcctaccactgtgcttggcccataacaagtgcccagaaactggtgggtactctgaggccactctgaatataattgctattggtagatctgtgttctcatcctagaatttagaatgggaaagcggtttagaactaagagtctttcaagtgtttcgagccaaactgcaaagcttttagaatattgtctctgcagcctgaaactgactattacacaggttcccccagttcccattcaagagcgaagtctagatgtttagaattctatgcctaaatagcagaacggaagcctcattttattttgattaaattcctattttaatacatacattgcatcagtcagtgagtcagtgagtatttattgagccccttcaggatacaaagtagtgctctggtagagctattgagtttgaaatattagtcacatttttaaaccaaaaccaaatccccaagtagttgaaagtgctgttcaaattgtcagagtgcagttcctgtagactgtattttgtgagatgggcttttactttatatgttcccacttgggcaggaacaaaagtttggtaaattactgaggtattacattttaccaaaatgaaattttgaagtgatccttcatcattagctttcttcctgtccaattgttgagggagtgtgtgataattacagcatcttttgagtaatttaagattttgggatcttgtgctgccaggacagggtaaagaataacacttgccttcactctttgacactagtgttcaaattgggcagggaaagaaggggtattattgttgcctcccagatcccaactctatccaaagtactgtctcctttacttctgtgagctgacagggttgcagaaacacataaaatcctagactatcttgacatcaccaaccgtagagtttgtgaaggtaacgtgtcctctacaaattctcatttgttttcattgtttgttactcttttttgttcagatttctctgttgacttctgcagtgaaccacctcaaagccaatgttaagtcagctgcagacttgattagcctgcctaccactgtagagggacttcagaaggtaggtgccatgtgtgggtacagagacttcagaaggtaggtgccatgtgtgggtactatttgccataattctagcttcttataagttttcattgaaagcctagcatttgaaatcagctgctccaagagggcagtaatggagtgtatcactgtgtcctaaagaattcagaacaattttgttttggtctggttagttaggcctttaatttgcaacaggttacctcagctgtgatttatatgggttcatacctttttatttggctctctgagtcccagaattgctctgctggcactcttgtgttagcatatatgggttcgcttttcagcttgctttttcagttcaccactcacaatatcttcatcaaagcagaccaattgtacatgatagttaccctaaatctctgttactttccataattaagaaagttaaaaaaaaggaattcgatatcaagcttatcgataccgtcgacctcgag

SEQ ID NO: 1490 - DNA, 2218 bp, Homo sapiens
ttttttttttttttttttaatacaactgaaccaacaaatttatttagttagtgctgataaagacagcagccttgagagacaagcagtaattacctggtctacttaatgatgccctttgttatattttacaggcaaaaagaatgattcctcagcagtcattgtgaaattttgtgggccacaagtattgtgcacacatgatccttgatttagagtcaacctgatgtccattatagctgtggaaaggcagcaggcagttgtgtcgctcttcacaataaggaacacatcttgctttcagcatgtgagaggaacaaaagcattgatgtaaatgtgcctcaaagtgagaactgaaaacattaacataaaataaaaaagtcaaataagactaagttcttacaactacctataaaaattgaattattacaactaaagcagcaaatcaaaacatctgctgaggttttctggtagaacaacaacaaaattagttggtgcccatgttcagtaagtcactaccattgacaaaactaaatccaaaataggaaattgaaaagtgcataatgaaattaaatcttgtatcaagtatttgtggaaaactggaaatgtttctctggtatggttggtgaatgatgatttggaggaggtattaaagtttatccgatccagctttggcctggtgttccacgtagaaaaggatgtaggccttcgccttcaccacagtctcctcgtcagtcagtgttacagtactgtcattgaagtggaaccagcggccttcgtgagttgcgtatgctgtgtaatgtccagaaccaaccccggaaccatggtgcaccaccacagcggcgaggtcatacaggcagctctccgggccactgttctcaggctctagtaagtagcatttcatgtctaggcctctcagtggaaattctacgtatgtatcaactttatttcttaaatatgctgtccaatgaaatcttttcaaatgtaagcatagcaccttgggtagtttttgaatccaaaacttttttgtggacttttgtttctttttgcatttatggcacatatataactctgtctcatcaagttcttctaagtcggtaaaactgcgaagacaatctcgtaacgaacaaactggtccattttcttgattcttagagcgcttacttctgaactgacttggaatatctaatgaaaggtctaggaatggatcaaactttctagattctgtcccacatatgaggcagttaacctcattttggagaatgcctccgaatatagccgtgacaacagtagatgctccatttatgcaacacttgttacttgcagacagagtagaattctcctgcagaattgctgagcgggaaacaccgttgaaaccgccctgaagttccaagtgtaggtggtccaaaaggtagcgcatgaattcatgggcgtcctgctgttgatagcccctaaagtttggcataatcttccaaacaacataaaataaggactctgggctaaatgcagtctggctgccttgccataaagcacagagtgtctttctaaactcttctaccaaagacacattgttatccccttggctcctggtgtggtatgtccgccttcctgctgttttcccattccttaactccacggcgggcagttctttgaaataacagcaaaactgctcaatgttactgagtgactgaaggatggcattcatgaaacatgtgttccccaaattccgaaggcctgtggcacaaatggcagtggtgctcccatttacttttaataacttgctgtttagtgttgagttttccaaaagttttcttttcttatgcctgtcagctgtgaaagctgagttttccaagttctgtaagtgttctctgactttctgtaccagtcccagcttggtgtcattaaccacaaaatcatcacagcgataacagtatgtactgtagctactgcaatccatacatactgtgtgctgaactttatcttgcttttctgatttcttatggttggttaaaggtacttgtgcatcttcataatgtttttttgcatggccattcacatacctctcaaaatctaggagaggaatctgtctcttcaactgcagaatttaagtgcttctacttttcttcttttttaaaaaaaagttatctgtacaaagtattttcaggttccccaaatccttccacagtggacacttgaacaagtcaaacagacccaagcggacgcgtgg

SEQ ID NO: 1491 - DNA, 1119 bp, Homo sapiens
  SITE (1075): n equals a,t,g, or c
  SITE (1077): n equals a,t,g, or c
  SITE (1094): n equals a,t,g, or c
tcttacgcaaccagatatgctatgactgtctggtactttgatgctgaagaaagggcagaagccaaaaagaaattcaggaatttaactaggaaaactgaatctgccctcactgaagactgaccgtgctctgaaatctgctggccttgttcattttagtaacggttcctgaattctcttaaattctttgagatccaaagatggcctcttcagtgacaacaatctccctgctacttcttgcatccttcacatccctgtcttgtgtgtggtacttcatgttttcttgccaagactgtgttgatcttcagatactctctttgccagatgaagttatttgctaactccagaaattcctgcagacatcctactcggccagcggtttacctgatagattcggtaatactatcaagagaagagcctaggagcacagcgagggaatgaaccttacttgcactttatgtatacttcctgatttgaaaggaggaggtttgaaaagaaaaaaatggaggtggtagatgccacagagaggcatcacggaagccttaacagcaggaaacagagaaatttgtgtcatctgaacaatttccagatgttcttaatccagggctgttggggtttctggagaattatcacaacctaatgacattaatacctctagaaagggctgctgtcatagtgaacaatttataagtgtcccatggggcagacactccttttttcccagtcctgcaacctggattttctgcctcagctccattttgctgaaaataatgactttctgaataaagatggcaacacaattttttctccattttcagttcttacctgggaacctaattccccagaagctaaaaaactagacattagttgttttggttgctttgttggaatggaatttaaatttaaatgaaaggraaaatatatccctggtagttttgkgttaaccackgataactgtggaaagagctaggtctactgatatacaataaacatgtgtgcatcttgaacaatttgagaggggaggtggagttggaaatgtgggtgttcctgtttttttttttttttttttttttttagntntcctttttaatgagctnaccctttaacacaaaaaaagcaggg

SEQ ID NO: 1492 - DNA, 1955 bp, Homo sapiens
  SITE (1106): n equals a,t,g, or c
gtaattttaaaattttcaagtagccacataataaaggaaacaggtgaaatttaatgacatatttcctttaatacggtatatccaaaatattattatgtcaacctataatcagtataaaaacctgttactgaaatattttatagggcccatctcagttcagactagccacatttaagtgcttcatagccacatgtggctcatggccatccatatttggacaatgtactttagactattgcatctgtatactcttgtgccgtcagctggggggtggggtgtgtgtgcgtgtataccaaggcagtgagcatctgagctttgaacctcaaagaccaaaatgccctgcccattttcctgcttatcagctgaggaatctttacccacattgacacatgggcttgttctgacccaagtgcatgcaggcttccagagcagattcagaggcctaacttagtcctttagctttcctcccagcacagaactcccaaggttatctgcaagtaggccttgcctagagagactgagttttcaagttgtcagttttcccaaattgtcctcaagcatcttcctctggaatcaccttactgtttagtaaacattcagaggacttgctacacatctgggcagtctgcattgtaattcatatgtgtttacacatttgtgtcttcatctgctaaagcacctttgaaccatattgtaattcataatatctgaagcaattattatgaattgtagtaattcataatattgaagcgattcataatatctgaagcaatccccagatacgggttaggcatggccctgctctgagcaggatggcaaaagtggcagtccgtgacgcagcccttgttaccccaggctattactaaatggtggtggtggttttatcttaattaaaatgacatcaccaacaatgggccctttcctgtctgccaggaaaagttttctgtagtgacgcacgtgttgtgtgtgtatgtgtgcgtttgaggctatattactcattgctacggcagttcaaaatgacttggaaaaaaacaatgaacgctggtcattgatatgtatactgacatgtttaagggaagttactgtggtctgtaacttatgaaatncatwaaaatatgatgggtggagtgacggacacatggacagatatgaagcaagcactgtaaaatattagtggtagtttttgtatgcccatactcacggcaccattattcacagtagctaagagatggaagcaatatgtgcccatcagtgggtgaatgatcaacaaaatgtggtatattcatacagtggaatattattcagcctctaaaaggaagatacgctgacatgtgctgcaacatggatgaatcttgaggacatgatgctaagtgaagtaagccagtcactggaagmcaaatactctatgctyccatttatgtgaagtatctagagcagtcaaatgcatagaaacaagtagaatggtagttgccaaggmctgggggaggaggaaatgaggagttgtttaatgggtatagtgkttcagttttgcaagataaaaagtcctgtggattggttgcacagttaagttatgtgaatgctgtatgccaactcaactgtcactctaaaatggttaagatggtaaatcttatctttattttaccacagttttttttaaagcatggtaaacaccatttcccaggatgtaaatcggtactaaaaaaaaagtgctccaaagtaagatatatttgggaaacacagggataactaaggttagataggtgttctttattgcaggaattctaagagcatttaacaaattaatttacactgggaattttcagtgtggagggtctggctcatagcatttcacaaacattatacttcagagtcccaaagcctttaaataaaatgttaatggtagaaactcaaaaaaaaaaaaaaaaaaaaaaaaaaaaaaaaaaaagggcggccgc

SEQ ID NO: 1493 - DNA, 1528 bp, Homo sapiens
aattcccgggtcgacccacgcgtccgcatgattacactaatgcattccagccttggcagcagatcaagaccctgtctcaaaaaaataaataaaaataaaataattgctgtgaaatttctattaacgtttttgggaaaaccagaggcttctgtgtgacatgtgaatcacagaggagaaatcatgaatctttatagccttgtgttaacatgacttccttttgttgatagagtggtttattagtctcaagacctttgaaatggcacatgaattgcttggacagattatggagacatccacccttctttagagatttaagtaagtagaaccagttagtgtgcctcttctgtttctcaccttgctcaatgcagaatgaacttggtgtatatccaccagaagcacctgcttatctactgtttgctgtcgttgcaggtatctgttgagattagctgtaacgagttgtatgtaattttataactaactgaattaagaaaagcctttgtaagattcagtatctgcttcaggtcattgaaatgtaaaattagaaagtaagctgagggcaggggatttttttctgttttattccatttattccctcaccacctttgccatccaccaccaacagtttcttttaaatttagcatccagagtagacctttgacaacgcaaatcagatcacttcatttgttcattaaaaaccttcaacaggtttcacattattcttaggattatatttaacatccttatacagtaatctccaagcctctccttgatctggtaccctctttccatctctaatctcttctttaacactcctatacttacttactcagccccaggcacattggcatatttgctgttgcctgaacatgcaaattccttgaacttgctgtttccttgcctgaaactctctttcctcagatatctgcctggccttcctcttaacctccaagtcttgtctcaaatatcattttttcagtgaggccttgcttggccagccctttccctcactatatcctgctccccaacaattgatttttacttatccatataacttttatccccctgtgtgctatatattttacttatttcttggttcattggctgtctccaccaaaatgtaagtgccatgaggacaggaattttattaatatcagtttgttcatttctatacctttagtgctttaaacagtatttagcacacagtaagcattcaattaaatatgtattggactgggcacagtggctcatgcctgtaatcccagcactttgagaggccgaggcaggtggatcacctgaggtcaggagttcaagaccagtctggccagcagggtgaaaccccatttctactaaagagaccaaaatcagccagtcatggtggcatgtgcctgtagtcccagctactcggtaggctgaggcaggaagatcgctagaatccaggaggcagaggttgcagtgagtcgagatcaggccattgcactccagcctgggtgacagagcaagactctgtcttcaaaaaaaaaaaaaaaaa

SEQ ID NO: 1494 - DNA, 2069 bp, Homo sapiens
ccacgcgtccgcctcgtgctcatcagagcatgccaatcctaagccattggacatatgtagactggtttttgttgttgctatgtacatataaatatatatataaaatgaacatagttcatgctttcagataaaatgagtagatgtatatttagattaatttttttagtcagaacttcatgaaatccacaccaaaggaaaggtaaactgaaatttcccttggacatatgtgaaatctttttgtctttatagtgaaacaaagccagagcatctttgtatattgcaatatacttgaaaaaaatgaatgtatttttttctccaaagaacagcatgtttcactcaatggtgaaaaggtggaaacatttatgtaactttatgtgtatctgtcttgatatctactgacattgtctatatgaggaaaatgattactggtcatgctcctgtgagttttttgggaaggtagggtcatttctccctgcctgctttgtgccaactagcatgttgcatctacatgcattatgagtctggttaggcattactttaaacatacataaagagacagtaggacattgtggctgagtctacccagctcaaggtaaaggagaatgttgctaattttttagcaaactagaccagcattattactcaaactaaaaatatcacacctgaaaaatttaatttaggacctaaaatgtctagattagctttctgctttttttatttgaataactcattcagttgtgaatgaattcctctttatttggtgccacagtcaccaaatgacaaggatttgccactttcccaccaaattgtgagtgcttgtaatttaggtctctctaccttaaattcagtataaggaaacgtaattatgattgattttttccaaagatgacaagctgtgttgaaatacattttttcttttgaccaattgacagaatctaataagctttaataatcttccccttttatgtgaaaagttttgagaactgtgaaatgtttaggaacaaactgttgaaatccattggaagggaaaaaagaaagtggtaccagtgttaccagctcaactaaaacctgcaattctgcatttcaactcttcacttcctcagcctacaaatagctcattagatgacattcacgcatgctgggtataggcaaggaaagtaattttcaaagtacatttgcagttctctttttcagagatgattctatgatagtgcctctgaaagttgatgcagcatttttgcctttccaaaaagtatttatcctcactgctttttgcagtacttgtattttcacagatggattatctggggtaattttcttcaaagggagtttgttatacacagtgaaaatgtattatagagtagaatagtaaagctctaggggtttcagaaagctttgatgaacagatgacaaacatctgaaaccccctccgcactgttacccagtgtgtatataatgacttgttatagctcagtgtgcccttgaatccatacagtttcttaaaagacaataaaatcttattaataaagttaatgtaacttctaagttctagaaaatgctgattctgtctgccccattcaattgggggctactaattgatttgttgcttggatttcctgagaatttctctatttgtaggaggggttttttctttttacggtctgttgatgacaattactttatgggtgtgatgcaccgatggtagccaaggaatctgttggggaagttcggaaagaaaccttttctttcttttattcagtttaaagtaaactttatcctggatgtttagaatcaacattaagagttatattatggtgttcagagattaagctgacttggatacaatattttcttttgaaaatgaattttctttttcatttgtgatttttaaaaaatgttgcaccagttatgcttcatgcatcgttacatcttcatcaggttaatgtaatgtctagttcctttgcaataaatatattgctgcaaaaaaaaaaaaaaaaaaaaaaaaaaaaaaaaaaaaaaaaaaaaaaaaaaaaaaaaaaaaaaaaaaaaaaaaaaaaaaaaaaaaaaaa

SEQ ID NO: 1495 - DNA, 1528 bp, Homo sapiens
caggccaagaaatgatcataccccttgccaaaggtaaaaaaaaaaaaaaaaaaaatgagttgaaaattgaagtgacctctttccagctgacttgcaggcttattttgtaacctttcctcatccagttttccctgagaacctgggtttatctctagatagctgttcaggttttttagctgaggggtaagtatcctagctgagagttttgcatctttgggctgggtttgcagtggttgtgttttgcataaaatgtctagtctttgccacagatagtgagctacccactaatgagcccatggttttatttcagaagcacatgagggtgtgaaaccactctgttacctttctgtattgtcttagctattcaagccagtcagaggataatatatatattctcatcagcactcagagtagtcagtgaagagagtagatcacacttgggcacaccaggattcacataaacattgtatcttctctgtggatgctcaggccttgtctacaatgaggctttacaaccttcctttgttttggctcgggattacttcctggctgtctaataattgaaccataaccatgtaatattatgtaaaggcctggaaattactgttgctaaaaaaagtcatgtagtttcatgtagtgtagcatccttggcatcgttttccaaaatttgttccttctcccttttttttttctttcgtgtgtggcatgagtgtgtatctgtgtaaatatgattgtatatgtgttactccgatatgtaatccatttcactggctgagtttggcccctagccatgtgttaatataaagtaggcatggcttcccaatggaaatctctgagaatgacagtggagttgtgcaagcattttacattgccacataattgacttgccattttatggttaaaaacggcacattaggcagttgaatatgacgttaccttgcagactaaaaggttgaaggcccgaaactaacttttagctaacaataagggctgtgccccaatggaaactgagttcattttctgagaaaggtttggatgactgaaatatttcctctacagtcaaggactttggcatgyggtggctgaaactgagcttttttgtgtgggctccagttctcactgttctgcaatgctcatggcaagttgaatggtgagctagcttataaattaaagagctctgaactgtattcagaccgactgggtatctagcttactgttttaacatcattgttgaaaccagaccctgtagtccagtggtgctgccctgttgtgcaaactgctcctttttctcgtgtttttgtaaagagcttccatctgggctggacccagttcttgcacatacaagacaccgctgcagtcagctaggacctttccgccatgtattctattctgtagtaaagcatttccatcaacaatgcctaattgtatctgttatttttggtttaacacacactgattcatactaataaatattttcagttttaaaaaaaaaaaaaaaaaaaaaaaaaaaaaaaaaaaaaaactcgag

SEQ ID NO: 1496 - DNA, 1751 bp, Homo sapiens
  SITE (1741): n equals a,t,g, or c
  SITE (1742): n equals a,t,g, or c
aattcccgggtcgacccacgcgtccgacaacttttctttagaaccacattattggtcataatccttgttactgtcatgaggattgttgcatgggttaaacacaaacacagactagcaatgcacttgaacaaacctggtggtctttggaaataaatcaccattagatttcacctggttatgctgcatcccataagttccaaatgaatcacctgcttatcctattaacgaagcatttaattcacacacaaatgcttgaatttcccctgtataaatgtagtcatgcgattcaacttttctaataagatttgtgaatgctgcatcatgatgaaaatgtggattaactgtgggttgcatgcctgttgttcatacttcagtgatggtcacacacaaaacaagatgagttttacttaggtgaaacattattaaactgtactaacaatacagaaacatattctctttgtcgctttttatcaccaaaactgaatggcaaatatgtcttgacattacttggatgaactgtggctagcaaaatggaattaacttagccactataattttttaaaacattaaagtttctaaattgtttttgggggccgagtaacgcagagtcaataaaggtggttatattgtaagcttttagatggtgcttaagaattcttatctttttaaatagcagtattttttttttaagaataaattgtaaggagcaaataaggcagaatgccactctaccctcaggtcaattttatggtatatgaaaatgccagtaatatttgtgccacttgccaactcgggggaggaggggcttttcccttactggatacttttgttatagtttgactatgtcattatgttgtttagagagcctccacaatgagaagttgccactgcagggctaactcgccttcagaaataatcagaatgattcaagggtcaaaccactttcatcccttaaaatatagggactaatatttctttttcttttttttaaaaaaaacatttcttctgtggcttagaaatgtgccagtgtgttcaaaacatttacaccaatttcaccagatttaggacctattaaaaattcaaacaagtttctttttttttttttttttctgtgtaacagggatttttaaataacggactatatgcattcttttgttatttcacacttcagttaaagtgataacaatggtaaactgtgatcattatcagactgactgaatgctttctgatttccagtgagtgatctagttctacgtattacacaggtgtaatatctgtgagtgtaaataactggaactgtacactgattaacatgacagtttctcttttgttgttcttatctgtactgtattatagtatgtgggtataaatatctacaagtatacacacatatgtacttgtattccactattgtaacctgaaagaaagactatgtattcccttttttaattccgtactggtatttgtgttatttaaaaagcaaaattctgctctatttagttgtataatattagaggatactttgctgtgcacaattccaagtgccttagaacattgtttagctttcctaagtatatataaatgcatatatgtataaaattgggaaaagttacctcaataaaatcattgggaaatcccaaaaaaaaaaaaaaaaaaaaaaaaaaaaaaaaaaaaaaaaaaaaaaaaaaaaaaaaaaaaaaaaaaaaaaaaaaaaaaaaaaaaaaaaaaaaaaaaaaaaaannaaaaagggc

SEQ ID NO: 1497 - DNA, 752 bp, Homo sapiens
tcgacccacgcgtccgggaccttaagaacaacttgctaggttcgctgcggatggcctggaagtcttttaccagagctccataccctgccttacaagcttcagaaacaccagaagaaactgaagcagaacctgaatcaacttcagagaagcctagtgatgttaacacagaagagacctctgtggcagttaaagaagaagtcctgcctatcaatgtggggatgctgaatggaggccaacgcattgactatgtgctacaggagaagcctattgaaagttttaatgagtatttatttgctttacaaagccatctatgctactgggagtctgaagatacagtattgctcgtcctcaaagagatctaccaaacccagggtatcttccttgatcagcctttacagtaaaaatgacccatctatgggctggcttaatacggacattgaggggatccttccccagaaaatccacctgtttgttgctggcaattttcctctcctcagctgcgtcatttcctttttgttgcttgccactactcaccactggggtctttggaagataatcttcctctttggaaatgaatggaaaagcaaaaggccctattacttttaaccactggcttcatataaacacttgccatttttttctgcaaaaaaaaaaaaaaaaaaaaaaaaaaaaaaaaaaaaaaaaaaaaaaaaaaaaaaaaaaaaaaaaaaaaaaaaaaaaaaaaaaaaaaaaaaaaaaaaaaaaaaaaaaaa

SEQ ID NO: 1498 - DNA, 629 bp, Homo sapiens
  SITE (2): n equals a,t,g, or c
  SITE (38): n equals a,t,g, or c
  SITE (41): n equals a,t,g, or c
tngaggtacgcctgcaggtaccggtccggaattcccgngtngacccacgcgtccgctcgaagttgtaatctctagggagacatttatagcatcttctttgacttcagcatgtgaaagagtaaggaaggatagtccaggccaaggaatcaacttttgcagggaagggaattttgtagggtagtcagaggccagtgtgtcattctctgtggttacagtgtactgtaggtggtgcgaggtgacataagcaaaagtgcctggagcttagtgggtgatgactaaatcagtattcttttcctttctttccctttccctaagcctcggctgatgcttctctgtcaaatcaggttcattgtcagcctgctgggttttttttttttttagtatatcgactatagttaagacttcaatttttccaattagtattttaaattatataataattaaattcatcctgttaaaaaattaacccttgtaaaaatgattattcttctctccagaatgaagtgctgttacatttttcttacatatccttcagaaagacttctgtatatataaatgtccatatgttttcttcttttcaaaataaatcatattataaattaaaaaaaaaaaaaaaaaagggcggccgc

SEQ ID NO: 1499 - DNA, 809 bp, Homo sapiens
  SITE (727): n equals a,t,g, or c
  SITE (738): n equals a,t,g, or c
cccacgcgtccggtggatcagcattttagaaactacaaatataggtttgattcaacacttaagtctcagactgtatttcttgcgggaagagggggactaaactcaacctaacacattaaatgtggaaggaaaatatttcatttagcttttttattaaaatacaagtaatattattactttatgaacaattttttttaattggccatgtcgccaaaaatacagcctatagtaaatgtgtttcttgctgccatgatgtatatccatataacaattcagtaacaaaggtttaaagtttgaagattattttttaaaaaggtaaatggttaaattttacatgacagatattttatctattggcctgttccccaaatggccattttaaaatgcttgggtacacttctcttaagtggtctagtcaaggaacctcaagtcatgcttttgctatcaccaatcataatgtacccatctttaatttatatcaggtgtataaatgtacatttccaaatgaacttgcacttgttatattataattggaagtgcagtcagcagatgctgttgtgaagctaatgtcacaattatgtgcaaaggtgtgcttcctgctgtatgtgagctgtaaaaatgttacgtgaagaaataaatgaaacttggccaaaaaaaaaaaaaaaaaaaaaaaaaaaaaaaaaaaaaaaaaaaaaaaaaaaaaaaaaaaaaaaaaaaaaaaaaaaanaaaaaaaaaanaaaaaaaaaaaaaaaaaaaaaaaaaaaaaaaaaaaaaaaaaaaaaaaaaaaaaaaaaaaaaaaaaaaaaaa

SEQ ID NO: 1500 - DNA, 1208 bp, Homo sapiens
ccacgcgtccgccagctccaacccacagcaattacacttctccccctggtgaaggaaacacttgcataagaataagaggttcttccacaggcattttaaaaccttttttctttcctcttctccacaatatcagcatttaagtttaagcaagtttttttatttctagaagacattttactaggcaaggaatgataagaatccctgtgtatattctctattaagctttaattgtgaaaaaggatttgtagggctagtcttgggctgtggccaatctggtatgcttcctgtgtctgtatggtttgtgctgtaagcctccatctgttttacacatcctggggacatggcccacaactgcttgacagaactttgtttagcaatcctgctttaggggatcagccctctctggccaatatctgcatgttttcctactcctgtctcttaaagggccccacccagcgactggattttcttctgcctctctgtgtgggtactgtgtgtgatatctgtaaaaagtgcgctaattaatttggcctaaagaaagacaagaacttggatcaaattttttttaagggaagttaaaagctgtggtatctttcagttcacatgactttaatctctgagaaataaaaacagccctaaagactattggtaaaatgcaggtgagatgcaaggttttctaagtgttttgaggttaaaaactgctttttgggttttgagaactatttgacttgaaggcttcacaattggtaaggcctggggacatatggaaataaccacgctcttaattatgctgggagtcaaaccttggctgcacctagcacacaattaaacaacttaccaagtttttaccttaaaagttaaaaattgctaggagttactattccgagatgtaattgagactacaggaaatagatttatatgcaagatgtgtaagaacagtaaaatgtggtgtttttttgtaaaatattataagaaggcatggaaatgtatacttttgcttagggttaaaggattgtttaaattaggaaaaagctgaaggttcaaacaagtggtggagaattgtggaaattaatcttgcagaagaggttcaacatattaactaaattcaaaagggttataaggttataaaaggtttttgcttctttgaaatttctgagtcatccttttggcaaaataaataacttaatggcaaaaaaaaaaaaaaaagg

SEQ ID NO: 1501 - DNA, 2141 bp, Homo sapiens
  SITE (644): n equals a,t,g, or c
aaaaaaaaaaaaaaccccaaaaactgttactactaggttggagtagcctaaggcagtagggcaaggaggtgggcccaggctggtctgtggggagctggagaatggtgactcgagtgaccagtggacaggcaggacccaggccagcattacaagcggggatgtcaggcaggagcaggggagyttctcgcttggcagctggtttatggtacacttttgaaaagtaagctcccagggcctggccctcacatgctcagtgaatatttgactgaagggtcccctcatagcttgggagtattcacaggcctaaatgttagttatactattagctaagcctggtcctttgttacgaaatttaaaaatgaaattgcaacattcttgtggaaattcaaagacatcattttctttcaacaaattcacacattcrttcatgcttcttctataccttttacccctaaagtcatccactcctgagttcctcctgctggtttcccaaactgcgcaatgactgccccatcataggcagtggtccgtggagtcggcctcactttcgcctttccccgcatctacttgtttccaaggccagtggtacttaactgggtcaagttgcctgtgggaccttcagggaacagaattgccatgttccntcactgcctgcagggaaaggstccattccaagcccagtgaagatgtgtgcctatccagccgcccaccaaggatgtcatctgtagaatgggtggagggcaggggtttatttggtgtatatttttacattaaaatgcacttaatatcactttgtaaagcccagatgagtgcaaatgtgcctgtaacttcctcctttaatctgtccaggtagtatttagtctttagtcttacattttctttctccctttatttcatgaaattccttgagaaaacttcaacagtaaagaaagaaatttcgttcatctcacaactcttccaaacgaggaaacttagtgaaatatttcagagcttctagatgtgaggtacaaaacttgggatcaaatggaatcttgattcactaaccaatttaagatctgacttctaattttaggaactttgggttatgaacgcttccattttatacctgtgtctagttagtttctgcctatctatccaagaagcttttatcaagggtccaccatgtgccagccactgaagtagatataaatataaggatgtgtaaggtatggatgatggtatacgaactgtcatcttactggatttgtccgctctgttaaagatacggttccgaaaactttttaaagccctagagagggctttaaggcaatgtagcatcatatatagaggcatcaacctgttcatatctttctatttaacagaactgtgcacctgggcacaagggtgtgcacaacaggatgtgtacagcagcactgttaaagtgtagcacatccatactacaggatcttatgcaactgttggaaagaatgaagcgatgctgcactgtggtcatgcagtgatctctaagacatattaactagaaagcmaaaggttwacaatgtatagcagctgggcgcagtgactcgcgcctgtaatcccagcactttkggargctgagtaggcggatcacctgaggtcaggagtttgagaccaacctggccaatgtggcgaaacgctgtctctactaaaactacaaaaattagctgggcgtggtggcgcgtgcctgtaatcccagctactcggcaggctkaggcaggagaatcgcttgaactggggaggtggaggttgcagtgagccgagatcacaccactgcattccagcctgggtgacagagggagactccgtctctaaaaaacaaccccccccccccaaaaaaaaaaatgcatagcaagctgtaatgctctttgtgttttagaatagtagaggtctggaaagttgtttgcttttccccagtttttttttgctgtgttacctctgaagggaattgaggtagaggggagagttagaaggaatattcggcttttctattttatatcctcctaggtgaaatttttacaacaaacatgtactggtgtattttgaaatgtttttaaatttttgtatttcaaaataataaaatataaattcaaactgaaaaaaaaaaaaaaaaaaagggcggccgc

SEQ ID NO: 1502 - DNA, 1118 bp, Homo sapiens
gggggctagaagtctggcacccaccgcctggccaggtgttcgggacgcgaccaggtgggcggtcgccccgccccgggagcgcggcttaatagctgagagcccgggggccaggccgcggctgcggccaggcaacgccctgagggtggccacgctgccaggtgttccactcccccgggactatgggcaagggcccggggcggggagggcggcaggtgctgacactggagctgcgccggagtcggggaactcggcctcctaagactgaggacactcgcctgctgggccggtcgagctgtgcggtgccctccgggacgcagggggcgctgcagccacgctgggtcaggctccgcaggccctcccaacccggggactaacggcgccggtgacgacttcgccgcgcgttggtcagccatggccaccgctctcgcgctacgtagcttgtaccgagcgcgaccctcgctgcgctgtccgcccgttgagcttccctgggccccgcggcgagggcatcggctctcgccggcggatgacgagctgtatcagcggacgcgcatctctctgctgcaacgcgaggccgctcaggcaatgtacatcgacagctacaacagccgcggcttcatgataaacggaaaccgcgtgctcggcccctgcgctctgctcccgcactcggtggtgcagtggaacgtgggatcccaccaggacatcaccgaagacagcttttccctcttctggttgctggagccccggatagagatcgtggtggtggggactggagaccggaccgagaggctgcagtcccaggtgcttcaagccatgaggcagcggggcattgctgtggaagtgcaggacacgcccaatgcctgtgccaccttcaacttcctgtgtcatgaaggccgagtaactggagctgctctcatccctccaccaggagggacttcacttacatctttgggccaagctgctcaatgaaccgccaggaactgacctgctgactgcactctgccaggcttcccaatgctttcactcttatctaccctttggcacttatcttgcttatcaacataataatttatacacttctaaaaaaaaaaaaaaaaaaaaaaaaaaaaaaaaaaaaaaaa

SEQ ID NO: 1503 - DNA, 1769 bp, Homo sapiens
gtcttagcagaggtgattacagcagcagtgagggccgtagatggggaaggagcgcccgctccagagagcagcggggagccggctgaggacgaaggccccacggacacagcggaggccggtagtgatcctcaagccgaacagctgctggaagagcaggtgccctgtggaacggcacatgagaagggcgtccccaaggccagaagtgaggctgcagaggctggaaatggcgccgagacaatggcagcagaggcagaaagtgcccaaaccagagttgctcctgccccagctgccgcggatgctgaagtggaacaaactgatgcagagtctaaagacgctgttcccacagaatgatgctcatttccctgttccagggaaggcgttgggatgatggatgcgttggtctttctcccttggtttgtaagcagtacaagggcgtgtgctcccagaatatgctgtaatctaattttggtgaagagacccagcgtttcctcctgagcagtgcctctcacggcttgtctcatgcagtcgtgtggcttcttgcccaggtttcaaagctgaagtacattgtccttagcggctgtaacatgtctcttgacagtagtgcacttggaataataaaggttgggtgattatatcttgatgatacattacttgttcaatacagccactgatggaatgcttccttttttatttttttccttaatttttttttttatttggttgggaacagctgaatactaggaatatatcttgctctatagaggatttttttttgtatgtttcaagcttcagcctttaacctatacctttgtagtgcaccatatggtgtgtgactttcacaggacttcgcagcacctggttcacaagtggcactgaccgcgtcacatccacgcactcccaaaggccagaagtatctgaccgacctacgccactggaaacacacccaccgcaacctcaagaaccagactgtgcagagggcattgcgtcccaatctttagtccttgctgaatcagttctctaatattttacctcatttgtgttccacctctagattacttcaggtttttttcctttaaaattagttactaccactcaaatgtatttacaaagagaatttggccaggcacggtgatgcatacctataatcccagcacttggggaggccgtggtgagaggatagcttaagcccaggagttcaagaccaacctggacaacatagcaagaccccatctcttaaaaaaaaaggaaagaaaacttgatgtgattgccataggtggaataatccaacataaattgccatagatagaaggtatctgtaatatatatatatatataaaatgaaatatatgtttcattttagagaaataactattactttagatctttccaaatctgagaaagggaggctagcatgtgttcaaggttagcacgcaacagaatttcctaaaatcagaagaattggaagatcctccccttttgaaatggccctgctgtgtcagtttccctgtggccttttgaactgtacatctcacatgttgggaaacgctggccactgggaaatcattagaaaggaggctgtagaatatttgccgagcctctactgtataccaggggctaactcaccaagcacattctaggaattgggccctgctcatgaggagccttagtggagattccaggtgaatatttatgaaaaagtcaacattagaactgaaaatggaaataaactgcttgaaaagacaaaaaaaaaaaaaaaaaaaaaaaaaaaa

SEQ ID NO: 1504 - DNA, 1149 bp, Homo sapiens
tcgacccacgcgtccgggtgacagagcaagactccgtctcaaaaaacaaacaaaaaaagattgaagtaatgaattttatttcagtggtatggggaaccttgtttctgacagtaggggaagctatcatgttcctggtaggaggttgcatcttatttcaagcggtgggaaaacaggacctggctttgcattagtaactgaagccaggtggtgaactctcagcatgtgtaaggagccggctgagaaggagctttgctcccatgatattaaattatctgattattgaaaacttttgtaaatggtcattagtgagcaaattgtctttttaaaaattctattatgaaagagttttaaacttaacagaaaataggcaagaacagtgccaagaactcctgtacactcctttgcccagagactattcctttagagcaaaggctacagcccagaatcacgcgcttcaccccattcatcacagctctcctttctgtccatctggtgccactcctcagttttcctgaacttccgcgattttggcgtttgtggaggttataggctgatcattttgtagaatgtctttcaatgtggattcgttgatgtttctgcatgattagaccccacctgtgtgtacttgaagcctgaatgtcacagactctgttctttttatcctattctgtgtctttctgtccagttactggtgaggttactgctgtcgccttgaagcacaaggtgttctgggtttgtcttgttttttcatgaccctgtaactggccacatcttcaaggagcgctgcttccatatagtggaggggggtgtttggaaatgagatctggttgctggtgtgcctatttccactagggtattgcagctcccagaccttctcataggatagagctaggggacttgtacatttatagttatttctgtatctgcgtcatatatcatgttcacacaaatgcatctaattccaatctaacatcacagagttgtcttttaaaaatatgacaagctggccatgcgtgatgctcacgcctgtcatcccagcactttgggaggccaaggcaggcggatcacctgaggttgggagtttaagaccagcctggccaacatggagaaacctcgtctctactaaaaaaaaaaaaaaagggcggccgc

SEQ ID NO: 1505 - DNA, 1281 bp, Homo sapiens
  SITE (29): n equals a,t,g, or c
  SITE (47): n equals a,t,g, or c
  SITE (83): n equals a,t,g, or c
  SITE (121): n equals a,t,g, or c
  SITE (133): n equals a,t,g, or c
  SITE (154): n equals a,t,g, or c
  SITE (1166): n equals a,t,g, or c
  SITE (1262): n equals a,t,g, or c
cacgacaggtttcccgactgaaaagcggncagtgagcgcaaccccanttaatgtgagttagctcactcattaggcaccccagnctttacactttatgcttcccggctcgtatgttgtgtgnaattgtgagcgnataccaatttcacacaggaancagctatgaccatgattacgccaagctctaatacgactcactatagggaaagctggtacgcctgcaggtaccggtccggaattcccgggtcgacccacgcgtccgggaggcagaggttgcagtgagccgagattgcgccactgcactccagcctgggtaacagagcaagactccatctcaaaaaaagaaagaaagaaaaaagaaagtacaagtttataaagtattatagtgaaaaattcgcattctggctgattttaagccatttaaaatttatataaaacaaccttccataaaaatttgacaggtgcccagatgttgctttctccatttattttttgtttttttttaatcacagtaggtctgatagagaattggagctaaattataatatttttgttggtaaagttgagttatatacttgtacatacaatggaaatgcttttagtagtgattatttagcaatttttgtttttgttatattaggcatgtttggaggctttcctattctagcatttaaatttaaattttattaaaattaaataatttaaatctagcatttaaatttaaataatttaagtctagcatttacttttaaataattataatgaagttttgaaatactaagttaatccagacctttagttgtcccatggtgttaataaagttgccaaagaagatgtattatgaacaattcagcaataagacaattgtcaacacagttgagaataacaatggtaatcgttagtaatatttagaattggaatttgcctactgaaatagttatagatgattacttgtgatgtgaaactgaattgagcatgacaaccagacatttccagttggttttgtaagttttgagaatctagatactgggttttattttttgaaagattagctctgtttgtaagggctgattccttgaaaatgtaattttccagaaaaacacctaaagaaaataaaacatggacatgcctagtaaaaaaaaaaaaaaaaaaaaaaaaggggcggccgntctagaggatccaagcttacgtacgcgtgcatgcgacgtcatagctcttctatagtgtcacctaaattcaattcactggccgtgttttacaacgtngtgactgggaaaaccctgg

SEQ ID NO: 1506 - DNA, 1149 bp, Homo sapiens
  SITE (1138): n equals a,t,g, or c
  SITE (1139): n equals a,t,g, or c
  SITE (1140): n equals a,t,g, or c
  SITE (1143): n equals a,t,g, or c
cggggcaaccactatagggaaagctggtacgcctgcaggtaccggtccggaattcccgggtcgacccacgcgtccgccgcggggtctgtgctgagaataatggcccggttggcccgggacgagtggaatgattaatgatgttttgcagcagttttctacgtctgaaattttttatgtctctggaaccyagaatttgctaagagatggaggaacctcagaaaagctatgtgaacacaatggaccttgagagagatgaacctctcaaaagcaccggccctcagatttctgtggtcctgctcgtctatcactggagcagcagggaatctgaacacgacctcctggtccacaaggctgtggccaaatggacggcggaagaagttgtcctctggctggagcagctgggcccttgggcatctctttacagggaaaggtttttatctgaacgagtaaatggaaggtgaggagcaaagtcttctgacacaccgtggacattttagaaaacagctttcttgagatataatccaggccaggcgcggtggctcacacctggatcccagcactttgggaggccgaggcggatcgatcatttgaggtcaggagttccagaccagcctgaccaatatgatgraaccccatctctactaaaaatacaaaaaaaaaaaattggccaggcttggtagtgcacaccttgtaatcccatctattcgggaggctgagacaggagaatcacttgaacccaagaggtggaggttacaatgagccaagatcatgccactgcactccagcctaggcaacaaggcaagactccatctcaaaaagagagagagagagatgtaatctacataaaattcacacgtttgaagtgcacaatccatggtttttaatgtgttcacaaatagtgtgattatcaccacagctggttttagaacattttcatcaccctaaaagaaagcttttacccttcagtcaatcctcatttctccccaacccccagcccctggcaaacaccattctactttctgtctttatggatttgtctattctggacgtttgatataaatggattcatacaaaaaaaaaaaaaaagggcggccgctctagaggatccaagcttacgtacgggtgcatgaaccgaacnnntanccggac

SEQ ID NO: 1507 - DNA, 1869 bp, Homo sapiens
gcccacgcgtccggcctcagcctcccgagtagctgggactacaggcgtgagcaccatgcccggcctcaacgatattgattctttgggctgtagtcagtattggattatgatcaatattatcaccatttattttgttgctccagttcttccagctgtggccaatccttcagttggattcttgtgccccatcaacattctccatcctggctttttgttttgagcacttccttccttcctagcaccaccaggctcttgtattatccctgtccctgccctggaatcgactcctcctccagagagccctggtttcttttgttagaggatggtatatagaatccaacatgcagacacttggtgggacttattgttactggggttttgttatactagggtttcagtggtcagtgctagtatttatgtatgttaacccacgctgtgctttggattcaggctatttcaaattttagataatatggtacatatattattaataccactagttactacattggtacttttcaagcaaaatatatctaagtgggatcaaatgagactgtaaatagctttacatcagttcaggtcagttatgttgctaaattacttttggcattaagtttagggaaaaaaaattgggtttgggattttttggtttcaacatttgtgattgagagactatggacctgtaataagtccaagaacagcagttgcagtgtaacaggactgttaatggaatcgggtcatttagaaacagtcaagacttcgctgttgtgcatgtggttaggagccagtgcacacgtcagttcttaggaaatgtacagtctgagcaatagcatttgaaatccaagactcttcccattgtgttgctgttgagtgtagaaaataaaatgtgtgaatttctttatcttgagtattgagattctccccttagaataaaacaagaatttttctctcagtgtaaaaatgtcaagttttattcttgaaatgaatagcaaagttaagcttaaaaacgtgaacagcttcagaactataaatgggtatgtatacctttctgctgtctaagggcagagaagggaaagaaagtgtggtgcttatcagaggagacagcagcaagacacattgtgacagaaaaccaagggtatcctgtgtcacagtgaaatgtaatgagggcacctctcctttcaagagacgaagattgaatacatgggaagcacactctccgctgtgtgttgtctaggagaggtgcaccctgtatggaaatatttgggaaggttaagattaagacagggtaaaataaagcaaaggcaaatcacaaagcaagggctaatgttaatatgaaaagtgcagaattcaaggaaaaagcatggggacaaagaagatttttcctctttttggttgctgttcatgtgtagcctacaacagaactataagacctatagacatttatatgaatatttatttgaaaacgtataatatcaaacaatgtaaaagccaatagaaatctcagataattgaatgtatagaaactagcagtttgaaagtgattagttcattatttgctgatcaagcagaaaaataagcatatgaaagatatttaaaatgggattaataaagttgatttaacagatcctattccatgtcctttgaatatttatagaaattaaatggaacaaattagggcatcaggaaaactatacaaaagtctttaccaaaaaagggaaatatatatatatatgtgtagtactacctatatatatacataatatatagtactgcttatatatatatatgcctatatgtacacatatatatatacatgtataggcagtactatgttttctgatcataatatgttaaattagtaaaaaaaaa

SEQ ID NO: 1508 - DNA, 1867 bp, Homo sapiens
gcccacgcgtccggcctcagcctcccgagtagctgggactacaggcgtgagcaccatgcccggcctcaacgatattgattctttgggctgtagtcagtattggattatgatcaatattatcaccatttattttgttgctccagttcttccagctgtggccaatccttcagttggattcttgtgccccatcaacattctccatcctggctttttgttttgagcacttccttccttcctagcaccaccaggctcttgtattatccctgtccctgccctggaatcgactcctcctccagagagccctggtttcttttgttagaggatggtatatagaatccaacatgcagacacttggtggacttattgttactggggttttgttatactagggtttcagtggtcagtgctagtatttatgtatgttaacccacgctgtgctttggattcaggctatttcaaattttagataatatggtacatatattattaataccactagttactacattggtacttttcagcaaaatatatctaagtgggatcaaatgagactgtaaatagctttacatcagttcaggtcagttatgttgctaaattacttttggcattaagtttagggaaaaaaaattgggtttgggattttttggtttcaacatttgtgattgagagactatggacctgtaataagtccaagaacagcagttgcagtgtaacaggactgttaatggaatcgggtcatttagaaacagtcaagacttcgctgttgtgcatgtggttaggagccagtgcacacgtcagttcttaggaaatgtacagtctgagcaatagcatttgaaatccaagactcttcccattgtgttgctgttgagtgtagaaaataaaatgtgtgaatttctttatcttgagtattgagattctccccttagaataaaacaagaatttttctctcagtgtaaaaatgtcaagttttattcttgaaatgaatagcaaagttaagcttaaaaacgtgaacagcttcagaactataaatgggtatgtatacctttctgctgtctaagggcagagaagggaaagaaagtgtggtgcttatcagaggagacagcagcaagacacattgtgacagaaaaccaagggtatcctgtgtcacagtgaaatgtaatgagggcacctctcctttcaagagacgaagattgaatacatgggaagcacactctccgctgtgtgttgtctaggagaggtgcaccctgtatggaaatatttgggaaggttaagattaagacagggtaaaataaagcaaaggcaaatcacaaagcaagggctaatgttaatatgaaaagtgcagaattcaaggaaaaagcatggggacaaagaagatttttcctctttttggttgctgttcatgtgtagcctacaacagaactataagacctatagacatttatatgaatatttatttgaaaacgtataatatcaaacaatgtaaaagccaatagaaatctcagataattgaatgtatagaaactagcagtttgaaagtgattagttcattatttgctgatcaagcagaaaaataagcatatgaaagatatttaaaatgggattaataaagttgatttaacagatcctattccatgtcctttgaatatttatagaaattaaatggaacaaattagggcatcaggaaaactatacaaaagtctttaccaaaaaarggaaawatatatatatatgtgtagtactacctatatatatacataatatatagtactgcttatatatatatatgcctatatgtacacatatatatatacatgtataggcagtactatgttttctgatcataatatgttaaattagtaaaaaaaaa

SEQ ID NO: 1509 - DNA, 1156 bp, Homo sapiens
  SITE (11): n equals a,t,g, or c
  SITE (942): n equals a,t,g, or c
ctggaaaacgnctcactataggttaaagctggtacgcctgcaggtaccggtccggaattcccgggtcgacccacgcgtccggagaaacttcagcctttctaagttgatagcatgtttattaacttttagataaagatccttatagactgaaagaatgtagcctctgcattaatggtaaatggtctagaagttttcgtttccactgaggcttccgccactcgcttttttaaacttcctgctatggtttggatatggtttgtcctcaccaaaactcatgctgaggcctgagtccccagtttgattgtgttggtaggtggtgcctttaagaggtgattaggtcattgagatggattaaaggctttctcatgaggctcagttagttctggaatggattcgctcttgcaggaatggatgaattctcacaagagtgggttgttatgaagtgaggatgcttcttgtgttctgttctctttgccctcctcagttcaccatctgctttccaccatgagttgaagcagcatgaggccctcatcagatgggctccctgatcttggactcctcagcctttggactcataagccaaaataaatctgttttctttataaattgcccagtctcaggtattctgttatagcaaaaaaaaaaagtggattgagatacttttttgctctgctacttacctctttwccagaatcttttaaggacttgatgtaggaactgagctatttagtragtcrttggtwgaagttwmcgcactgtactttgaaaattaagtgaaagcagaaaagtgagtgcgtatgtaaggaaaataatagtaaaagaacgctttgacttcttagcactcgccctctcctgtatatccccaggcaccttcagttgtctggaacaaagaatgtaggaaaaactgaagaaattcagaacagttaccaatgacaaaaatcnctgatcagaataaaaagacaaggttacagaatatacgttgytactgatcatttttcagaagcagaaggaaaagaatgccctccctggccattgagggtgataaaaagwaagccccactcctatcacaggcaatgaaggacagggatggaaaaaaaaagtgaagaagaaggggaaaaagcaaaagttatgaaaaaaaaaaaaaaagggcggccgc

SEQ ID NO: 1510 - DNA, 1472 bp, Homo sapiens
ggagggcaaccctgggccacctgcggacccggatggcggccccaggccacaagccgaccggaagttccaggagagggaggtgccatgccacaggccctcacctggggctctgtggctccaggtggctgtgacaggggtgctggtagtcacactcctggtggtgctgtaccggcggcgtctgcactagtgaagccctgggctcttcccaccacccatctgttccgttcctgcagtayacctggcccctctccgaagccccttgtccctttcttggggattgtggargctgggtcagargggarttaagggactgcaggcctggcagcargacatgccttggctgaaccaagtcctgagagcagcatctctgtccccacggtgccttgtgtgggtccccgtccttggctttctgggtcctgggctgcccccagtgctccagaccttccccactggcaatccaggttatcatccatgtcctccagaggagcttcctcctccaggcctcagccctgttggcccaggtggagcaggagggaccactggaacatgtggtgcttgggaatgcctctcctgttgcattggtccctgaaggcctcagggcaggtatgtggtgtgtgggcgactccacaagacctgcctcccatcctggcagcccagcctgagaccgttgcattgaggcaggcaggagcggcagggtggctgctctccaggagcccaactgccttgagttcctgccccactgggccccctcccctgctgggcaatcctgggaaggtctggaggttcctgtggacctcagggaagccaggggcagctgtcaggcctgaggaagacctgtggagctcctctccagcctcctctttccctcccctctggtctccattctcttcagctccctacatgggctggggaggagacacctggtgggcagagctcaggcagaggtttggatttcagctccctcacttccggggctgtgtggctttggcagatgtcagacttctggtcttgcttctccacgtggacagtgagtatctggctcattcttcactgggttcttctgagattgaacctacaggtgtttgccaagtgcctggcccagagcaagtggccactgcttctcccatctctctcctgcccaacctggtagagctgagggcatgagaggcagagtgcacagtggtcaagggtgcagctctgcagcacaggcagcctaggcctgcgtcccaacctgcctctcaccagctctgtgaccttgggcaagggatttatctgtctgtcccttagttttctcacctgtaaaaggaggataagtatatatatatatttcccagtgttgtgaagattaaaggagtttatcgatgtaggtcttaggatgagtcctggcatttaccaagggttggatatatgttattatcactattaagtgttgagggtccaggcatgctgggcaacagggaccccatctctac

SEQ ID NO: 1511 - DNA, 1991 bp, Homo sapiens
  SITE (231): n equals a,t,g, or c
ctctgttctctggaatgccatgatccatccactgtgcaatatgactctgaaaggggtagtatggtaccagggggagtccaatataaattataacacggatctgtacaattgcacattccctgcactcatcgaagactggcgtgaaaccttccaccgtggttcccaggggcagacggagcgtttcttcccatttggacttgtccagttatcttcagatttgtctaagaaganctcagacgatggatttccccagatccgttggcatcaaacagcagacttcggctatgtccccaacccaaagatgcccaatactttcatggctgtagctatggatctctgtgatagagactcgccttttggcagcatccaccctcgagataaacagaactgtggcttatcggctgcatttgggggcccgtgctctggcttatggtgagaakaatttgacctttgaaggaccactgcctgagaagatagaactcttggctcacaaggggctgctcaatctcacatattaccagcaaatccaggtgcagaaaaaggacaacaagatatttgagatctcctgttgcagtgaccatcgatgcaagtggcttccagcttctatgaacaccgtctccacccagtccctgaccctggcgatcgattcttgtcatggcactgtggttgctctccgctatgcttggaccacrtggccttgtgaatataagcagtgtcccctataccaccccagtagtgccctgccagcccctcccttcattgctttcattacagaccagggtcctggacatcagagcaatgttgctaaatgactgtttcagtatgatcagaacttagatataaggatgggtccttcagattttagcatttaggagtttcaataataaccattgcttttaaaggaaattaatagaaagcctcattgaatggctttcagctagcacatggctgtttctatattctgatgagcccaggctyataggtaacttgaaatgcttgctttttgttccctagttggtctaagggtctgtattggactaattctgaactacagacaaattggacctcaatgtcatttatttccctcatattaatgggagtgaaatgtctaatacttttgcccctttttatccagagttgtgggatctcaggattggaagagattttaaaggccacataggccagctagtgttcatgtgttctttataaaatttctcccatccaagtactaaccaggcccgaccctgcttagcttccgagatcagatgagatcaggcgcgttcagggtgatatggccgtagacgtctttacaaaattcctgacaggtggttactgaatctctctatgaactttccattcaaaactttccaagtttttccttatgtggaaccgaaatctttctttctcccgtgaaactttactactatcagataattgaagacagatctctttgtattctcttcaagcccaaaccaattctgttccttcaatctaaatagtggtaatatgaatgtttaagaaatgaaataagaaacatgtgcaggcactttggaaggtgctaagtgactgccctaaggaatgaaaagcaagggccaggtgggagtagcccagcgaaggcacttgggctgccaggaacaggaggcgtgggaaactctggcttaggaaaacatgaacacaggggcaacagaggcaaactgttgttcgagttaaatataaatctcaggctctttaaaggtaaaaggtttaaggataatccatttggaagaagaaaagagtgaggctgaaagtaaagccacatgacaagcatataaaaaaaaatgcagatgatacaaatatgaaagaggccttcagtgtttgtttattaagaatcttaatgcagtttactgatggattaaaaacagctaacattgtctgaaaattatgttacctataagaagttggaaataaataaaagcataatcactaaaaaaaaaaaaaaaaaaaactcgtag

SEQ ID NO: 1512 - DNA, 1994 bp, Homo sapiens
  SITE (231): n equals a,t,g, or c
ctctgttctctggaatgccatgatccatccactgtgcaatatgactctgaaaggggtagtatggtaccagggggagtccaatataaattataacacggatctgtacaattgcacattccctgcactcatcgaagactggcgtgaaaccttccaccgtggttcccaggggcagacggagcgtttcttcccatttggacttgtccagttatcttcagatttgtctaagaaganctcagacgatggatttccccagatccgttggcatcaaacagcagacttcggctatgtccccaacccaaagatgcccaatactttcatggctgtagctatggatctctgtgatagagactcgccttttggcagcatccaccctcgagataaacagaactgtggcttatcggctgcatttgggggcccgtgctctggcttatggtgagaakaatttgacctttgaaggaccactgcctgagaagatagaactcttggctcacaaggggctgctcaatctcacatattaccagcaaatccaggtgcagaaaaaggacaacaagatatttgagatctcctgttgcagtgaccatcgatgcaagtggcttccagcttctatgaacaccgtctccacccagtccctgaccctggcgatcgattcttgtcatggcactgtggttgctctccgctatgcttggaccacrtggccttgtgaatataagcagtgtcccctataccaccccagtagtgccctgccagcccctcccttcattgctttcattacagaccagggtcctggacatcagagcaatgttgctaaatgactgtttcagtatgatcagaacttagatataaggatgggtccttcagattttagcatttaggagtttcaataataaccattgcttttaaaggaaattaatagaaagcctcattgaatggctttcagctagcacatggctgtttctatattctgatgagcccaggctyataggtaacttgaaatgcttgctttttgttccctagttggtctaagggtctgtattggactaattctgaactacagacaaattggacctcaatgtcatttatttccctcatattaatgggagtgaaatgtctaatacttttgcccctttttatccagagttgtgggatctcaggattggaagagattttaaaggccacataggccagctagtgttcatgtgttctttataaaatttctcccatccaagtactaaccaggcccgaccctgcttagcttccgagatcagatgagatcaggcgcgttcagggtgatatggccgtagacgtctttacaaaattcctgacaggtggttactgaatctctctatgaactttccattcaaaactttccaagtttttccttatgtggaaccgaaatctttctttctcccgtgaaactttactactatcagataattgaagacagatctctttgtattctcttcaagcccaaaccaattctgttccttcaatctaaatagtggtaatatgaatgtttaagaaatgaaataagaaacatgtgcaggcactttggaaggtgctaagtgactgccctaaggaatgaaaagcaagggccaggtgggagtagcccagcgaaggcacttgggctgccaggaacaggaggcgtgggaaactctggcttaggaaaacatgaacacaggggcaacagaggcaaactgttgttcgagttaaatataaatctcaggctctttaaaggtaaaaggtttaaggataatccatttggaagaagaaaagagtgaggctgaaagtaaagccacatgacaagcatataaaaaaaaatgcagatgatacaaatatgaaagaggccttcagtgtttgtttattaagaatcttaatgcagtttactgatggattaaaaacagctaacattgtctgaaaattatgttacctataagaagttggaaataaataaaagcataatcactaaaaaaaaaaaaaaaaaaaaaaaaaaaaaa

SEQ ID NO: 1513 - DNA, 712 bp, Homo sapiens
cccccgggctgcaggaattcggcacgagttcgcctcaccctccccagtgcactgaagaaggtaaccgggtccagacccacgcggcgccagttctccggcgggaaggaaaaccgcgcagagaggcagcaatgaatgtggatcacgaggttaacctcttagtggaggaaattcatcgtttgggttcaaaaaatgctgatggaaagttaagcgtgaaatttggggtcctcttccgtgatgataaatgtgccaacctctttgaagcattggtaggaactcttaaagctgcaaaacgaaggaagattgtaacatatccaggagagctgcttctgcaaggtgttcatgatgatgttgacattatattactgcaagattaatgtggtttacatatctttatgtactgccattttttgtttctggtaaactggaatataaagtgaaagaacaaacatttgaacatacttaatgtatttttatagaactttgtaaacgaaaggagattcatgttttagaagtctgtccttttttatatcttgaaagaaaatctatgtatgatgctataaaataattagacattttctatagatatttgacattctgcgaaagcaacaagcaaactgaagaccaactcctatgagaaatattatgatgtttatgtaataaagacatgtaactgtcttaaatttaaaaaaaaaaaaaaaaaaaaaaaactcga

SEQ ID NO: 1514 - DNA, 486 bp, Homo sapiens
gaattcggcacgagctccagagtgttcccatgatcaccacgtcctttgatcagtgccatctggaagagcagatgagtgcagccctcctctcatcctctctgtgctggctccgaacgcttgcttacagacccaccaacaaccaagaagctgcactggttggtacacactgcagcaaacaaggaaaacaagtatgataaaaagtccaacatcaaaaagaaaaaaaaaaccatagaaacaattgaagagagaatggctaaaggacatgaaaagacagttcatacaaagggaaattcaatgctgttctcgctgaggctggagtccaatgatgcgatctcagctcactgcaacttccgtctcctgggttcaggagaatggcgtgaacccgggaggcggagcttgcagtgagctgagattgcgccactgcactccagcctgggcgacagagcgagactccatctcaaaaaaaaaaaaaaaaaaaaactcgag

SEQ ID NO: 1515 - DNA, 654 bp, Homo sapiens
aaaagccgcccttagccccctcctcccctttcctgcttctgcgagaactccctccctccctccagctccgccagcccaggcgccccttccctggaagccgagcggcttcgctcgcatttcaccgccgccgcctctcgcaatattgcaatataggggaaatgactaatgaagctaattaaaagaagcattcaaatctgctttctaccctcattaacaattagcagggcactggccagagtttgtaccctgtgttttaccttaacaacattctatttgctctttgtatatttaagtgttgtaaggaaacgtgtttcaatcaaaactgaccatgagataaaggaaagagatgtggcttttgtgatattctatcacaaacacttattgtatctctgtaaaatacaatgtatgtatgcatgtaagtgtttttgtcctaatgttgctactcccatggcaaagaaaaaaaaaagaatgaaaaaaagaaaaaaatttggaaaaaaaaatcaggctcatagcagctactgtgtagaaaattccccctacttctaatttgctgaatgaagaaaaaaaaaaatcttttatttgtgatattttcagagacatttgctctagtatggtgtatttaaataataaaaacttaaaagaaaaaaaaaaaaa

SEQ ID NO: 1516 - DNA, 974 bp, Homo sapiens
ggcacgagccagggcgcacccgtcggcggtaaaagctgaggggctggcgcgggggattggtgggcgacacttttacgtctacacgtgcctacccgtctgcacgtttctgagtccgcacggttgtcttctcttgctgaatggacataggtgttttgttttgtcccaagagatacaggcaagcagtacaggggtgatggagtgctccttgaccttagcggggctgaccctggcactccctgtaggtctccccgctgcgaagactgagtctcttcactgcagtttctctccagttacccgccctgtctacggcccaaacggccatgctagtgaaaacctgccctggccgctaagcaagcctagcccaggctgtaacccatgtttctagggcttgttttcctctgcagtcaaatcagagattcggagttgaagggatcttagaggtcaacatgcccaacctcttagcccgagtgagtgaatgtacgctttttacctgcacaccccgaaaatcgcccgttttctggaaacaacgttgattatgtagtcctggaactttcctgcatgcacattttattccttcgacaatatttattgctacctactgtgtgcaggcattgtaggccccggggatacgattaaaaccaatgaagaacgaaacgcacaagattgttgatctcggccgggcgcggtggctcacgcctgtagtcccagcactttgggaggcggaggtgggtggattgcttgaggtcaggagttcgagaccagcctggccaacctagcgaaaccccacctctactaaaaatacaaaaattggccgggcttggtggcgtgcgcctgtagtcccagctactcgggaagctgaggcaggaaaatcacttgaacctgggaagtggaggttgtagtgagccaagattccgcctgcattctagcctgggcaacaaaatgagactctgtctcagaaaaaaaaaaaaaaaaaa

SEQ ID NO: 1517 - DNA, 472 bp, Homo sapiens
ggcacgaggcgagtgtcagtcggctctccgcacgtgtccgcggcctcgcggagcagtccacccctggctggtttctgcttccacctgctgatctcacagagcactgcaagctatttggcatatgaaggtcttgacctgagaaaaccatcttggataactgcagcaaggaaaaggaaaaatgcaacacctaggagatttcagtaaacagtagaatcatgccaacctaatctgtgttaaaatgcttggaatgtgggagccgctgatgatgcctcttgtctgtgtgtctgactgaatcctttcttttctcagagcagcaaagcaaagcctgggaaccaggccaaatgcctgccacttaccttaaattgatcagccactttgagattaaaacccctgaaagctgccacaccgtgaaaacaaggcctccttcacattaaaggcaaattgcgactttgaaaaaaaaaaaaaaaaaaaa

SEQ ID NO: 1518 - DNA, 924 bp, Homo sapiens
ggatttctatgcattgtgtaatattcagtgatgttgagattttgcatgttgttacaggtgctctttcatatgtgtgtttgtggtgttgatgtggaattgttaaccactgctgctatcacttattgtagttaaactgaaaaactgtgttaaaaggctgtgccagtcaacatttctatgtgtgacttaagtaactgtgtacttcattgtttaatattttgagccagcacttagtggcctctacagaaggaaatattgtagttgtcaaagtggtgccaaacttgaaaatcttgtgtcatgtttataattccaggccaggtcagcttttcttcaacactttccgagctctttgaaagcaaaaaacatttgcaaaaagagaaagaaagcaagaattctgaacttttctaatactctctcctctagaattttaaatatttttttcttttgatgtttgagtatcttacagaaaaatccaatcaaatgactagcggtagaatttcccttgatctggatatttttaggctgaacagtgtaatagcagaggactatgaggtgcatacattatttttgttggctatcatggcttattgtttgaatttcatttaataacaatattcaggctggaggtggtgactcacacctgcattcccagcactttgggagactgaggcgggcggatcacctgagatcaggagttcgaggccagcctggccaacatgacgaagcccagtctctactaaaaatactaaattagctgggtgtggtggctcacacctgtaatcccagctacttgggaggctgaggcaggagcattgcttgagcctgggaggtggaggttgtagtgatctgagatcacactactgcactccagcctgggtgagggagcaaggctccaacccccctaaaaaaaaaaaaaaaaaactcgag

SEQ ID NO: 1519 - DNA, 807 bp, Homo sapiens
tttttttttttttttttttttttttttttcacaaagattgacaaaactttaataaaagttaaatttacagacatcttaagataacttgggaaatatgtagtaaaaaagaatcgagtccacaaattaagaatattttgctaatatgcccaacaccaatttcagcaaatccaatctacttaactcatatatttaatgtggtaatttttctaacaaaatttaatgggggtatgaatgatatatttatgcccttgacaaagatgacatgtgtgattttgttgtgactaagaaaggagagtatgatttctggtggttatgatatcactctggctcatcgaagctcacagaatatgtaaggttctgccacgtccaaagatgttaggcaaatgtaatagaaggcgcaccgggctgacacacgttttcatcatacaaatcttctggcagttcctcttcatctccatcaggaaaatatgtagggaatggtagatttttaccgagatccttatatgcaggcagtttagaatctttgacctttactaagcaatttttatgtccaggtacagagccatttacatagattatgttgtgctttgtgtttattctccacactttcccatttttccaggcattttagttccaggccagactctgccaatatcaccagttgcaacagctccaggtctcctgtgggttttcgtttgaccatgcgtagcaggctggcctttaaatccccatcttttcatgacaccttgaaaacctttaccaatagttttggctgtgacatccacatactgtcctgtatctcgtgcc

SEQ ID NO: 1520 - DNA, 893 bp, Homo sapiens
  SITE (10): n equals a,t,g, or c
  SITE (18): n equals a,t,g, or c
  SITE (28): n equals a,t,g, or c
ggcacgaggnaaaagaancccgcttcanggttgccagagtgtgataggtaccccagagttcatggcccctgagatgtatgaggagaaatatgatgaatccgttgacgtttatgcttttgggatgtgcatgcttgagatggctacatctgaatatccttactcggagtgccaaaatgctgcgcagatctaccgtcgcgtgaccagtggggtgaagccagccagttttgacaaagtagcaattcctgaagtgaaggaaattattgaaggatgcatacgacaaaacaaagatgaaagatattccatcaaagaccttttgaaccatgccttcttccaagaggaaacaggagtacgggtagaattagcagaagaagatgatggagaaaaaatagccataaaattatggctacgtattgaagatattaagaaattaaagggaaaatacaaagataatgaagctattgagttttcttttgatttagagagagatgtcccagaagatgttgcacaagaaatggtagagtctgggtatgtctgtgaaggtgatcacaagaccatggctaaagctatcaaagacagagtatcattaattaagaggaaacgagagcagcggcagttggtacgggaggagcaagaaaaaaaaaagcaggaagagagcagtctcaaacagcaggtagaacaatccagtgcttcccagacaggaatcaagcagctcccttctgctagcaccggcatacctactgcttctaccacttcagcttcagtttctacacaagtagaacctgaagaacctgaggcagatcaacatcaacaactacagtaccagcaacccagtatatctgtgttatctgatgggacggttgacagtggtcagggatcctctgtcttcacagaat

SEQ ID NO: 1521 - DNA, 2037 bp, Homo sapiens
  SITE (22): n equals a,t,g, or c
  SITE (28): n equals a,t,g, or c
  SITE (68): n equals a,t,g, or c
  SITE (1974): n equals a,t,g, or c
gttcccgggtcaagaatggccnaacctntttacccagaggagatytacggtaactgragtctgccctngaacacctytcatatttggcacccacggatacggraggtgggtttgcatgtccagggtgcaatcatggtgtccagcgtggtgraggtggtgattggcctgctggggctgcctggggccctgctcaactacattgggcctctcacagtcacccccactgtctccctcattggcctttctgtcttccaagctgctggcgaccgagctggctcccactggggcatctcagcttggtgagcaggcaccaggcctgatccctgcccagccccagcaccctaccctcttcatgtccttggtccttcttcccggctcctggccccagcctggcctcccatccacttcctgattgtgcctctgcccccagctccattctcctgatcatcctcttctcccagtacctgcgcaacctcaccttcctgctgcctgtctaccgctggggcaagggcctcactctcctccgcatccagatcttcaaaatgtttcctatcatgctggccatcatgaccgtgtggctgctctgctatgtcctgaccttgacagacgtgctgcccacagacccaaaagcctatggcttccaggcacgaaccgatgcccgtggtgacatcatggctattgcaccctggatccgcatcccctacccctgtcagtggggcctgcccacggtgactgcgctgctgtcctgggaatgttcagcgccactctgcaggcatcattgagtccatcggagattactacgcctgtgcccgcctggctggtgcaccacccccactttggtttagccccaccctgtctttgagaggcctcgcccccgcatcaagccccagccggtttatgcctcgctcttataacaggccccgcccctggaactaaccccgccccagcctcgtccccaggtctagcttccccgctggctccccggcaggtgggcagccggcgcgtggtgcagtatggtgcggctatcatgctggtcctgggcaccatcggcaagttcacggccctcttcgcctcgctccctgaccccatcctggggggcatgttctgcactctctttggcatgattacagctgtggggctgtccaacctgcaatttgtggacatgaactcctctcgcaacctcttcgtgctgggattttccatgttcttcgggctcacgctgcccaattacctggagtccaaccctggcgccatcaatacagggagcccagaggagcgtggtctgatacagtggaaagctggggctcatgccaacagtgacatgtcttccagcctcaagagctacgatttccccattgggatgggcatagtaaaaagaattacctttctgaaatacattcctatctgcccagtcttcaaaggattttcttcaagttcaaaagatcagattgcaattccagaagacactycagaaaatacagaaactgcatctgtgtgcaccaaggtctgaaaaatgacttycaggaaaggaagcatggtatataacaggaaaagaaaactacatggggaaccagaagacctaagcctgaaatcccagccctgcccctaactaacttctgtgtaaactcagataagtcacctttctctgggattcaaatttttgcatcagttaaaaaaaaaggggtgggggggaatgggccaaagtctgagtcttagagacttgtaccaatgttatgctatgtctctaaatctttactctcctaagtagacttgtcagcatctaggaagaacagctagaaattttcctctgtgatattttagactgcaagttgaaaaaaaawaamaaraaatgagggcaggttccagggcctgaaatgtaggtatgctgcaaggcttttacattgaatttgaccctacatcacttcaagactaatgcataatattaaacatcatgttgaagaaataattttagtntcgtaatttatacatagcagtttctttggacaggatatattctcccttcccccaagggaaata

SEQ ID NO: 1522 - DNA, 1417 bp, Homo sapiens
  SITE (510): n equals a,t,g, or c
  SITE (696): n equals a,t,g, or c
  SITE (1363): n equals a,t,g, or c
  SITE (1389): n equals a,t,g, or c
  SITE (1394): n equals a,t,g, or c
  SITE (1417): n equals a,t,g, or c
gggcacgagcggctgtggtggttcccgcagagtggataaagaactgggagaaatcagggagaggcgaatttttgcatttatgtcggatcctcagtgaaaataaaagccatgatagttcaacatacagagatttccagcaagctctctatgagttgtcatatcatgtaattaaaggaaatctaaagcatgaacaggcatctaatgttcttagtgacattagtgaatttcgtgaggatatgccctccattcttgctgatgtattctgcatattagacattgagacaaattgtttagaagaaaaaagcaagagagactattttacacagttggtattagcatgtttgtatttagtttcagacacagttctaaaggaacgcctggatccagaaacactggaatcattagggcttatcaaacaatcacagcaattcaatcaaaagtcagttaaaatcaagacaaaactcttttataagcagcaaaaattcaatttgttaagagaagagaatgaangttatgccaagctgattgctgaattggggcaagatttatctggaagtattactagtgatttaatcttagaaaatatcaaatctttaataggatgctttaatctgggatcccaataggagttttgggatgtcattttagaagtgtttgaatgcagaccagtaatgtactttctgtctctgtgatttngcctgttttggacatttcatttaaatggaattatgcaataatttgtggccttttgtgtttggctttcacttagcatcatgttctcaaggctcatccatgttgtggcatgtatcagtactgcattcctttttatggctaaatgatgtttcattgtatgagtgtgtaccacattttatttatccattcagcaattaatggacaggaacaatggcttttaagtattaaattgtaagttcaacattaaatgtatycacagttattgataatatcaagattatacatggtgtgaacagaatgctgtgtcgaaatggtatgtaaattatttgtcagcatttcatgtaagtgattattttctaaggacccttctagccctggttttaagaaatatgtgaatgtagtattttcatcaataaagtttaatgcattaagcattagcttaaaatttgaatgaaggcagatgtgaagatatttgccacatgttgtaataatcatgttttgaaattatttcaatatgaagtatttgaaaaatgtcaatacataaaggaaaggaaatgagtataattaagtcaatatatttttaaagcaatttttataatttagcagacactgcatcttaatataagttactattaaaattgtgtccttgtgaaaaaaaaaaaaaaaaaantcgagggggggcccggtacccaattngccgnatagggagtcgtattactttcan

SEQ ID NO: 1523 - DNA, 1837 bp, Homo sapiens
  SITE (1697): n equals a,t,g, or c
aattgccatatacttctcacccagtttctcctaatgttaatattttatataaccatggcacatttatcaaaactagaagtgaatattagtaatgttactattaactatgggctttattcagattttaccagtttttctgctagtgtactttttctattccagggtccaatctaaaatcccacattgcatttagtttgtgtgtattttctttctttattattattttttttttggtaattaagttttttaaaaaggtcatagactatagggatttcatttacaagaataatatcttcagcatatggccctttcctgatatgtctgactaatgggtttctaaaatgtatttgcagagattgccttgcaacaggtttccatgttcttccgatcagaaccaaagtgggaggtggtggaacctttgaaagacataggtgagacattggcacgctcattctgttaaaaagacagatcacagaactggatccttagtcatgctttctgatacgtatcccaggaacatgcttaaatgcaggtgacttctttttctttttgcatatcaactgcttgaggatacagctggtaacttttaatacttaatgaaccttggttaaagccccatcaaagcatttggatggtaataactttcagaaacaccattccttcttcatctatctttttcactaaatctaaactgaagtgctactttcctgccttttccgtgaataatttcttcatttactgtttctttttaagtatagcctttactatgccaacgttatcaaatggttcttttacttgtgcctatgtagctgcgaataatattgccaaacttaatttttcttgattacctagtcagtgaaacatatcagttgttgcaaaaattgtgcagctctaagcacatttttgcttttatggcaggttggagaataaggaagaaatatttcttgatgaagattaaaaatcagccaaaggaacggctagtgttaagctgggctgaccttggcccagacaagtattgtcagataaagattttcagtgtctaatcaaacttctgccttcttgtttgcacccttacatctatcgggttacctttgccacagctaatgaatcctcagcgttgctaattaggatgtttaacgaaaagggaacattgaaggatctgatctacaaggcaaaaccaaaagacccatttctaaagaagtactgcaaccctaagaagattcagggcctggaactccagcaaataaaaacatatggacggcaaatattagaggtactgaagtttcttcatgacaagggattcccttatgggcatcttcacgcctccaatgtgatgctcgatggggacacttgccggctgctggaccttgagaattccttattgggcctgccttccttctaccgatcttatttttcacaattcaggaaaatcaatacattggaaagtgtggatgtccactgctttggccacttactgtatgaaatgacttatggacgaccgccagactcggtgcctgtggactccttccctcctgccccgtccatggctgtggtggccgtgttggagtctacgctgtcttgtgaagcctgtaaaaatggcatgcctaccatctcccggctcttacagatgccattattcagcgatgttttactaaccacttctgaaaaaccacagtttaagatccctacaaagttanaagaggcattgagaattgccaaagaatgtatagagaagagactaattgaggaacagaaacagattcaccagcatcgaagactgacaagagctcagtcccaccatggatctgaggaggaaagaaaaaaaaaaaaaaaaaaa

SEQ ID NO: 1524 - DNA, 493 bp, Homo sapiens
ggcacgagctgaccccttttcctcatctgtctaatcccccaacttagggaaataaatggttcctggcctcttgatctcagttcagactgcaaactcttaggggcaggggtagctacatatcaggctatgggtttggtgctagaatggtgttgatactgtggtgttctctgaggatggggatcccagccaatgccatctggcatagtgctgtacacaggtgagtttgtttaggaagatttggggaagatgcctggagtctttggaatggcaactcctgctgatggagtaatctatctgtctctctttccaggtggatgggaagagagtcccaagggatgcagggcatcctctgtacccctttaatgacccgtactgagaccacagcttcttggcctcccttccagctctgcagctaatgaggtcctgccacaacggaaagagggagttaataaagccattggagcatccaaaaaaaaaaaaaaaaaaaaaaaaa

SEQ ID NO: 1525 - DNA, 460 bp, Homo sapiens
ggcacgagccagccttcagtccctggggcccggagggctggccaggggcttgcggggcactgggagccactcacttgaggtggtccagcatcatgcagctggccagcagggtggccgtggggttggcgatgttcttattggcgatactcttgccggtgttcctcgtagcctggggaggcaagacgaaggagagtgggtggagggcagaaggatgccgggcagtgactctgctcctgtgacacgtccagaagaagccactccacagggacaaaagcccaccagcgggtgccaggggttgggggaaggtgtggggacagatagcttatggggacaggctttcctcgtggggtggtgaaaatgttctggaatgacctggtggtgacggcagtacaaccctggatatccaaaaaactactaaatcatgcattttgaacgggctaaaaaaaaaaaaaaaaaaaaa

SEQ ID NO: 1526 - DNA, 1369 bp, Homo sapiens
ggcacgaggttttttgtaacaaagtagccatcattatagaatattaataaatggattattaatatgattgtttcaaaaggacttgatataaaaattaagggtaaataacttggaagaaaattttgttttaaattatagcagtagcttatatatccaaatatctattggttgagccatccaatagatgagtgacgcttagctgttttatgtaaatggctttcctaacaatgagaatactcttttttgcttattcatttagtaaaaaacattttttaatggaaatatctgagcatggtcattaacgtggccactgcaacacatattggtggaagtataaattaatccagtgtttctacaaggcaatgtgacagtatcatgctttaattcagtcatttcatttctaggaattatcctaaggaaatagttataaaagacacacaatgatttatgggcatggctttgcatttcagtgacatttgtaataataaaaagttagaaacaaacgaaataggttaaaaaattatggtatgcccaaatgaagacatattctcctatcagtggtaattaatactttttaaaaattgtccaaactttttgcaatgaaaattcctgcttttatacccaagaagtatgtattttttttttactcgggaggctgaggcaggagaatggcgtgaacctgggaggtggagcttgcagtgagccgagatcgtgccactgcactccagcctgggcgaaagagcaagactccatctcaaaaaagaaagaataaaaagaaatatgtatttttttcaaaagcactactgaaacttactaaatcaaccctcaacaagtcatcaactttgaatattttaatgaattgcccacaacaggcttgcaaatagtttctagccaggttaggctataataatgttaattaagacgatttgtttagcctggcttagtggcatgcacctgtagtcctagctactcaggaggctgaggcaagaaaaaaaaatttgctggctgcacttgtatttgattatgttctttcttgactaccgattctaacatcaaaacagatgcaaccagctgggcacagtggctcacacctgtaatcccagcactttgggaagctaaggcaggtggatcacctgaggtcaggagtttgaaaccagcctggctaacttggtgaaaccccatctctactaaaaatacaaaaattagtcaggcgtggtggcaggcgcctgtaatttcagctacttaggaggctgaggcaggagaatcacttgaacctgggagggaaggttgcagtaagccgagatcgcgtcactgccctccagcctaggcaacaagagcaacactccatctcaaaaaaaaaaaaaaaaaa

SEQ ID NO: 1527 - DNA, 1556 bp, Homo sapiens
ggcacgagtgaagctccgcggtgcctgatggggccgttgggcggccggtagctgttgctgttgggggaccccctcattcctgccgctgccgtccctgctgcctcatggcggccatcggagttcacctgggctgcacctcagcctgtgtggccgtctataaggatggccgggctggtgtggttgcaaatgatgccggtgaccgagttactccagctgttgttgcttactcagaaaatgaagagattgttggattggcagcaaaacaaagtagaataagaaatatttcaaatacagtaatgaaagtaaagcagatcctgggcagaagctccagtgatccacaagctcagaaatacatcgcggaaagtaaatgtttagtcattgaaaaaaatgggaaattacgatatgaaatagatactggagaagaaacaaaatttgttaacccagaagatgttgccagactgatatttagtaaaatgaaagaaacggcacattctgtattgggctcagatgcaaatgatgtagttattactgtcccgtttgattttggagaaaagcaaaaaaatgctcttggatccttcaaacatgatgtgagaggaaatgcgcgagccatgatgaaattaacgaacagtgctgaagtagcgaaacattctttgtcaaccttgggaagtgccaactgttttcttgactcattatatgaaggtcaagattttgattgcaatgtgtccagagcaagatttgaacttctttgttctccactttttaataagtgtatagaagcaatcagaggactcttagatcaaaatggatttacagcagatgatatcaacaaggttgtcctttgtggagggtcttctcgaatcccaaagctacagcaactgattaaagatcttttcccagctgttgagcttctcaattctatccctcctgatgaagtgatccctattggtgcagctatagaagcaggaattcttattgggaaagaaaacctgttggtggaagactctcttatgatagagtgttcagccagagatattttagttaagggtgtggacgaatcaggagcccagtagattcacagtgctgtttccatcagggactcctttgccagctcgaagacaacacacattgcaagcccctggaagcatatcttcagtgtgccttgaactctatgagtctgatgggaagaactctgccaaagaggaaaccaagtttgcacaggttgtactccaggatttagataaaaaagaaaatggattacgtgatatattagctgttcttactatgaaaagggatggatctttacatgtgacatgcacagatcaagaaactggaaaatgtgaagcaatctctattgagatagcatcttagtgttttagagaaatcaagaatttttaaaaacaagaatatcaacatttggttttgtgtataagtggtgtttgtattaaaatactttttcaatgaactgtataaactatgttttattaaactacaatatatcagtaaaaaaaaaaaaaaaaaaaaaaaaaaaaaaaaaaaaaaaaaaaaaaaaaaaaaaa

SEQ ID NO: 1528 - DNA, 1259 bp, Homo sapiens
aggattcggccgagctttcttgtaatttgtcatttgtatatctctcctgtgaattgcctatatatatttcatggccattttctcattaggatttctttttttcttaccagtttctagaaatgcattgtttattcctcttcccaacttggcatcaagtgtatcttatgtttttctttctcataaattagaatgtttcattttcagttatattaattttccttttttcttaagtacattaaaaaaggtacaacagtgaaattctcatttgtatttgtcactctgtttcttattggatgagtaatcaggatttttggggaaataactggatatttcatacagcaagcaaataattcaaagcatgggaagttaacatagaggtggtagtggggatgcataaaatcgtagtcagtaagttaacaatgagggaaataattaaatttcactcagygtttacaaacattggaaaacattctgacctgatgggtctgatttcttttgttggaattgttttgtctgtttaaggataatgtgaattactgtgtgtgtagtataattagaatataccacagtatcttaaaattgtttagcatatactttaatcagttggatctgcttcaccctcttctccccatgaagaaaattatatgttaagtgctcataccatatctacttatcttcagtaactatatttagccttagcattacaccagccttacagccttattcattcatttagtttctaaacattaaaatcttaaatactttttgtttaaattagttattattttgtttttatttttttttaatttcattttttctttttatcttcttggttaccaagttttagtgagttaagtggctgtcagagtattggaagggggtctgtttgaggatgaatggtaggaattttacatttgatgttgtcttattttaatgagtcaatacagaaagtacttcagagtatttatgaaaagtgtaaatctaatgttacatgagaatgtggctaggactttatggttttaaatttctccattctaaaattatgaagatcaatttatatgtaaatcttaccattaagaacatgcttattgataaatctaaatctctattttagagcaatatactttgctgcttattcaaactgcaaggaaaagttgaatgatgtatttgatcctgattctacccaagtacatatgatttcagctgcaatggcaggtatgaatgtataatattaaaaaaaaaaaaaaaaaaaactcgag

SEQ ID NO: 1529 - DNA, 1217 bp, Homo sapiens
ggcacgaggggacttggtgcattcctctctcccctcccagttcttattggtttctccagtgtctgtagaacagtggttttgatggctttacctctgcagataatttctcttgcaatgtagtggtgatggggaggtgtgtctggatgcatttcagctgtagttgctgttttgctttcccagacagcaccatcccaaggggtagaggctggagcattttgtgatgtatccccagtactgaagaaaaaggcttcaatagcaggaggaattcctcaactgcatacactctgagaatttaaacaataacttctctatcacactcaaattgaaaccacccaatgaatatgtctactttaatcgtgtgctaacttaaatgacatttggcagcctctgtcccagaaaagattatcatctgctcctgtttatttccctgcaagtctttatgtctgttcagatttcagatatattgtttgtcctataacatcaaaaatttgatgtatatatgctaatttgcagatcagtaagtttagtatttgttataagaatagtaacatatttttatggggtgcttacatctccaagctgagaagcacctctgtgtaatactaagcaactagaaatggtacaaataccaagaagatacatagataaacagtaatggcatgctaatttatggtaataacatccatcattagaatcaatacattgttgatgctcaacatgtgtgcatcataagtagttatgtgcgagaagccacacaaataaaacacatactatgtaattcctgtataataaattcttgaaactcaaaactaaggtattaaatgtgaaggactgactcagaatatggtggaggaagaaaataattgggaaggaggaattgtagaggaacacaaggaaacttttaagtgtaatttgtttattcattatttggatggcttttggggatgcacaggtgagcacgagtggaataacattttgttttgtttgtttgtttgtttttttctgaagagatgtggtcctactctgcgacccaggctggagtgtagtggtgggatcatagttcaatgtagcctccaacttctggtctccaacaatactcctgcatctgccatctaagtagctggaactaccgttgtttgccagcaggcttggcttgagtacttattaaaccgcacactttttgcaataaaaaaaaataaaaaaaaaaaaaaaaaaaa

SEQ ID NO: 1530 - DNA, 1876 bp, Homo sapiens
gcgccgccgtggagtgtagcggaaagggctcgccgtcctcctccgtttctcgctgcttcgggacgcgctctctgcggctctgtgagcgcccctgagcgccggcagcggccgcggtgggttcttcaggttatcttatgatgaggcttttgctatggctaatgatcccttggaaggcttccatgaagtaaaccttgcttcacctacttctccggaccttcttggtgtgtatgaatcaggaactcaagagcagactacctcaccaagtgtcatctaccggccacacccttcagctttatcctctgtacctatccaggcaaatgcattagatgtttctgaacttcctacacaacccgtgtattcatcccccagacgtttaaattgtgcggaaatatctagtatcagctttcatgttacagacccagccccttgctctacctctggagtcacagctggattaactaaattaactacaagaaaggacaactataatgcagagagagagtttttacagggtgctactataacagaggcttgcgatggcagtgatgatatttttgggttgagtactgatagtctgtctcgtttacgaagcccatctgttttggaagttagagaaaagggctatgaacgattaaaagaagaactcgcaaaagctcagagggaactgaagttaaaagatgaagaatgtgagaggctttcaaaagtgcgagatcaacttggacaggaattggaagaactcacagctagtctatttgaggaagctcataaaatggtgagagaagcaaatatcaagcaggcaacagcagaaaaacagctaaaagaagcacaaggaaaaattgatgtacttcaagctgaagtagctgcattgaagacacttgtattgtccagttctccaacatcacctacgcaggagcctttgccaggtggaaagacaccttttaaaaaggggcatacaagaaataaaagcacaagcagtgctatgagtggcagtcatcaggacctcagtgtgatacagccaattgtaaaagactgcaaagaggctgacttatccttgtataatgaattccgattgtggaaggatgagcccacaatggacaggaccgtgtcctttcttagacaaaatctaccaggaagatatctttccatgtttaacattctcaaaaagtgagttggcttcagctgttctggaggctgtggaaaacaatactctaagcattgaaccagtgggattacaacctatccggtttgtgaaagcttctgcagttgaatgcggaggaccaaaaaaatgtgctctcactggccagagtaagtcctgtaaacacagaattaaattaggggactcaagcaactattattatatttctcctttttgcagatacaggatcacttctgtatgtaacttttttacatacattcgatacattcagcagggactcgtgaaacagcaggatgttgatcagatgttttgggaggttatgcagttgagaaaagagatgtcattggcaaagctgggttatttcaaagaggaactctgatgctctgcgtgggaccatgcctgaactccccgaataactgaaaaatggctgaatatttttatggttacttgatatttatttccaaggagtgagcctaagacttttttccccttttgcaaattgctctaagaagtaccatgatttcttttaaactgatctatgctgtgtttgcttattctttagttgaacacactatgaagaattccaggtgtactagtgaatgtaatttatagttgccaaaaaaaaaaaaacctgaaataaataaatgttagattgaaaaaaaaaaaaaaaaaactcgagggggggcccggwmccaattcgccctatagtgagtcgtacac

SEQ ID NO: 1531 - DNA, 1876 bp, Homo sapiens
gcgccgccgtggagtgtagcggaaagggctcgccgtcctcctccgtttctcgctgcttcgggacgcgctctctgcggctctgtgagcgcccctgagcgccggcagcggccgcggtgggttcttcaggttatcttatgatgaggcttttgctatggctaatgatcccttggaaggcttccatgaagtaaaccttgcttcacctacttctccggaccttcttggtgtgtatgaatcaggaactcaagagcagactacctcaccaagtgtcatctaccggccacacccttcagctttatcctctgtacctatccaggcaaatgcattagatgtttctgaacttcctacacaacccgtgtattcatcccccagacgtttaaattgtgcggaaatatctagtatcagctttcatgttacagacccagccccttgctctacctctggagtcacagctggattaactaaattaactacaagaaaggacaactataatgcagagagagagtttttacagggtgctactataacagaggcttgcgatggcagtgatgatatttttgggttgagtactgatagtctgtctcgtttacgaagcccatctgttttggaagttagagaaaagggctatgaacgattaaaagaagaactcgcaaaagctcagagggaactgaagttaaaagatgaagaatgtgagaggctttcaaaagtgcgagatcaacttggacaggaattggaagaactcacagctagtctatttgaggaagctcataaaatggtgagagaagcaaatatcaagcaggcaacagcagaaaaacagctaaaagaagcacaaggaaaaattgatgtacttcaagctgaagtagctgcattgaagacacttgtattgtccagttctccaacatcacctacgcaggagcctttgccaggtggaaagacaccttttaaaaaggggcatacaagaaataaaagcacaagcagtgctatgagtggcagtcatcaggacctcagtgtgatacagccaattgtaaaagactgcaaagaggctgacttatccttgtataatgaattccgattgtggaaggatgagcccacaatggacaggaccgtgtcctttcttagacaaaatctaccaggaagatatctttccatgtttaacattctcaaaaagtgagttggcttcagctgttctggaggctgtggaaaacaatactctaagcattgaaccagtgggattacaacctatccggtttgtgaaagcttctgcagttgaatgcggaggaccaaaaaaatgtgctctcactggccagagtaagtcctgtaaacacagaattaaattaggggactcaagcaactattattatatttctcctttttgcagatacaggatcacttctgtatgtaacttttttacatacattcgatacattcagcagggactcgtgaaacagcaggatgttgatcagatgttttgggaggttatgcagttgagaaaagagatgtcattggcaaagctgggttatttcaaagaggaactctgatgctctgcgtgggaccatgcctgaactccccgaataactgaaaaatggctgaatatttttatggttacttgatatttatttccaaggagtgagcctaagacttttttccccttttgcaaattgctctaagaagtaccatgatttcttttaaactgatctatgctgtgtttgcttattctttagttgaacacactatgaagaattccaggtgtactagtgaatgtaatttatagttgccaaaaaaaaaaaaacctgaaataaataaatgttagattgaaaaaaaaaaaaaaaaaactcgagggggggcccggwmccaattcgccckatagtgagtcgtacac

SEQ ID NO: 1532 - DNA, 1133 bp, Homo sapiens
  SITE (38): n equals a,t,g, or c
caatccccccgaawaawagaaactgggaaakgataaanccccctaatgcccaagggtccwagtgtgwtccytagtggttawactgggaagtgtgtggagaatttaaggtgcctgctctgctgctcyggatggctgaaggctccygggccatcttcatgtgctgcttgaagagctcctattttgtactcctggctagaatgctgtggaacaaatacaaagtgaaaaaagttctctgtagatttctgaagtgcatattcattgatgccaagaaaaaaaaaaagttgcctttttgaagtgatgttttttgctgtcttcttaaacacaaggcttttttgaatgattagtatatttcatggtaaagaaaacagcctgtctggctcaaagcaattaaatagaatgtaatggtgagtacaaatgagtgcacatgtcaggactcaggtctaactccttgtctcctgagcctaaagattgcaacatacacaagaacacactcctattcctaccccacacactcagggacaagcccaactaaagcttacaaggagaccagggtggctctgtccaggggagaagccagttatggaacagtgcattgagagccatggtaggagaggcccacagttctctggagcatgcagcaggggcaccccacctggccttgaggatcagggggagtcaaaggataaagcatggggctgatgacgtctgagggagtgtgatcctccatgtatggcctctgcctgctgtctcacatgtcccttctggtggtcacttgggctctaggagtatacgtcacctcagaccatctggcagaaatactccaggctcctaccccaaagcacatgtcagccttgctgctggagcacgaagacaatgtaaatgaaacatgaaatggaggagttgtgagaccctgaccctgagtccttacttgaaagctgctgctggtgttctgagtgtcttttggactcttatttcttgcccttttccttattaggcaagcagtaacttaggaagtaggtaagagcaataaatgtgacatgttatgtcatcatagtaggagctcatgggaataaaagtcagtggcttgatgcttctgttagaggcaaaaaaaaaaaaaaaaaaaaaaaaaaaaa

SEQ ID NO: 1533 - DNA, 1609 bp, Homo sapiens
aattcggcacgagcggcacgagcagccttcctcccccagcctgagtgactactctattccttggtccctgctattgtcggggacgattgcatgggctacgccaggaaagtaggctgggtgaccgcaggcctggtgattggggctggcgcctgctattgcatttatagactgactaggggaagaaaacagaacaaggaaaaaatggctgagggtggatctggggatgtggatgatgctggggactgttctggggccaggtataatgactggtctgatgatgatgatgacagcaatgagagcaagagtatagtatggtacccaccttgggctcggattgggactgaagctggaaccagagctagggccagggcaagggccagggctacccgggcacgtcgggctgtccagaaacgggcttcccccaattcagatgataccgttttgtcccctcaagagctacaaaaggttctttgcttggttgagatgtctgaaaagccttatattcttgaagcagctttaattgctctgggtaacaatgctgcttatgcatttaacagagatattattcgtgatctgggtggtctcccaattgtcgcaaagattctcaatactcgggatcccatagttaaggaaaaggctttaattgtcctgaataacttgagtgtgaatgctgaaaatcagcgcaggcttaaagtatacatgaatcaagtgtgtgatgacacaatcacttctcgcttgaactcatctgtgcagcttgctggactgagattgcttacaaatatgactgttactaatgagtatcagcacatgcttgctaattccatttctgacttttttcgtttattttcagcgggaaatgaagaaaccaaacttcaggttctgaaactccttttgaatttggctgaaaatccagccatgactagggaactgctcagggcccaagtaccatcttcactgggctccctctttaataagaaggagaacaaagaagttattcttaaacttctggtcatatttgagaacataaatgataatttcaaatgggaagaaaatgaacctactcagaatcaattcggtgaaggttcactttttttctttttaaaagaatttcaagtgtgtgctgataaggttctgggaatagaaagtcaccatgattttttggtgaaagtaaaagttggaaaattcatggccaaacttgctgaacatatgttcccaaagagccaggaataacaccttgattttgtaatttagaagcaacacacattgtaaactattcattttctccaccttgtttatatggtaaaggaatcctttcagctgccagttttgaataatgaatatcatattgtatcatcaatgctgatatttaactgagttggtctttaggtttaagatggataaatgaatatcactacttgttctgaaaacatgtttgttgctttttatctcgctgcctagattgaaatattttgctatttcttctgcataagtgacagtgaaccaattcatcatgagtaagctcccttctgtcattttcattgatttaatttgtgtgtcatcaataaaattgtatgttaatgctggaaagaaaaaaaaaaaaaaaaaaaac

SEQ ID NO: 1534 - DNA, 1359 bp, Homo sapiens
  SITE (808): n equals a,t,g, or c
ggcacgagccgaggctggcactggcacaactacctgaggatggctcgcagggcagtcgggagctgctgctggctctgtcctggctcttggcccgaggacctgtgcccgagcagatgctggcccaggcccgagtgcctctgggtgacgagatgactgtgtgccagtgtgaggccctggccagccctggcccacctgcaccccacatggaagcagagggtcctgtggatgtccgccatgtgcagtggctgatgggaaagctgcggttccggtggcgccagctggtgtccagtcagcaggagcagtgcgccctcctgagcaagatccacctgtacacacgcggctgccacagcgaccagagccttagccatctgtctgtcactgaagcagagatgctcaggggacccagagggaggccagcagctgctgcgggactctggagcgtgagaaccagcgcctggaggctgtcctggcgtggcggcgctctgagctggtcttctggcggtggatggacacggtcctgggcacctgtgccccggaggtgcctgctgcagcctcacagcccacccccctgccctgggtccccgagcgcgggggtggcgagttggacctggtagtgcgggagctgcaggcactggaggaggagctgcgggaggctgcggagcgcaggcgggcggcctgggaggccaaggctggaggctgtggacgggggccagagtggagtgccgcgcggcgggcctctcgggaggctgtggaaaaggagctgggagctctacagcagtgctgggagcgagacggtggcccggcccanccccatgggccacaccggctggtgagacgaaaggatggggcagcaggggaccgggacctgcgggcagctgtggtgatcaggacgctgaggagccaggaggcctgcctggaggcggtgctacgtcgactacagggacagtgtcggcaggaactggccaggctggtgggagcccgccctggtctcatctggatcccgccacctggacgctgagggcctgtcgacgggccctcgtgtgggaagcctgccctggcccagcctggctgggtcttggaggagcagattccaaggccaggtggccgcagggacgatgcagatgcagagcccacgtcacatgctcgctccaggggtggggctgggctgactctggccggatcccaggcctgtggctagcagcactggggacaggaatggctggtcccttgaggaggtcgtgacaggctcagcctggtggtctggaggggactcggaaataaattgtagcagctttcctgccaaaaaaaaaaaaaaaaaaaaaaaaaaaaaaaaaaaaaaaaaaaaaaaaaaaaaaaaaa

SEQ ID NO: 1535 - DNA, 1490 bp, Homo sapiens
ggcacgagtggactcgagcaaagatgacctcactggagttggactttcttctctttgctcctggcagtgttcccactgatgccggttgtaggtcgaaagccagacatctctctagtgatgggtgcaggcttgctggttcttctgttatccctgtgtgttgtaacatctctcatgaaaagaaaagatagctttataaaggaagagctattggtacatctgttacaggtgctgagcacagtgctctccatgtatgttgtgtatagcactcagagtagtctactcaggaagcaaggactgcctctcatgaatcaaattattagctgggcaacattagcctcttccttggttgtgccactactgagttctccagttctctttcagcgattgttcagcatacttctttcattgatgtcaacctacctacttctaagcacagggtatgaagctctctttccactagtgttgtcttgtttgatgtttgtctggataaacatagaacaagaaactctacaacaatctggtgtttgctgtaaacaaaagctcaccagtatccagttctcttataatactgatataactcagtttcgacagctttgatcttgcctctgtctattgctttctgactgtgttcagtccttttatgatgggagccctgatgatgtggaagattttaatcccctttgttcttgttatgtgtgcttttgaagcagttcagttgactactcagttatcgtcaaaaagcctttttctcattgttctcgtcatatcagacattatggctttgcattttttcttcttggtcaaggattatggcagctggcttgatattgggacaagcatcagccactatgtgattgtcatgtccatgaccatctttttggtgttcctcaatgggctgggcccagctgctcacaacgaagaaactcagactatgtggcaaacccaaaagtcacttcatgtgaggttgctgaagcaccattcagcatctggatcctgattctccttttaagctaaaatctcatcaaggcttcaataagaagatggatatggatatatagtatattctactcctgtaaggaaaatggtatttggaattccgaattgacaggttatctggaacaaaggagcttctttttttttctaggttttgcaggcatgaaatagtgattatatctgtggaaaagcataggaaggcattctcctttttcatttttttcctttggctggcagctcttcccagtgatgttgagagcacctgcagcaatctggtccccagtcgcacaacttcccacatacccagaggagagcatatgcctgtgggggcagtgctgatggcatccagagtcattgctgtggctgagctggaaggaaatcaccaggtgccaccgtcaatatttatcagctttcagcactggttttgttagacagtcagggtgtattatttcaagagcttcaataaaaaaagtgtttgcaaaaaaaaaaaaaaaaaa

SEQ ID NO: 1536 - DNA, 522 bp, Homo sapiens
aaaatataaaaataaaatgcacgtcttccattcttccccactgcctgtgtatagtggaggttggtgctcactcttggtccttctgagcttagcagaaagaactatgggcagttctacctgaaaagggagaactcacatgggcaggaaagagcattgtggcaacaaaggagaggtcctcactctgctcggctctaggaagccacagggggcttgatatcagctcagtctacaagaagtctttccttccactgcttgtggttgatttttaatttttaatgtaaaagcatattgcttgagccagggaatttgagaccagcctgggcaacatggtgagactcagtctccacaaaaaatacacaaaattagccgggcgtgttggcatctgcctgtagtcccaactacttaagggcctgaggtgggaggatcgcttgagccccaggaggtcgaggcagctgtgagctgagctgagatcacaccactgcactccagcctgggagtgcaaaaaaaaaaaaaaaaaaaaaa

SEQ ID NO: 1537 - DNA, 930 bp, Homo sapiens
ggcacgagctctatctgggatagagttaatgagggctgcaaaaatagcatcttcatggaaaaacagggacaaatttgtggatgcaagattccagcccttagaagttcttggcatagtaaatgtttaacttaataaattttctatgccttagtaatggaatttcctgctttttgggaaatatatgcatttattatttctgctcctgtgtttcacatgcaaataatacagaaaggagcaagatggacaaagatcttgctgtcctacaatttacatctaatgggaggagacatcccacatataacctaagttttaaaaacaaatgatgaattttaaatgattttaattgtttgcgattgcactgctttttggtgcacccgtctagattcaatattgcattttatgtgttcatttgtttcgatcagacaggcattttgaggagtaaatgtatgtggttgtgtataaggtattgtcacagaatttcccttctctttaaaattattcttttgaggggaattttgcattcgtgctaactgactggcatgtacagatcgggagccttttctattttctctgattgctttagattttctgtatcaaaacttgaacagatcttgagcagcgtttagtacttttatgtacaacctactggtcttgagagtctctgatggtgaaattggactaagttagattatgtaaatctagagccctttgagttagtctatcttttctttttcagacttcacagcagcaaatgtttatcacctcttgaaaagaagcattagtgcttcaattaatccagaagatagtactttccctggtaagtataataaactcctcttttctctggcacagcatttgtactggaaattaacttaattaatttggaccctaaggagtacaaggaaatacttcaaaaaaaaaaaaaaaaaa

SEQ ID NO: 1538 - DNA, 580 bp, Homo sapiens
ggcacgagagaaggtgggaccccagcccaagcacttccccattgcagcctggcatgaaatctttgccttttagtggggatcactcctgcccgagtcctggctgtggtggggactctgcaagttgctaacccagcgtccattctctttcctccgtactaacagaaccccggtgcctctgcccagttccaatagcgggcagacgagagccatgtcctgggctcccttgcagcccggggtgtgcagctgtggcgtggaggtgggtggtgctgggagagacttgcagggaagctcctgtgaaggggactcagctgccacatgcaggacccttcccctttgccttcttcctgcctggaacatggatgtgatggctggtgctgggacagctgtcctgagagcgtgaggaaagggtcacaccctaaggacagtggagcagaacacaggaaggaccctgggcctttgctgacgcagaacgcgggaaggaccctgggcctttgctgacataccagccccagactacttaaattcagctttttttttaatgtgagaaaataaatgcacccctctctggtttaaaaaaaaa

SEQ ID NO: 1539 - DNA, 1224 bp, Homo sapiens
ggcacgaggcgcggaaggcgggcacgcgggccatggctccctgggcggaggccgagcactcggcgctgaacccgctgcgcgcggtgtggctcacgctgaccgccgccttcctgctgaccctactgctgcagctcctgccgcccggcctgctcccgggctgcgcgatcttccaggacctgatccgctatgggaaaaccaagtgtggggagccgtcgcgccccgccgcctgccgagcctttgatgtccccaagagatatttttcccacttttatatcatctcagtgctgtggaatggcttcctgctttggtgccttactcaatctctgttcctgggagcaccttttccaagctggcttcatggtttgctcagaattctcggggcggcacagttccagggaggggagctggcactgtctgcattcttagtgctagtatttctgtggctgcacagcttacgaagactcttcgagtgcctctacgtcagtgtcttctccaatgtcatgattcacgtcgtgcagtactgttttggacttgtctattatgtccttgttggcctaactgtgctgagccaagtgccaatggatggcaggaatgcctacataacagggaaaaatctattgatgcaagcacggtggttccatattcttgggatgatgatgttcatctggtcatctgcccatcagtataagtgccatgttattctcggcaatctcaggaaaaataaagcaggagtggtcattcactgtaaccacaggatcccatttggagactggtttgaatatgtttcttcccctaactacttagcagagctgatgatctacgtttccatggccgtcacctttgggttccacaacttaacttggtggctagtggtgacaaatgtcttctttaatcaggccctgtctgcctttctcagccaccaattctacaaaagcaaatttgtctcttacccgaagcataggaaagctttcctaccatttttgttttaagttaacctcagtcatgaagaatgcaaaccaggtgatggtttcaatgcctaaggacagtgaagtctggagtccaaagtacagtttcagcaaagctgtttgaaactctccattccatttctataccccacaagttttcactgaatgagcatggcagtgccactcaagaaaatgaatctccaaagtatcttcaaagaataaatactaatggcagaaaaaaaaaaaaaaaaaaaaaaaa

SEQ ID NO: 1540 - DNA, 1448 bp, Homo sapiens
gaattcggcacgagttcagtaagaataatgtttttggctttcacatatactcagtttaagtgcttagtattaataacaagccatgaagggaataaattcctcttcactgagacatagacttkggaataaaagacattttaactgatgtgcacaattattaatctagtggataagatggatttaaaaggaagaacaaaatgttcccagtactttttactgtctgtggttttattactatctatgggcatagtgggaagcatcattgagactttagggaaactataaaagttggaagggtggtggcatcaggggttggatgctggttctcaagttcctagctctgccccttgttagtcatttgagttaaataattaatgggaatatctacttcacaggattatgaggaatcctaaggggtgtaatccatatcaaacttttagaaaccagttgttttattacctgggaaaggtaakraagggccagactttttatactactgttagtatttaaatttgggatagtctggatgccacctaatacagttactatgaaattaacaaggtaactaaggaagttgatagtaccagtattatctattgctatgtcctaaattaccatagatttagtggcttaaaacaaatgcgtctcagtttctgtctgarcatggtttarataggtcctttagaaagctcatggtctcatctgcattctcacctggtgatttgggaagaactcatttcagcctcactcggctggcagaattcagttcttgccactgcaggactgartgtccagacctctcactggttgtcagytggaggcccccgcttagttccttgccagctgggtgctccctgcatggcctggctgctgactggaccactgacatgattactgtcactaccagcaagtgtcgagagccaagctgccagcaagaggggtcttttcaggtcctgcccatatccaaggggagaggctcatacgaaggattggataccaagargtgcgggtggggctaatgggaaggcacctaragtttgtcacagctttttttttttaactgaatctctttaaattggtcgtctcsccctacaatgcaaatgctttgtgtacaagtaaaaagaaaaatggctctcacaatatgaaaaaccctggctgggcactgtggcttatataaacctgtaatcccagcactttgggargcccargcgggtggatcccttgaggtcaggagttcaagtccaaccaggccaacatggtgaaacaccgtctttactaaaaataaaaaaattagccaggcatggtggcatgcgcctgtgktcccagccactcgagagattgaggcaggagaattgcttgaacctgggaggtagaggttgcagtgagctgagttgggccactgcactccagtctgggtgacagagtaagactccacctccaaaaaaaaa

SEQ ID NO: 1541 - DNA, 1143 bp, Homo sapiens
ggcacgaggacgcgaggcagggagcttccaggttatagcaatggagcttaccatctttatcctgagactggccatttacatcctgacatttcccttgtacctgctgaactttctgggcttgtggagctggatatgcaaaaaatggttcccctacttcttggtgaggttcactgtgatatacaacgaacagatggcaagcaagaagcgggagctcttcagtaacctgcaggagtttgcgggcccctccgggaaactctccctgctggaagtgggctgtggcacgggggccaacttcaagactccgtctcaaaaaaaaaaaaaaaaaaaaagaagtagagacagggagacagggtctcactgtgttgcctaggccggtcttgaactcctgggctcaagtgattctcccaccttgacctcctaaattgttgggattacaggtgtgagacagtgcacctggccgaaatagctcaagtttctgaaaaacaaatctgaatctatttgttattcttagcgtcactggtctggctttcagaattaacatacaaggttgccacacctagttctgcccagctttatgtcttttattccagtattccaccaaagtttgttttcctgcattccagttctcaagtcttaagataaagattgtacttgacagtttagtatatccataaaactatttgaggtggttaaggttcttgggttcattttccttaatactttgctgaatattgtagattgtaggcaatgaaaaagtctactaaattaggaaaaccttgaataattaggtatcctaggtaagagcccctaaacatcaagcaatctgtgagtctgtaaagaaataaatattttttggattattcttatctaattccacccctgttggaagatgatttctttgttctttgcaactatggaagctgtgaaaatcatcacaagtgcctctgaaagcgagtgttaggttggttagagggtttaatattttctgcaatggtttgtaggaattttaataaatgtagtatattttctgagatgattttgtaaaagtactattttaaatatcaaatcaaccaataaattcacatttgtgttaggaacagaaaaaaaaaaaaaaaaaaaaaaaaaaaaaaaaaaaaaaaaaaa

SEQ ID NO: 1542 - DNA, 1589 bp, Homo sapiens
ggcacgagaagaccttgtattttatagacccgttatactagtattgttatcttacttgatgaaatctcttaggcctcctaaatttccatcattaaattaaaaactgggattacaggcgtgaaccaccgcgcccggccgacagtgatttttcataaaggtgttccctttgttctgggatttttagccttcatacatttttactgttaggcatttcctttttcagatgatggtgataatagttaaaaaaattttattgatagtattaagggagtccactaccttgtgtcagattccctgtttctttttgaagcccttgaaatgaagtttagggaccactgatctagaattctctttatgctcctccactacccattaaccccactctatagtctgccttttcgctttcttctctcctcccttctaamcacttcgtagamcactgtgttttctgttcatgattgaccttcaaattgccaaatcctttggycttataamccgtmtgtacttaaccaacactctgttgttaacaaatccttcaaaactgttttcttttgcttccgctctgtttttcctgtcatccacttatcacttttcttcatatgttttctttcttttgttcccagttgttattatgtggggttctggttctattttatgttctcactgtatattcagaatcagatttttagctaccatgtaccatcttaataatacctagcatttatttactctttcctaattgttatttcagtgcttcagtatttcagtattcatttaattcattcagtattcatttaattctcaaaacaactcagtgaggttgatacaggtataattggtgtcttttttttcttttttctgacactggcatatcgaggcccaaaggttaagtaatctgtgcaactaggaggcagtagaactgggatttaaacttagactgcctgtagaggccatgttcttaaccactactagatttttggcgtccagatgtcccttgtatttctaacttccgtttagttwttctacctccaattcaatacatccattcagttaatctcaagtgcctgcctctttcccttgcaaaacacacttgctcattctttattccttgccacattaaagktaacactatcctccccatcgctagkactatagaggycattgaaccytccccctgcgtatggcctgtgagttttattgattccagcatgattatttggtgatatttgagtgcgattttgtgctagatcctgggtgtataatgatgtatgagacacagactttgtcctcagggagcttatactctagaaataatttttttttttcaagagagcgtcctactctgttgccgaggctggagtgcagtggtgccaacatggcttactgtagcctcaggctcccgagctcaactgatcctcctgctgcagcctcccgagtaggtgggactacagacatggactatcacaccaagctgtttttatttttagttcaggtgggttctcagtttgttgcccaggagttggagaccagcctgggcaacagtgagaccctgtatctaaaaaagaaaaaaaaaaaaaaaaaaactcgag

SEQ ID NO: 1543 - DNA, 831 bp, Homo sapiens
  SITE (53): n equals a,t,g, or c
ggggaaccaaaagcttggaggttccaaccgggggtggcggccggttctagaantagtggatccccccggggttgcaggaattcggcacrrtgagggtgagcaagaagaagactggaaatgccatccctctgtcaccaatccacagtgggtttggggaggaggcatggccaacatccactgggctgcacagacagttttattactaccccacctggctcctgccttctggggccctgcagcccatgaattaatccctttccaggctagcctggggtacatccatcccctttggctcctaacccatggagtcaagcctcgggcacatttctcctaccagcctggtttgggccatatctatgtaatgcttttgccttcatttacttaggttgctcccttaaacaggctcacattttaaacataacctctgcctcctaagcaaatacttatattcataaattactcccacctgaaccaccaccactgccaccacccacaggattcctgggcttccttgcagcatagataaaagcttttttgggcatccacttaccaggcactgggtgggagcaggcagcagggcacatcctccctccttggaagcaatatttactcagcaattctccactcagcagtgtaaatcactgtggcttcccagcaggcatatgatctctgcctggtcgggtttctctcccttttccatgactgaatctgaagctcaagcccctttccccacagcctctcccacatatgcctggaaactgaggtctggctcatccttcagggagctccatgcttccctggtaaggtaaaaaaaaaaaaaaaaaactcgag

SEQ ID NO: 1544 - DNA, 784 bp, Homo sapiens
ggcacagcagaagtattaacttgttcaaatcgtacaaccaaggctcaagtccatgattgcccaactccaaagcccatgttctttctaccttattatgttggcattgttttcaatgtcagtttggacccatataaaaacgcccagctgtaccctatgaggaggatataaaaatgtgagatggtagttgacactcggaggacattcatatctccaaacccaaccttatgaagttggccacagcaagcatgttggaaactagaaccaggggtttcatatcaagccatttgcttaggtctgtatctcaaaagctttaaatacaactttttttggtgccctcttgataaggagtcttatactgagctcttcttcyctttwatagctggtccaycrgaaagattaaattaaacgtttggccacatggacagttaatccttagatcacccagttggatggttcattcctgctatgtttggtttgatttttyatttttggaaaacaaatagtgagtcagtctgctttccctccctttctctgcctcaccactccttctggattctcttagatgctctggtcatactaggtaaacagtatttttcttaaaattttccttgagccatgacagaatcatgagagagctcccctggctctgatacttaatgcccccctctaaaaagaaaggtctatttgaggctattcacttttgtcatcttgaaagagtctctgagtcttacctagcaggaatattttgtttcttttcctaaaaaaaaaaaaaaaaaaactcgag

SEQ ID NO: 1545 - DNA, 1178 bp, Homo sapiens
ggcacgagcggtggattcctgagcattcaatacacatgaggactcccaagttcaaactggcccacttaggattctgggtctcacagtccacacagtgggcgttcccacgcatgttttggatcgactgcagggccatggcctcgctctggctggtcagctgggacttgcttttactgctctcgcatgactgcaggctggccaggatctggctctggatggcttggacccaggcatcccgctcctcatacgtcgtggcttcaaagtgccatgtttggccagtggcagacacaatcataaagttgttggtgcttttcttctttaggtgtttctttttattggcatgaggagaggggggcgggttgagcttggggctggtggtgctggagatactggggctgaagcatatggagtcacccagcccggtgtccatgtccttggataggccattgcttttagagctggagatgggtgcacaggccgatgtggctagggatggccactttcctgggactttgatggtagatgtccgaaggtcaatctcttttttatgaatattcttcatataatcacctaagcttgaataataggtgagcacgccattggaacacagggtgacgtatttctttttccatgtcttcagccatttcccacttcgctttaagagcatgccctgtttaatggggatggctctgccgctcccgatggtgtcagcatgattctccggggctttcctctctttgtctgggtcactccctttctcagatgtaaacaggttggaccagcgcatggaccgcttgcaaacgggggtgggtgtgttggcagtgggaggaacactgaactgagggtcctcctggctggtgctgggagtcgatggaatggaggaggaatagttatttaaactcccacctccatttctgttcttcgtaatgtgcacggtggaaacctgtgtggaacagaaggaggaatggcttcaaaaattgggtagtggcttgcagggtcctatagacagcttacaattaccttttaaaaagatacattttctgggccaggcatggtggctcacacctgtaatcacagcactttgggaggccaaggtgggtggatcacgaggtcaggagttcaagaccatcctggccaacatggtgaaaccctgtctttacaaaaaaaaaaaaaaaaaa

SEQ ID NO: 1546 - DNA, 1579 bp, Homo sapiens
tgattgtatctgaagatcctgagctgccgtacatgcgacctcctctttcaaaagaactgtggttttcagatgacccaaatgtcacaaagacactgcgattcaaacagtggaatggaaaagagagaagcatatatttccagccaccttctttctatgtctctgctcaggacctgcctcatattgagaatggtggtgtggctgtcctcactgggaagaaggtagtacagctggatgtgagagacaacatggtgaaacttaatgatggctctcaaataacctatgaaaagtgcttgattgcaacaggaggtactccaagaagtctgtctgccattgatagggctggagcagaggtgaagagtagaacaacgcttttcagaaagattggagactttagaagcttgcgagaagatttcacgggaagtcaaatcaattacgattatcggtgggggcttccttggtagcgaactggcctgtgctcttggcagaaaggctcgagccttgggcacagaagtgattcaactcttccccgagaaaggaaatatgggaaagatcctccccgaatacctcagcaactggaccatggaaaaagtcagacgagagggggttaaggtgatgcccaatgctattgtgcaatccgttggagtcagcagtggcaagttacttatcaagctgaaagacggcaggaaggtagaaactgaccacatagtggcagctgtgggcctggagcccaatgttgagttggccaagactggtggcctggaaatagactcagattttggtggcttccgggtaaatgcagagctacaagcacgctctaacatctgggtggcaggagatgctgcatgcttctacgatataaagttgggaaggaggcgggtagagcaccatgatcacgctgttgtgagtggaagattggctggagaaaatatgactggagctgctaagccgtactggcatcagtcaatgttctggagtgatttgggccccgatgttggctatgaagctattggtcttgtggacagtagtttgcccacagttggtgtttttgcaaaagcaactgcacaagacaaccccaaatctgccacagagcagtcaggaactggtatccgatcagagagtgagacagagtccgaggcctcagaaattactattcctcccagcaccccggcagttccacaggctcccgtccagggggaggactacggcaaaggtgtcatcttctacctcagggacaaagtggtcgtggggattgtgctatggaacatctttaaccgaatgccaatagcaaggaagatcattaaggacggtgagcagcatgaagatctcaatgaagtagccaaactattcaacattcatgaagactgaagccccacagtggaattggcaaacccactgcagcccctgagaggaggtcgaatgggtaaaggagcatttttttattcagcagactttctctgtgtatgagtgtgaatgatcaagtcctttgtgaatattttcaactatgtaggtaaattcttaatgttcacatagtgaaataaattctgattcttctaaattaaaaaaaaaaaaaaaactcgag

SEQ ID NO: 1547 - DNA, 954 bp, Homo sapiens
caggaattcggcacgagaaaaatgtggggaaatgctttaaaaaaatagcaaaatgtgcaacttcttacaaaaattgttaacgttaggtacttctatatattttatatgaccataatgtccgtgtgtgttttgtaccttcagtcccttgttattgttccgtatattacctgtaagcagatactgtattttattttagcctatttgacagaacacatcactcagaaaaagtgaagtttcagagcaaacagtgaagaaatcagtgtgattgtagacaaaaagtcggttcacagaacggagcagcggggagaggaagggaaaagcttcatagtttggtgcttatcacatcaagagattggtaaatttctgaggaaagacaggctaatggggcactgaaatggaacaactcctttaaacgtgcagccttttgaatttttcctcaaaaccaagaagttgacctctgagctgtcaggtgaccactgtgtgcaaaggggatggattctcttgtcagtagacggtcttctccatgaagcgagagtaggaagtgtactggaatggccaagtgggactgcttcagctgaccaggttcttttaaaccgtagtcatgctttcccactaactcttaaatccttatgcttagaaaattgaggataaggctgggcacagtggctcaggcctgtaatcccagcactttgggagaccaaggcgggtggatcacaaggtcaggagatcgagaccatcctggctaacatggcgaaaccccgtctctactaaaaatacaaaaaaatagctgggcgtggtggcgggcgcctgtagtcccagctactcaggaggctgaggcaggaggatcacttgaacatgggaggcggaggttgcagtgagccaagatggcgccactgcactccagcctgggtgatggcgtgagactccatgtcaaaaaaaaaaaaaaaaaactcg

SEQ ID NO: 1548 - DNA, 1563 bp, Homo sapiens
ggcacgagaagatggcagcccccatacctcaagggttctcttgtttatcgaggtttttgggctggtggtttcggcagccagttctggtgactcagtccgcagctatagttccagtaagaactaaaaaacgtttcacacctcctatttatcaacctaaatttaaaacagaaaaggagtttatgcaacatgcccggaaagcaggattggttattcctccagaaaaatcggaccgttccatacatctggcctgtacagctggtatatttgatgcctatgttcctcctgagggtgatgcacgcatatcatctctttcaaaggagggactgatagagagaactgaacgaatgaagaagactatggcatcacaagtgtcaatccggaggataaaagactatgatgccaactttaaaataaaggacttccctgaaaaagctaaggatatctttattgaagctcacctttgtctaaataactcagaccatgaccgacttcataccttggtaactgaacactgttttccagacatgacttgggacatcaaatataagaccgtccgctggagctttgtggaatctttagagccctctcatgttgttcaagttcgctgttcaagtatgatgaaccagggcaacgtgtacggccagatcaccgtacgcatgcacacccggcagactctggccatctatgaccggtttggccggttgatgtatggacaggaagatgtacccaaggatgtcctggagtatgttgtattcgaaaagcagttgacaaacccctatggaagctggagaatgcataccaagatcgttcccccatgggcaccccctaagcagcccatccttaagacggtgatgatccctggccctcagctgaaaccagaagaagaatatgaagaggcacaaggagaggcccagaagcctcagctagcctgatgacaaaaatgacttctagggtgaagcctgggtgatgaggctgctggaagctttgaagtctcccattcccctcatgctataaaaagaactacctttgttctctcccatcctgctcaggtcttttcagcagtctcatcatcagcaaccatgactgatgactgggccctagcaggtggcaggtataacatggccatggacactcttcttttttaaattttatgtctagcttctgagtctagatgaaaagacagtatgtttcagagaacattgggatatcagttttttcccacagcagggactgtgagagacaaccagcagcatcctctttgtaatcacagggcagggatcagagtttgaaatgaaatgttgtcagggtgttggaaaaattttggtgagttctgcacatttcccctggttcaggctgggcatggaccagccttcagatggcagaagtggaagatgagcctacttgtgagcgatgtgactttaaggaaatgaagactggggaagaataattagtgtttataagacatttaagaggccctttttcatatactgactcactgatgaatcagcatttgcattttatggaaaaatataaatccaaagaaataaaaaaaaaaaaaaaaaa

SEQ ID NO: 1549 - DNA, 1847 bp, Homo sapiens
cccacgcgtccgcaggatggagtgcagtggcacggtctcggctcactgtaatctccacctctcaggttcaagtgattctgctgcttcagccgcacgagtagctgagattactggcatgtgccaccatacccagctaagctcttttctattaaattttttttctgagttttcaactcttttggttttaactgccatttctatgttctgtttctctctggtaacctacgcctagacctcctggaaaacagtaaatgggccacacaagcaatactactactgtgatatactgaaaacctgtatgcagccatttagcacacttgaacatacaattttactcytattttctatttgtccattttcattctcaactaagttggaagctgcctagggataggagcgatgtataattcccctcactgagtcccagcccaatgctgacctcatactaggtattcaatagggtactacaaacaagatttgtcatccagcaagcatgggaaatgttttaaaaacatgataccctcactcttacaaaagccttcaaaattaccagaagataatattgttactgccaaaaagcaattcatgtttacttagagcttactaaatgtcaaactttgagctctaccctttacagagagtctcccatttaatcctcacagcaaccccatgaggtttggagaggctaaataactcactcacatagttacagtcaagtggcgtagctgattcagtctacactcgatcagcccatgaattcaaaaatttaagatcccccaaatatttcttaacagtataggtaagaagtatagtgatttgaaagaactgatttaaagtaactcctcacctctcagcccttacctatgcagtttcccttgtaggaacaccaccttcgtcccacctctctactggcaaattgctacacatccttaaagtcacggcaagcactccccaactcccctcagcagcactcccactgcacctggcactcactgccattctatctacctcctgctctagtccatgtgtctgtttattatttaccaggagaatctgagctccatggggttgagaaccttgccttttcacctccattcccaggtttctagcacagtacctaccacacacacaagtgtacagtaaatatctgttcttgaaatcattattgtggtagcattaagagacttagtttgcaacatctatctttcacagcagatctgtatcacaatctacaccataactttcaacaattcatatttgtttccatagcaactagggaaagtgctccttataatactaggaaaggcaagctctaccttaaggttcaacccactgaaatacttcacaatcacttgctttttgttcttagtgtgaagagacagaatgacagcattttaactttacgtctttaagaacaccttaactttaataatgacagtaaagcttattttttcataagtactagagttttcattgacaaaaggacagcatcttattaattcacaaatctaaaatacccttaagagtccaggtgctgtggctcacacctgtaatcccagcactttgggaggctgaggtgagaggatcacttaaggccaggagtttgagaccagcctgggcaacacagtgagaccctatctttacaaaaaattttaaaaattagctgggtacggtagcacgtgcctatagttccagctactcgggaggctgaggcaggaggattacttgagcacaggagtttaaggctgcagtgagccatggttatgccaccgcactgatgcctgggcaacagagcgagactctgtctcaaaaaaaaaaaaaaaaaaaaaaaaaaaaaaaaaaaaaaa

SEQ ID NO: 1550 - DNA, 1391 bp, Homo sapiens
  SITE (782): n equals a,t,g, or c
  SITE (788): n equals a,t,g, or c
  SITE (789): n equals a,t,g, or c
  SITE (791): n equals a,t,g, or c
  SITE (1019): n equals a,t,g, or c
  SITE (1021): n equals a,t,g, or c
ggtcgacccacgcgtccgcccacgcgtccggtatgacataaattttccttccttttactttcagccttcaaatatttgaattcagtttcttgttgacatttgggtcatgtttgttgctgtwtttttgttttgctttgttttttgtaaatttcactctgccatctctgtttttaattagtatatttagagtgcttatatttaatgtaattattgatatcttagggtttatatttgccattttatttttcttttctttttttacctctgtttcttatttctctttttataatcctgctttcctgtggattacttgaatatacttttaaattccattataatttatctatagtgttttatatgtatttctttgtaggckttttttagtagttgttcttcatattacattatagataacttattgccatctattggcatctgatcataccattgtctgtgaagtgaaaaacacttaccttctkgcagattcttttggtcttttttatttagaagataattatcttaaatatttcatctttatatatktagttatataatctttgcttcaaccattaggtatgatttagaaatctcaaaagaagaagaaacctactgtgtkccccatagttaaactcactctgatcttcttttcttcctgatcttccgagatatcctcttttattgtkttctttctgtttagagatgtttctttaactgttctcttaggataagtgttttggttacaaatctcagaactcttagggtttttgtttctttcttttttntttttnntnagttttgttttaaacgtgaagatttcttgatttccccttcattcttaaaggatattttcatgatagaattctgaatgggactgcccccctgcctacttttttttttttgctatacttgaacaatattatgccacttatcctggaactcmcagatttttatgagaaatctactctcatttgaattcccatttttctatcattgcctctaagatttttttaatccaatananaatacaaagttttagcaaaaacatggtaaattccagcaagaaatagaagatacaaatttgtttttattaggagttattatatatttatggcatgttcatcctgactagggaaatcgcaaatcctcctttaatatccatcagccatcaaaattatttaatatataaaacaaaattatttaagatataaaagacaatcacatggatattttcaaattataaatatgataactgaaataaaaaatctaaaggagggctcaaaagcaaaatgtaggtgatagtgagaagtagcaaagaacttgaaaacataaaaattacccagtatgatcaacagagagaaaataaaccagaaaaaaaaaaaaaaagggcggcc

SEQ ID NO: 1551 - DNA, 1272 bp, Homo sapiens
cccacgcgtccgggatgctttttgccagcaatgtgagaaaaggtgctcttctgggagagaggaagagacccaggcaatttattatgaatgctccccgttgtatggataatcctgtgctcctctgcccaattcccgcacctctggaaacttcattcacatttggcacagatgagccactcctccctccttccccttgagaatcgttctctgagcctgtgcagaacaaggtgctccgatcctctatcttgcacactggctcctttcctccccccaactgtctccctgtccaccctgtcgtcggctctccagtcctccttctgtagtttcttcctcagaagacagtgtcgcccctcatgctcacctgtaccaggggtccatatttctaactttggaagtgcctcctggacatgtccatgtggttgcctggccatccactcaaatccagcctctccaaaaggaatgattctcccctacttccttctcacacaattgtgtggccagagtagccggaccaatggctccaaactacccccaaatactcatccccgcctcamtgcttgggcccccttggcttcccctagggcagctcacatcaaggtccagcttggatcggagctcctacaggaagcttccccagccctgctctgtcggagaactcttctcctccatactamctctcccattctgtggcaggctcttctttaycctcaggcttcagytcagacwtccctcacctgctaggccacagcagctcctgagtagctgggattacaggcacccgccgctgctaatttttgtatttttagtagagatgggggtttcaccatattggtcaggctggtctcgaactcctgacctcaggtgatcaacccaccttggcctccctaaatgccgggattacaggcatgagccaccgctcccagcctttgattttttaaggtggattttggttgttataaatggagaaaggtaagagttcaagttcaacccgtgtgtgaaagcaaaacaatggaaaacaggattggcttcttcaaaggctcctcttgtagaactgcctctttgaaatttcgaggtaatctactttggagactctgcctggagagggtcagttcctaagttaaaagcatcgcttaaccttggctcctgtggcattttacaaaggtttaaaggaattgattcctctgaaagggcctgaaaataaaaagtctttaacatacaaaaaaaaaaaaaaaaaaaaaaaaaaaaaaaaaaaaaaaaaaaaaaaaaactcga

SEQ ID NO: 1552 - DNA, 2008 bp, Homo sapiens
  SITE (1936): n equals a,t,g, or c
  SITE (1977): n equals a,t,g, or c
  SITE (1978): n equals a,t,g, or c
cccacgcgtccgccgagttcagcatctggacccgggaggctggcgctgggggcctgtccattgctgtggagggtcctagcaaagcggcagattgcatttgaggatcgcaaagatggctcctgcggcgtctcctatgtcgtccaggaaccaggtgactatgaggtctccatcaagttcaatgatgagcacatcccagacagcccctttgtggtgcctgtggcctccctctcggatgacgctcgccgtctcactgtcaccagcctccaggagacggggctcaaggtgaaccagccagcgtcctttgccgtgcagctgaacggtgcccggggcgtgattgatgcccgggtgcacacaccctcgggggctgtggaggagtgctacgtctctgagctggacagtgacaagcacaccatccgcttcatcccccacgagaatggcgtccactccatcgatgtcaagttcaacggtgcccacatccctggaagtcccttcaagatccgcgttggggagcagagccaggctggggacccaggcttggtgtcagcctacggtcctgggctcgagggargcactaccggtgtgtcatcagagttcatcgtgaacaccctgaatgccggctcgggggccttgtctgtcaccattgatggcccctccaaggtgcagctggactgtcgggagtgtcctgagggccatgtggtcacttatactcccatggcccctggcaactacctcattgccatcaagtacggtggcccccagcacatcgtgggcagccccttcaaggccaaggtcactggtccgaggctgtccggaggccacagccttcacgaaacatccacggttctggtggagactgtgaccaagtcctcctcaagccggggctccagctacagctccatccccaagttctcctcagatgccagcaaggtggtgactcggggccctgggctgtcccaggccttcgtgggccagaagaactccttcaccgtggactgcagcaaagcaggcaccaacatgatgatggtgggcgtgcacggccccaagaccccctgtgaggaggtgtacgtgaagcacatggggaaccgggtgtacaatgtcacctacactgtcaaggagaaaggggactacatcctcattgtcaagtggggtgacgaaagtgtccctggaagccccttcaaagtcaaggtcccttgaatcccaaaagtgcctccccagcctcagcccccacctccagccacacacacattacacacacacacacacacacacaaatgtgccacacccagacacgcacagaatcagacactacaaacacctgccttgggggtgaagtgaaggcccagcctccccaccccaccgcgccccaggggttggaggaccttgtctgtgtcaggacagtgtccctccctgggaatgtgacatgagggccgactggggccaggctcaggggcagaggctgggacacaaggggctggcgagggctgcgaggccagggaagccctgagtttctggcggggctgagcagtgggggagcattgtgttgtgggtgtctgtgtgtgaggtcaccctcaaactgcaccgccggccagataccctcctgaccccgaggacttggtctggtctctctggtggctacaaccccagagttttaaggacttggaaaggaaagcacaatcagagaagaaaacagcccccgaaccagcaggagtggcctggcacatggaccggcctgagcgatgtgcactccacccaagccaggctcccagggggcctgatttctctctcactgtctctttttttaaaatggttgcacggctctgccccatggggggccttttttacacactgcgaggcccagctttctaggggacttttgcacatgtcatgcagctcagctgggagctgcttaggtggaaaactccaaataaagtgcggntgtcgcaaaaaaaaaaaaaaaaaaaaaaaaaaaaaaaaaannaaaaaaaaaaaaagggcggccgctctagag

SEQ ID NO: 1553 - DNA, 772 bp, Homo sapiens
ccacgcgtccgatttttttattagccatttttgaactctcttccatttctaagtttctccctgcagctttcctgaacatgaagcatttccttttcttttcatttctagctttcctttctctgtacctcatgtacacttggaagcttcagggacttagcactggtcatgccagcctctacagatcacatctctgtctataattgggtctccatggtaatgagaagcagaaagtgctgaagtagcgcactatgtaaggactggcaagagaaaatactgtcgcggcctctacaggcatagcattgaatccccatggtgcccaagaagcccgagagaagcacgctgtggtgtagagcaggagactgaggacacggacttggcagatttattagcagcaatattctaagatgaaccaaatttaagagtttgtaagtgctcttttcaattggaaaagacctttgaaatttttttttcttttcttttaggaggccagatgctccagtgcctgatggcgaaagtgagaaaactgtagaagaaagttcagatagcgaatcttcttttagtgattaagcttaattttgataagaattacatatgcatgcataggggtacatttacattctgtaagagattgagcctgaactctcttagtcataaaaacatcaaatggccacatgtccactaccaagcttcttctatgttaaaaaaataataataaagcagttttaacctgccaaaaaaaaaaaaaaaaaaaaaaaaaaaaaaaaaaaaaaaa

SEQ ID NO: 1554 - DNA, 822 bp, Homo sapiens
ggcacgaggtaaggcaaaactgagactcatgggtgtggtctttgacagtgaaatcttttagctcttgcaagatcacatagaaaatttcaccaagttctaacatccagcaaaatggagaacatgtactggggacctttgggtttaaccagtgagattgtcttgtttatcctgttgcatttagccttccagcttatggaaaaatacaaattcaaattctaacactgctggatttatgatatttaaggtttctattatatcagctgcctggatggagcacagaaacagcgtagtacaatatgctatgggtatattcatgaccaaagtttacaatgtggaaggagaatagaaatgcaagaggtcagttggggaattagctgcttgtgttatataactccttaaaagtggaaaatgatcacaagtaaatgtgagtagtgacagttctcttccatttcctttcttcaggtaaggaaaacacacttaatatttttgagtgtctttaaagatcttcctaaccatccaaaagagaagatgtcttatttatgtgtatatgtcgtgttgttgactgatttttttgctttttactcctgatgtgttttgtgggtgagaaggcaagcatgtaactaagatacagaaaagaccaagatgtagtggggcacagtggcttgacgcctataatctcaactactcagaaggctgaggtggaaggattgcttgaggcgaggagtccaggctgcagtgggctatgattgcaccgccacacttgctgcactctacccttgggggacagagtgaagctctgtctcaaaaaaaaaaaaaaaaaaa

SEQ ID NO: 1555 - DNA, 1488 bp, Homo sapiens
agggtacttgacatgtccacttggatgtttgataatcatttcaaacttaacatattcaaaacagaactcttaatttctacccacgccctaacctacacaaacactggaaactgtccatctcccaattattcttatctcaataaatgaaatgacaccacagccatcaaccagggatcctgtacctcaccttccacatccaaactatcaaaagctcctcctgttttatgcccaatcagatatcgagtcatttcacctctttctgtctcctctgctacttctctcagacatgttgcttcaatttctcacctgaactactacattagcctcctacctggctctgctttcattcctgcctccctgcagttcattcttacagagaatctagaaaaagctcttcaaaagcaacaatcagatgtcactctcctactttctaaaaacttttaaagaggacctcttcttctgccagtataacagactttgtactccaaaggatatctctgttgcattttagaactcctaggaagtaatgaaaatatctaagaaaaaaaatacaagtagctaagtgcatatatgtcaacagtaaacaagccagaaaaggcagaattggccatcccttgtgtttgtgtgtgacggtcatgtgggggtgcaaatggggaccgtactgcaactcccagtttaagcctgggattctagaagggagataaaatagcccaggttggtagtaccactaaattccagataaagcaaatgtaatttaggcttctagttttttttcacagattgggatcttgagctttcaaaaaagattatcaaacaaggaaacaaaccaccgtgagtgaaaatcagcaaaactagcgttaatatattaattactccttccccaccaagggctttagatgtttgaagtatcagataagaagaaactagactaccttatataaagaaaaattaacttaaatatagactacaaaaatggtgaatggtgaacaacaatggtctctcacaatcaccaggcacttctgaaaaagagctaaagaaaaccttcagtaataaaaaaaaattatcaaaaaatttagtggataagcttttttgtaatggactaattaatgaactggaaaataaaactaaaatagtttcatgcaatggagcacagacaaagagatggaactataaggaagagaggttaataagtttggagggcagaataagcaagcctaactaaagcctatttagagcgtgaaaggcaacaaaaatatgcagaatggagatgagacaatgtttaaagagattgtggctcagaatttttctttttttttaagtgaagagttttatcttttgtgttttttgtttgtttgttttctttgtttttttttttactgttattatactttaagttttagggtacatgtgcacgacgtgcagcttcgttacatacgtatacatgtgccatgttggtgtgctgcacccattaactcgtcatttagcatt

SEQ ID NO: 1556 - DNA, 1383 bp, Homo sapiens
ggcacgagcttttgtcggacatctttaaagcatttttctttttatagaatttcacttaatgtccaatactgatttaatgagcttgggtttacacattatctcttgaagaaaacaaatgaacctttgtgttccaaagcaatccatgtttaaagggaaaaaattatgcataactctgcccagcttcacagtaacctttggcaggtgccttaggtcctctgggactcttttccttatctgaaaaatgaaggacttggatcaggtgaatggttcccagctctgcaacttatgtggctcctcagaggcacacaagctcttttccattatttgccaaataatggaggccctgtctttaactgcagtacaactacacaaaatacttgaaactacagtcttcctggtttttggttggaactgaatcagtgcactctagcaacacttatttcttgctgttcgtaggcttcattatgtgtttggttaattttttaaaacmacawtwacwtatyccataatattwcmgcttaattggmaractgtttcagtctataggatctgcaggaaggaggagtaataagggatttttgactgagctcttatggaacagagtctctctaggccccctgtcatatctgcccttctgggccctggggaaaagttggcatccccagttgtggtgctctccaggtgccctcaggctgtggtggagggagcttcccattctctccttcagcccactcaattcagaggctaggggctgaaagaagcttctctacaactggctgttcactgggaggttaagggatgaccatccagccaggccttcctcaggacatgggagggcttatgctttaacatgtgtaaatccactgcaataatgactggttcttttaccccataaggttgagaatttacctgtaaacatttttgtctgaagaatttggatgtaagtgagggctgggcctctatcttatctcacttggcttctctcagcacagcaccttgcctgcttgttcttacacatcctagatgcacagtaactatttcctaattattagaaatctattagaatcaattgatttcagctgggcttggtggctccttcctgtaatcccagcactttgggaggccaaggctggaggatcacctgagtccaggagtttaagaccagcctgggcaacatagggagaccatgtctctacaaaaaataaaaaattagccaggcatggtggtgtgcacctgtagtcccagctactcaggaggctgaggcaggaggatctcttgagcctgggaggtcagactacagtgagcaatgattgtgccactgcactccagcctgggtgacagagtaagactctgtctcttaaaaaaaaaaaaaaaaaactcgag

SEQ ID NO: 1557 - DNA, 748 bp, Homo sapiens
ggcacgaggaaggaacgaggcaaggagctaaagcagcgtgcgttcagccctggggcattttattaatgcttttacgagttagaagagttgggataatttgccatctggagtttctctgccttgctgatctgagctcagacctgccaatttaccagagataattgataacaccctgtaacagctgagtaagtagattcttctgttttactgcttttaaaaaaagtttaaagttttaaaatagtataaactttaattgggttctttaaattttgttgttgaataatgcaattattatgatattttgtgaatatttgtaaataatgggattctggaataaattaatccccgatgatagaaaagagttaatgaacactttctccatacataacactttagcattcaagaaacataggacttaaatacatatattaaaaatttaggccaggtgcagtggctcacgcctgtaatcccagcactttgggaggctgaggcgggcagatcacctgaggtcaggagtttgagaccagcctagccaacatggtgaaatcccatctcggctaaaaatgcaaaaattagccaggcatggtggcaggtgcctgtaatcccagctactctggaggctgaggcaggagaatcacttgaacctgggaggcagaggttgcagtgagctgagactgtgccactgcactccagtctgggcgacagagaggctctgtctcaaaaaaaaaaaaaaaaaaaaaaaaaaaaa

SEQ ID NO: 1558 - DNA, 1694 bp, Homo sapiens
gggcctcaggactcatctctgtcttctccaaccccagctggcctccatgtcccctgggggctttctgctgctgaccagcttgggccctactataggttttcttgctgggcttaggagcctgagagaggtagccatttccaaaagaaaagatttctatctcagattatctgggaaagaggctgagtaggtcccttctctgaggaaacaggcagcaggacataggatggggcagtgggaggaaaagggtctgcactatggggtccttgggctgtgcactcctgaccttatcacttcacagttcccaccagatctgacttgacctccgggccatgacccagtccctcccccactctggaaacctctgtgtcccctcctgctcctttcactcccacctgggaggctctgagcaggccagggtccctctctccaggcctgctcctccctttctcctcctgtmcccccagccatccccccagccaggctctcccacctctggccccacctcacctcttggccttcttctttccctcgggcgatgggagcctggtttggctgcccagggaagattgtatctgaccacaggagggagggctgagggcactgctgggtgagctgaggcctccttaggttcttgctgtagtctgagttcaagtcatttagaatgagtgacttgaggaagagggagctgggagcccttttcaccagcagggggactggaggagtcgaatggggtggggtcttctcgttttgattagcttctggtggaggtcccaggctttggcgtgctcaagcttggagtggcagggagcaggcctggcttgaccttctttccttcctgctccctctcctcacccctccctgcagctctttcactccgtctctctctctacagatgggacccaggtgagcccgggtgcccactactgcagccccactggcgcaggtaagagtcaaacccgggggagtccatggtagggagtggaagatgaggggtggaaaggctgtaagaacgcgagaagctgaggggttagagaagcagggtcgctggctgatctgccagagagccaggaggtggcggctccagggagggscgaggagccggggtaagagaggcagctctggatgctggctgggcacagtgctaggaaacacaacaggaaaaggaaacacaggatgcccgtcttgtccttgctgggagcagtgaaacaggaaggaaagtaagaagctaatatttatactgagacccctaccccatgtcaggcaccaggcaaggtgtgttcttgtgtgtggactcggtcctcacaccggctctgcaaggtgggcatggcagcccttgcaggactgctctgctggaggggaagtgttctctcactgtctgcgcctcctccctctgctggcccgagcctcctctgctgctaggctgccctggggaaggactggacttcctgctgctgctttggtttaggacatgcccatggggccaggtctggactagacgcggtctgcccttcctttagtgtagccagtatcaaccaagggcctactgagtgcaagatatacagcctgatgcctaataattccatatagcagggagaaatggaacccaggtatcctccttgcttcagtcctggctgttgaaaagctwacaggcaggttagggaggaagcacacacaaatacaaaacaaaaaaaaag

SEQ ID NO: 1559 - DNA, 1572 bp, Homo sapiens
gatcccttgagggcctgaataaaataaaagacaaagagagagcaaatttgtactcagcttgagcttggatatccctcaggccctccctcaggccttctcatcagactgagatttaacactattagctctgtcggcctccagcttgcacacggcagactgtgggactttctagcctccataattgcatgagccaatccctcataataaatctgtttctatgtatctatattttgttggttctctctggagaaccctgactaaatacactgtttaagaaaggagtaaaacttgcactgagatgtttagagcagctttattcatagtttatcaaaatgtggaagcaatcaaggtgttctccagtaggggaaggaataaataaactgtggtatctccgtaaaatgggatgttattccacactaaaaagaaatgagctatcaaccatgasaatacatggrggaaccttaaatgcatattactaggcaaagaagccattctgaaaaggctatatactgtgtgattccaacttcatgacattytggaaaaggcaaaactatggagacaataaaaggatcagagatgccaggggttgggaaggagggtaaattaataggtggaacacaggatttttagagcagtgaaactattctgtatgatataacaatggtggatacatatcattattcatttgccttaacccacacaatgtacagtaatgaaagtgtactgttaggtaaactgtggactttagatgatgatgtgtcactgtaggttcatccattggaataaatgcaccactcttgtgtgggatattgatagtgggaagactgcccaattaagaaatctgtactttctactcaattttgctgtacatttaaactgctctaaaaaataaactctgttttagcctgtaaccccagcactttgggaggctgagggggtgtatcacttaaggccgggagttcctgaccagactggccaacatggtgaaaccttgtctctactaaaaatacaaaaattagccgggtgctgtggtgcatgcctgtaataccagctatttaagaggcatgagaatcgcttgaacctgggacgggggttgccagtgagcccaagatcctggcactgcacttcagcctgggtgacagagcgagactctgtctcaaaaataaatacataaatacataaataaactctgtttttaaaaatgagcaaaaggccaggcacggtggctcacacttgtaatcctagcactttgggaggccgaggcgggaggatcacttgaggtcaggagttcaagaccagcctggccaacatggcaaaaccccatctttactaaaaatatcaaaattagccaggcatggtggcatatgcctgcagtcccagctacttgggaggctgaggtgggagaatcgcttgaactcgagaggtggagaatgcaatgagctgagatcacaccactgtactccagcctgggcaacagagcaagagtccgtctcaaaacaaacaaacaaaaaaaaaaaaaaaaaactcgagggggggyyccgtacccaatcgccctgatgatgtatggtatac

SEQ ID NO: 1560 - DNA, 1265 bp, Homo sapiens
gcaacattatctgcctttgaaacaccacctccgtggattaccatttggcccaatgggagggtctggataatgcccattatattatcctaattccctgctacctcagaggttgttaaggggcacttctgctgtttccctctgagtgacctctggctgccactctcttgcagatgctccttttcctctcagggatgagtcggagctgggactgggaaaggcagccctcttgtttctgttcaagttggccaggaatgcccaggaatgatgattctgttttgccagcttcttgccgtgagctggggttgctgtgtttacagcacaaccaaccctaaagtcagtgcaattcactgtggatttattgagcacctgctagtatgtgcgtgtgttgggggtggtatatgaaaatgatggaggcagtctctgccttaaatgagggagggtgggcaaacagctcccacggtcggcggttgaaccagttcctattctttctcataggaagtgtccataaacattgtcttgtctcatttgcatggttgttgagaggtttgaatgtagtggtaatgaattgagagtgcttctaaaggtattaagctcttgatttatgtaaaactttcttcagtattactaggcaggctgataataaaagctaacatatattgaatgctttctatttgccaggcactgccctaagtgctttctatatattagcttatttaatctttatagcaactttgaagtagattgcttgtgtacccacttaaaagaggattaaaaaaacttgccgaggatggcacagcaggtaagtagcagagccaggcagtctgaacgtttggccaaacactggccactgtaaagatcttgtggaagtcagggagtagaggtggtctctctcccccaagtgaaggcagcagccaggacctaccgtcagagaccagcaaggagcagagaaaggtcaggctggtgcctcagaaagcatcagcatttctgcacaacttaattaaattactgaaaccttttctgagcttggagccatctttcttggagagtaatacaattgaaacagataatttaagccaaggaggaaggacagaattggtgagctcacatatgtagatggacatgtaatgacgtctgactaaaacacagaggaaaaaccttaaagtgaatcatgtttattcaatttccaaacaagtgcaaagacccaggcagcgtgcttcatgtttggactcttgaagaacacacatggaaaaaaaaaaaaaaaaaaa

SEQ ID NO: 1561 - DNA, 3332 bp, Homo sapiens
  SITE (16): n equals a,t,g, or c
  SITE (28): n equals a,t,g, or c
  SITE (30): n equals a,t,g, or c
  SITE (32): n equals a,t,g, or c
  SITE (44): n equals a,t,g, or c
  SITE (625): n equals a,t,g, or c
  SITE (3138): n equals a,t,g, or c
  SITE (3315): n equals a,t,g, or c
  SITE (3332): n equals a,t,g, or c
actattcagtgcacangacacaagtcancngncagtcacggtcngattcccgggtcgacccacgcgtccggttattaacctctctaaatttcagggggaaaatgtataaatatgtcatgtatttgataaatagttttccctttttttaatgaaaagattatctgattggattgacctgcctactaatttttgctattaactttttcattcttaggcaataagcaacaaagaccagcatagcatatcatatactttrtctcgggcccagactgtggtggttgaatatactcatgacagcaacacmgatatgtttcagattggccggtcgactgaaagccccattgattttgtagtaactgacacggttcctggaagtcaaagtaattctgatacacagtcagtacaaagcactatatcaagatttgcctgcagaatcatatgtgaacggaatcctccctttacagcacggatttatgctgcaggatttgactcatcaaaaaacatctttcttggggagaaggctgccaaatggaagacatcagatggacagatggatggcttgaccactaatggtgttcttgtgatgcatccacgcaatgggttcacagaagactccaagcctggnaatatggagagaaatatcggtgtgtggaaatgtatttagcctacgtgaaaccagatcggctcagcagagaggaaaaatggtggaaattgaaaccaatcagttacaagatggctcgttaattgacctctgtggtgcaacattgttatggcgtactgcagaaggcctttcccacactcctaccgtgaagcatttagaagctttaagacaggaaatcaatgcagcacgacctcagtgccctgtagggttcaacacactagcatttcctagtatgaagaggaaagacgttgtagatgaaaaacaaccatgggtatatctaaactgcggccatgtacatggctatcataactggggaaacaaagaagaacgtgatggaaaagatcgtgaatgtcctatgtgtaggtctgttggtccctatgttcctctgtggcttggatgtgaagctggattttatgtggacgccggccctccaacccatgcgtttagcccgtgtgggcatgtgtgttcagaaaagacaactgcctattggtcccagatcccacttcctcatggtactcatacttttcatgcagcctgtcccttttgtgcacatcagttggctggtgaacaaggctacatcagacttatttttcaaggacctctagactaacagaccattgtcttgcaggactacattataaatttataagctaagtgagttgggttttcgaacctgttgtccacgtcacagtttttctgctctggtcatttgcattaagatgaagaattttttaaaacatttataataaatagtagcaatttctgagcaaaaatctgggaaactcaagcaaaggaatttctgaaagtatcagtcttctgaattctgagttttgaaaatatattttgaggagaaaaagacatagtctaatttgatgccttccttttagtgtttttgaatcacctatcctcagtgctgaaattgttttgtataactgagggtactgttggttcaaactatgttagtttacagtttgttgcaaacattgtaaaatacagcgacatgtatattaacttttttctatttatctttattatagaaaataccttagaatgttcttgatagagtagcatggtaacgatggtgtcacacccttggtgtgaatggtagcttagtgagcaacctagctcaaggatttgcaaagttaggaagaaggacgagagagcctctctccccaccccaatctaaatatggaatttggtaaattagaatactttgtaatttgtaagaccaaattcatactaattacccgcgtgaaaggtgtttgtttttaacaacattgaagataatcaggaaagattttttcttaatgtttctctcgagcgtagtactataacaaaaacttaatgctaagaaacattttatatgctcctttggatatgcaatttaatctagattatctatttttctcccatgataactaatctgtttttagtatcagcagcatttggcaagtttattttttggatataaactgtggttcatctgttcactgtttctagaaaaaaatcattgccataagaaaaagtataaattagcaagaaaggagagtgacttgatttgcttttggaaaaagaaatgcttaattaattattctgtatttggccttattcgggcattaggaaatctagagatctaaagggttgaatgacaatagtgcccccgtttttagcagaccagccttaactctgggtttgaatcctaaggagattgccacagtgagacttaaggaaatgtttggttggcagatgagcaccaatgactgcagcgtggagtgacgcactgcatggtctgtttattctctaattccaatatgtcttttgcttccagaagcaagaaaagtttcttctctcccctccttcccacccttttttcaaaggcaccacaagtatagacagttgcactacatcaaatctttttttgacacttgtagaaaccagtacacttttagattagacagtatcttcttttaatattttgatttgttttcctttagtttgaaaagttgtataatacttaactgactgtagcaaagttttatatgtggtagcatacctttaatttaycctattacaaaactgttctgaattttcttttggtttttaaaaaacaaaacttgttgcttagaagccatgaattattttattttacttcaactgtcgaaacttccttgttttaaaaaatgatcatttgggttcactcaggaaatgcatgtcaggaaacttgtattataagtttattagttgtgatgtatcagtaactgctgttacccctttttcaaagaaatgtaattgattttgaagttttctagattgtcacatgctttgtgactaatgcaagaaagcaagtcctgtgttgtatttgttctagtcatttttattcaggctatatattgtagcttaatttttatttgcaattaatttatttaaactaagtaaatacttttcaaaatacataattgaattcgtctctgtgagtncatttttgcataatcgagaatgagaaaccagaagtgaaaactgtgaacaactctattccacactccaaaaatactcatttgaaatagatgaagagtttgcatttaatgtaacactttaaagtatctggttcttttttaaaagcatctcttactaataaaggaactttgttagtggtngaataaaaaaaaaaaan

SEQ ID NO: 1562 - DNA, 1314 bp, Homo sapiens
ggcacgaggagatcttgagtcacagtgaagcaacccactggagtgagcattgctgcatttggagagtcagatgscattttgggccgcgatgggcctcttggaacattggtgtgttcatctgcattcgatgtgctggaatccacaggaatctgggggtgcacatatccagggtaaagtcagttaacctcgaccagtggactcaagaacagattcagtgcatgcaagagatgggaaatggaaaggcaaaccgactttatgaagcctatcttcctgagacctttcggcgacctcagatagacccagctgttgaaggatttattcgagacaaatatgagaagaagaaatacatggaccgaagtctggacatcaatgcctttaggaaagaaaaagatgacaagtggaaaagagggagcgaaccagttccagaaaaaaaattggaacctgttgtttttgagaaggtgaaaatgccacagaaaaaagaagacccacagctacctcggaaaagctccccgaaatccacagcgcctgtcatggatttgttgggccttgatgctcctgtggcctgctccattgcaaatagtaagaccagcaataccctagagaaggatttagatctgttggcctctgttccatccccttcttcttcsggttccagaaaggttgtaggttccatgccaactgcagggagtgccggctctgttcctgaaaatctgaacctgtttccggagccagggagcaaatcagaagaaataggcaagaaacagctctctaaagactccattctttcactgtatggatcccagacgcctcaaatgcctactcaagcaatgttcatggctcccgctcagatggcatatcccacagcctaccccagcttccccggggttacacctcctaacagcataatggggagcatgatgcctccaccagtaggcatggttgctcagccaggagcttctgggatggttgcccccatggccatgcctgcaggctatatgggtggcatgcaggcatcaatgatgggtgtgccgaatggaatgatgaccacccagcaggctggctacatggcaggcatggcagctatgccccagactgtgtatggggtccagccagctcagcagctgcaatggaaccttactcagatgacccagcagatggctgggatgaacttctatggagccaatggcatgatgaactatggacagtcaatgagtggcggaaatggacaggcagcaaatcagactctcagtcctcagatgtggaaataaaaacaaaacacctgtaaaaaaaaaaaaaaaaaaaaaaaaaactcga

SEQ ID NO: 1563 - DNA, 2545 bp, Homo sapiens
ggcacgaggagatcttgagtcacagtgaagcaacccactggagtgagcattgctgcatttggagagtcagatgscattttgggccgcgatgggcctcttggaacattggtgtgttcatctgcattcgatgtgctggaatccacaggaatctgggggtgcacatatccagggtaaagtcagttaacctcgaccagtggactcaagaacagattcagtgcatgcaagagatgggaaatggaaaggcaaaccgactttatgaagcctatcttcctgagacctttcggcgacctcagatagacccagctgttgaaggatttattcgagacaaatatgagaagaagaaatacatggaccgaagtctggacatcaatgcctttaggaaagaaaaagatgacaagtggaaaagagggagcgaaccagttccagaaaaaaaattggaacctgttgtttttgagaaggtgaaaatgccacagaaaaaagaagacccacagctacctcggaaaagctccccgaaatccacagcgcctgtcatggatttgttgggccttgatgctcctgtggcctgctccattgcaaatagtaagaccagcaataccctagagaaggatttagatctgttggcctctgttccatccccttcttcttcsggttccagaaaggttgtaggttccatgccaactgcagggagtgccggctctgttcctgaaaatctgaacctgtttccggagccagggagcaaatcagaagaaataggcaagaaacagctctctaaagactccattctttcactgtatggatcccagacgcctcaaatgcctactcaagcaatgttcatggctcccgctcagatggcatatcccacagcctaccccagcttccccggggttacacctcctaacagcataatggggagcatgatgcctccaccagtaggcatggttgctcagccaggagcttctgggatggttgcccccatggccatgcctgcaggctatatgggtggcatgcaggcatcaatgatgggtgtgccgaatggaatgatgaccacccagcaggctggctacatggcaggcatggcagctatgccccagactgtgtatggggtccagccagctcagcagctgcaatggaaccttactcagatgacccagcagatggctgggatgaacttctatggagccaatggcatgatgaactatggacagtcaatgagtggcggaaatggacaggcagcaaatcagactctcagtcctcagatgtggaaataaaaacaaaacacctgtatggctgccattctcttcagccctcgctctcccctttccacagcctccacccctgacccccatcctcttttcctacctctctgtttggtttagaaattgctcaataagtcatttggggtttggcatcctgcccagccacttcccaaacatgaagacctctctgttgctttatgttgtacatgccccatagccatcccaacgtcctccccagtcctctcctggcaccagcaccttagaagttgttggcagaaggcacttaaactgtgggagaagtgtgcacacctttgagtcccttccctcaaggttaaagctcctgtcagactctcagaagggtctgtgggtgttgtatattaggcaaacaggggaaagcttagaggtccttctatatgtgttaataagctgtttctaagtgtttaaatttgaaaagcatcatgttctcatgatttatgggaatgaagcaagtactgaaatcaaattaaatactccctgggtcctgggtcagtttgaccctagccctggggtgaggcaagccccctcctatgaggatgagcaaaaatactactctcttcgccctgagttgctttctggatctggggcttcaggacttgctgcttcagtcagcctttattagcaccaaagactttatgaagatcccacacacagacacacatcccttcccgcctcccccctgccttcagtaggatctggctccgtggctggaggaccaacccctatagtgggaatgcagagcttaacgtgtactgcttgtgtgtgtgcgtgagtgtgtgtgtgtgtatgagtgtgtgttccgcctcccaccctctccccatctgctctgggtatttttgtttttgtttagttttaggtttacaacagagaggaattaatttatcagcagcctaaaactgttgtgtttttcttatggtttaaaaaacgccatgtcattgataactccctttctcccttcccttctcccggtctgctgatcactctttcatgcctgtgtatccagggtgctctgtttccccaccgttcccaggtgtacgaggcagagggccgggacagctttcctctcagtcattgttcaccccacttgaaaattcagacaagaaaactttgcttaaaagatttcatgtgtgggaaccacagttcctggctgcctttctcctgtgtatgtgtaaattccttaataaatattgcagggaaggaaaaaaaaaaaaaaaaaaaaaaaaaaaaaaaaaaaaaaaaaaaaaaaaactcga

SEQ ID NO: 1564 - DNA, 1564 bp, Homo sapiens
  SITE (50): n equals a,t,g, or c
aaactgcagtttaaaagtgtttatatcctggatacactaacagcattttntccaacttgtggagtggagggagtagggaaggggaggatagtgctaatgaactgtgacaggggctagcaagaaagaaagaaaaagagttccctaagtaagctcctactgggtgtcctccactcacatggagacagggccctgcttttaggcacttactcttccagtgtctattgyataatatgttcaggaaggatcccagattcaaagatttatagaattagrgttaaaagggatagatatcttgtttgaccctgaaaaaattaaggaatatgcttgagatattcaatggcagaggctggaatagattttcccaaatctcctgatgtgaagttctgtgtttgtcaaacatgactgtgtaaaaagattaatttaaacttaatgacatgttgtattcatagaagttctttgggtttctgtggaaacctcctcttgctagcttaagcagaaatgggggatttattggaaggaagctgagatattgcaccaaactgcacaaaattgaatgaagagctgactaagcaaggctgcactgagaaggaaccagggtggtctgggctgtggtagcggcagcagcagcttgcagatctcccagcgctgatgctggctcgactcagacaggtctccactctctgctgtctgtctctggctcagacaggacactttgtgtggctgtttccttccacaaggcctcagtgggagcaagccagcctcccacaggcctctgagacagaccaccccattcctccctctcctgttaacctgcctttatttccttaattgcacttatcaccatgcagaagcctatgtgtttgttcccctgtggagatgtaaaaacactgatgcccaggcctaactcccagagactctgattgaactggtctgggctatggagccgggacatttgcatttttcttacaagctctaatgtgcagccaggattaagaatcattgccttctgcatcaacaggacaaatacaaaatgtgcagcaaaatatatgtttaagtgaatcaagaagacagatctagaaacgattgttaaggaataataatgcattttgtccatcaccacacataagtgatgttgaccagagccctcccagattgagtggtgccaggtgttcggggttgtctcggttaatccttactatggccttgcggggtagggggcagtgtcctcattgtccaaatgagtcactgaggctgagggattcaggctcagtgtatgcccacagttctttggcaaaccccaccactgggccagccaactacacggggattctgatcgggtcctgatgggtgcccatgatgggctgtgcaaaagtggtggtgagatttctccaccttcacggaggtggtacccaggggaggtggacttcagcagcgagaatgggctgggtgcagtggctcacagctgtaatcccagtgctttgggagttcgaggcaggagaattgcatgagctcagttgttcgagaccatgggagaccctgtctctacaaaaaaaaaaaaaaaaaa

SEQ ID NO: 1565 - DNA, 914 bp, Homo sapiens
ggcacgagaagctatccatgaaaacactttgtgatgtgctgttttatatcacagaatggaacctgtgttttgattcaacaagttcaaaacactcttttcataaaatctaagaagttatgtttctgaacctattgagcctttataggaacatatgaatatccagtcctaaaaactagaaatgagcgatctgtgaaaacactttgtgatgtgctgtttcatatcacagaatgggacctgtgttttgaagaaaccaaccctactgacaccttgatcttggacttctagtctcagaactatcttgggacatttcctataaatagatgcatgcaatacgtggctttggaagatggattttaaccaactctactgacgagtctgctttaggactcttggtccagactgacttcatggagagtgttgggggttgtgggagaggccaagcctacaagctgtgggaagctggtggatggaaggctggttagaattcttcaggatctggggaacctcagagagtgctgaaacctgttgggacgttggatgagccaatacttggcaaacgcaagaatacaaaggtttctttctttctttttctttttccagatactcaaaagctggggccatgttacatgtgcccagctgtttcattagttaatatcttttggttgcaggccatggcaaccaaatctaaagtaacttaaacaagaaaaggaatgttttggctcatgaaataaaaaagtttagggatggccaggcatggtggctcccacctgtaatctcagcactttaggaggctgagacaggagaattgcttgaacctgggaggtggaggttgcagtgagctaagatggcaccattgcactccagcctggcggacaaagtgagactccatccccctcaaaaaaaaaaaaaaaaaa

SEQ ID NO: 1566 - DNA, 2235 bp, Homo sapiens
  SITE (1097): n equals a,t,g, or c
cacgagggaattacaggcgtgaactaccgtgcccagcctttttttcatagcagttttattaagttgtatttgccataccacccaatgtatccatttaagcacctgattcagtggtttttcatgtactcatggagttatgcagccacaatcttagcgcattttcattaccccaaaaagaaactgtacccattatgcaccccgttcccctcctccggtcctggcaaccacgagtctactgtctgtcttcatggatttgcctattctcgacgtttcattgggatgaaatcacacagtgtatggcttcccacactttactgtgctgttgtcaaggtttatctatgtgttgggtgcagccaccccttggtatccacagggattggacccaggagcctgcaccgatcccctgcagggatgcctgtgtcccacagtgccccctgcaaaactcactgatatgaagagtcggccctctgtatccatgggcttcagatcccgtgattactgtatcttctgtctgtgtgcagttgaatctgcgggtgtagaacccacagacacagggagtggctgtagcttatccctttgtatggtcagagagtgttccgtagcggggatggacacgtgttcattcactcttccactgatgggcatcgggaatgtttccactttctgtctatcattaacaattctgctacaaacatacatgtacttctgttggaggggacacatgttttcatttctcttgggtgtgtctatccaggagtggaattggctgggtcttatggtaactctgttaactgttttttgctttttggttttttgtttgtttgttttttgagacggagtttcacccttgctgtgaactaccataggctggagtacaatggcgcaatcccagctcagcacaacctctgcctcgtagattcaagccagcagggcgagcctctaccccagagtgaaggtggactttgccctctcgtgccacgagkacttgctggcacccatctctgagcccatcgagtggaaataccacagcccatgaggagtggaaatgaggaagtgctggctgatgtccgcaccatcgtgaaccagatcagctacancccccaggatccccgagacctctgtggacgcatactgaccacctgctacatggccagcaagaactcctcccaggagacgtgcacccgggccagagagttggcccagcagattggaagccaccacatcagtctcaacatcgatccagccgtgaaggccgtcatgggcatcttcagcctggtgacggggaagagccctctgtttgcagctcatggaggaagcagcagggaaaacctggcgctgcaaaatgtgcaggctcgaatacggatggtcctcgcctatctgtttgctcagttgagcctctggtctcggggtgtccacggtgggctcctcgtgctgggatccgccaacgtggatgagagtctcctgggctacctgaccaagtacgactgctccagtgcggacatcaaccccataggcgggatcagcaagacggacctcagggccttcgtccagttctgcatccagcgcttccagcttcctgccctgcagagcatcctgttggcgccggccaccgcagagctggagcccttggctgatggacaggtgtcccagaccgacgaggaagatatggggatgacatatgcggagctctcggtctatgggaaactcaggaaggtggccaagatggggccctacagcatgttctgcaaactcctcggcatgtggagacacatctgcaccccgagacaggtcgctgacaaagtgaagcggtttttctccaagtactccatgaacagacacaagatgaccacgctcacacccgcgtaccacgccgagaactacagccctgaggacaacaggtttgatctgcgaccatttctgtacaacacaagctggccttggcagtttcggtgcatagaaaatcaggtgctacagctcgagagggcagagccacagtccctggacggcgtggactgaggccggttccttcctggaggcctcctgtcctcggggaccccagcacctcatcatcagcattgctggagccaagggtaggagccctacactaggagcccaggatgggacggcgcatcagccgagagggagggaacttttcagtcaaattcctcaaaaagaggctggaataaagcctgggcttaaaaagaaaaaaaaaaaaaaaaaaaaaaaaactcgtag

SEQ ID NO: 1567 - DNA, 1369 bp, Homo sapiens
aagatctagttagagaaaggttttgaacagtgggaaactaagtgggcagggatgtgacttctgtagccacccgaatgtttgtgtctctgactgtttgagcttagctctccttgctggtttcatttgctcttatggcagacagtgtgctctggtggcgctggaagatgttaaggcgtatctcactgaggagaatggtcagattgcggtaagctttatctgctgcttcttctttctggtccccacccttgcagcagcctggctacccagccccaccttgagtctgccctggtggggttctgtttctctgttcctgctcatttaccttgtgtactttcttcacaggtgtttgatgccaccaatacaacccgggagaggagggacatgattttgaactttgctgaacagaattccttcaaggtaggatctgactccatgttggaggaaaagggatgagtagaggtggggagtcaggctacaggcatggatctctcactctagtgggtgaggacaggatgggatatctgaatctcttctctcagagcattcccccagtccttgagtgttttcattcaggtcctttctcagactgttagcctgtatgtttgaggcccaggggctgtggtaagagctatgaggaggacttgagggccactttcatgaagaaaatcctgggagatgtggtggctgggtggggtagatgagcatgtgctcttaattaacagcctggcatttttgacttgcttatcactgccttctctccatggccaggtattctttgtggaatccgtctgtgatgatcctgatgtcattgctgccaatattctggttggtgacacccctacatatcatctcctcttcaccttttgtgctgtgtgtgttgtggggtgtgtgtgtgtgtgtgtgtgtgtgtgttgttggggaggggtgttttcgtaatgaaagagagaaatagacatgtttaacatcacaaagagatcttttctatctgccagagccccatctggtacttctacactcttctcttgggagaggaaactgaggctttaaggaatcaagtaagaattagctgttgaattgaaaccagggtttaggttgtaggattcttggccctgtgctctaggtattatctggatgttgagacctagatgttggaatagatcagccgggcacggtggctcatgcttgtaggctcagcactttgggaggccgaggcaagtggattgcttgaacccagaaggatcaccttagcctgggaggttgaggccacagtgagccgtgattgtgccactgcagtccagtcttggtgacagagtgagaacatgtccagtcttggtaacagagtgagaacatgtctcaaaaaaaaaaaaaa

SEQ ID NO: 1568 - DNA, 2910 bp, Homo sapiens
aattcggcacaggggcagtctggsatgatctttttggaggtaagttgtgcctcactgaaaactaatccccagcccatctttgcctgctttctagccctgtctatcctgaagcgggctcgccgggaagcgcccaggccgtgtagcctttgatgggatcaccgtcttctacttcccccgctgccagggcttcaccagtgtgcccagccgtggtggctgtactctgggtatggcccttcgccacagtgcttgccgtcgcttctctttggctgagtttgcgcagkagcaagcccgtgcacggcacgagaagctccgccagcgcttgaaagaggagaagttggagatgctgcagtggaagctttcggcagctggggtaccccaggcagaggcagggctgccacctgtggtggatgccattkatgacgcctctgtggaggargacttggsagtcgctktggcaggtggccggttggaagaagtgagcttcctacagccctwsccagcccggcgmcgtcgagctctgctgagggcttcaggtgtgcgaaggatcgatcgggaggagawgcgggagctgcaggcactgcgccaatcccgggaggattgtggctgtcactgcgataggatctgcgaccctgagacctgcagctgcakcctggcaggcatcaagtgccagatggaccacacagcattcccctgtggctgctgcagggagggctgtgagaaccccatgggccgtgtggaatttaatcaggcaagagttcagacccatttmatccacacactcacccgcctgcagttggaacaggaggctgagagctttagggagctggaggcccctgcccagggcagcccacccagccctggtgaggaggccctggtccctactttcccactggccaagccccccatgaacaatgagctgggagacaacagctgcagcagcgacatgactgattcttcyacagcatcttcatcagcatcgggcactagtgaggctcctgactgccccacccacccaggcctgcctggccctggcttccagcctggcgttgatgatgacagcctggcacgcatcttgagtttcagtgactctgacttcggtggggaggaggaggaagaggaggaagggagcgtggggaacctggacaacctcagctgcttccatccagctgacatctttggtactagtgaccctggtggcctggccagctggacccacagctattctggctgtagcttcacatcaggcrtcctggatgagaatgccaacctggatgccagctgcttcctaaatggtggccttgaagggtcaagggaaggcagccttcctggcacctcagtgccacccagcatggacgctggccggagtagctcagtggatctcagcttgtcttcttgtgactcctttgagttactccaggctctgccagattatagtctggggcctcactacacatcacagaaggtgtctgacagcctggacaacatcgaggcacctcacttccccctgcctggcctgtctccacctggggatgccagcagttgcttcctggagtccctcatgggcttctccgagccagccgccgaagccctagatccctttattgacagccagtttgaggacactgtcccagcatctctaatggagcctgtgccggtgtgaggaccaggatgtcttttcccagccccaagagacctgttgctgctttcttgtaattatggggctccccagagtctgcgtaacagtctcccactggctggctcacccacaggtgccatgtgcacactcctggttttcaaacaattctctggatttatttatttgttttaacttttctgtgctgaagagaggactagggggagggggcttcccctttcagctgcccggccccccacacccacagcttgctcttctatctccacaacgtgagcctggaagaggagaaaatgtggctcctctggagcttggcagaccacttttcggtctttgcgtgatgttccttagcccaaagacggtgagacagggctgaaatcaggtggcttctgccaccctgagccctagacccatgggtggctaaatccactggactgtgaagactataatttatttccataatttatttggagattgaggaggctttggttgcacttctttggctggtgggtaatgccaggggtggggtgggcacaggccctcaagagccccttttgccttgtagtcctacaccttgccctgcctgggctttggtgcagactaggtgtggatttgagctctgtgatctatgtctgctgcctggctcctagatggctctgygggcaggtgctggccaaggacatcatctaggcagggggagagcctgggctgaacagctgtgaccaaaactcccttctgccccaccctgccccctccacttcctgccctctgttccatcttcccccttcccaaaggccacagcctttattccaggcccagggatgtaggagggggaaggaggaaacaggaagcccagagagggcaaagggcctacctcggggcgcgaaccatgccccagactattatctcagggctttctgggcactgcacttcagcgtggcccacctgcccatgccctgaggccagttggcgaggggtggctcctgagggtttttataccctttgtttgctaatgtttaattttgcatcataatttctacattgtccctgagtgtcagaactataatttattccatttctctctgtgtctgtgccaagaaacgcaggctctgggcctgccccttgcccaggaggccttgccagcctgtgtgcttgtgggaacaccttgtacctgagcttacaggtaccaataaagaggctttatttttaaaaaaaaaaaaaaaaaaaaaaaaaaaaaaaaaaaaaaaaagggcggccgc

SEQ ID NO: 1569 - DNA, 2430 bp, Homo sapiens
  SITE (5): n equals a,t,g, or c
  SITE (8): n equals a,t,g, or c
  SITE (11): n equals a,t,g, or c
ccagnttnggngcttcccagcccggcgmcgtcgagctctgctgagggcttcaggtgtgcgaaggatcgatcgggaggagawgcgggagctgcaggcactgcgccaatcccgggaggattgtggctgtcactgcgataggatctgcgaccctgagacctgcagctgcakcctggcaggcatcaagtgccagatggaccacacagcattcccctgtggctgctgcagggagggctgtgagaaccccatgggccgtgtggaatttaatcaggcaagagttcagacccatttmatccacacactcacccgcctgcagttggaacaggaggctgagagctttagggagctggaggcccctgcccagggcagcccacccagccctggtgaggaggccctggtccctactttcccactggccaagccccccatgaacaatgagctgggagacaacagctgcagcagcgacatgactgattcttcyacagcatcttcatcagcatcgggcactagtgaggctcctgactgccccacccacccaggcctgcctggccctggcttccagcctggcgttgatgatgacagcctggcacgcatcttgagtttcagtgactctgacttcggtggggaggaggaggaagaggaggaagggagcgtggggaacctggacaacctcagctgcttccatccagctgacatctttggtactagtgaccctggtggcctggccagctggacccacagctattctggctgtagcttcacatcaggcrtcctggatgagaatgccaacctggatgccagctgcttcctaaatggtggccttgaagggtcaagggaaggcagccttcctggcacctcagtgccacccagcatggacgctggccggagtagctcagtggatctcagcttgtcttcttgtgactcctttgagttactccaggctctgccagattatagtctggggcctcactacacatcacagaaggtgtctgacagcctggacaacatcgaggcacctcacttccccctgcctggcctgtctccacctggggatgccagcagttgcttcctggagtccctcatgggcttctccgagccagccgccgaagccctagatccctttattgacagccagtttgaggacactgtcccagcatctctaatggagcctgtgccggtgtgaggaccaggatgtcttttcccagccccaagagacctgttgctgctttcttgtaattatggggctccccagagtctgcgtaacagtctcccactggctggctcacccacaggtgccatgtgcacactcctggttttcaaacaattctctggatttatttatttgttttaacttttctgtgctgaagagaggactagggggagggggcttcccctttcagctgcccggccccccacacccacagcttgctcttctatctccacaacgtgagcctggaagaggagaaaatgtggctcctctggagcttggcagaccacttttcggtctttgcgtgatgttccttagcccaaagacggtgagacagggctgaaatcaggtggcttctgccaccctgagccctagacccatgggtggctaaatccactggactgtgaagactataatttatttccataatttatttggagattgaggaggctttggttgcacttctttggctggtgggtaatgccaggggtggggtgggcacaggccctcaagagccccttttgccttgtagtcctacaccttgccctgcctgggctttggtgcagactaggtgtggatttgagctctgtgatctatgtctgctgcctggctcctagatggctctgygggcaggtgctggccaaggacatcatctaggcagggggagagcctgggctgaacagctgtgaccaaaactcccttctgccccaccctgccccctccacttcctgccctctgttccatcttcccccttcccaaaggccacagcctttattccaggcccagggatgtaggagggggaaggaggaaacaggaagcccagagagggcaaagggcctacctcggggcgcgaaccatgccccagactattatctcagggctttctgggcactgcacttcagcgtggcccacctgcccatgccctgaggccagttggcgaggggtggctcctgagggtttttataccctttgtttgctaatgtttaattttgcatcataatttctacattgtccctgagtgtcagaactataatttattccatttctctctgtgtctgtgccaagaaacgcaggctctgggcctgccccttgcccaggaggccttgccagcctgtgtgcttgtgggaacaccttgtacctgagcttacaggtaccaataaagaggctttatttttaaaaaaaaaaaaaaaaamaamaaaaaaaaaaaaaaaaaaaagggcggccgc

SEQ ID NO: 1570 - DNA, 1525 bp, Homo sapiens
  SITE (1499): n equals a,t,g, or c
  SITE (1502): n equals a,t,g, or c
gaattcggacgagcagttgaaaaacccttagtcactttgacacatctgctctttacactggtattttcttggtttaagtgacgacatactgaaatgactgggtcaaatcaacaaatcagatattgcaaaaccagtatttttccaaaaattgactgtatatataaagtcagccagtgctgcttcgtatttttagatagtaagtgcagaaatataacttcctcttctttctgtctctagtttttactgttgacctatccctatgctcctcaactggacgctagtctcttgtaggaaataaatctctttaagaaagatgaaagaagttgcaaactttgaaacaaaaatgggtggagtacaratctctgcagttacaggaacatcgtctgcttcatggtgatgcagctaattgccccagtttggaaaacatggacttggatgaattgtctttgtttggacccctgcctgggccaggcccagcccttgtggaccggaatcgattatccagtgagagcagctgtaagagctggctgagctccatgacgatggacagtgaagatggctaccagacgtgtgtgtctgaggactccagcaggggtgccttcagtcggcagacgagtacagatgatgagtgctttatccccaaggagggggatgattttctgaggaggtcatcttcaaggaggaaccggagcatcagtaacaccagcagcggatccatgtctcccttgtgggagggcaacttatcaagcatgtttgggaccctgccccggaagagcagaaagggaagtgtccgaaagcaactcttgaaatttatccctggccttcatcgtgctgtggaagaggaagaaagtcgcttttgacggattgtggtgtcctttcaaattagcttatttcacaaatatctctagactcacccagatcccagcttggtgggaaagtgcagaagaattgcaaaactgacatcccatttcacagcaatagtgacctttatttaaattgttgtgttatagtttatgcttcttaaatcatttttcaacctaaacagccaatttctaagcagacaggaaaactaaataataagttaattaatataacaaagatgcaggttcctgctcattccagtaatgtctttgaaagcaaaactaatatttattttctagattatccctgtgaataattgagaactttttggagtcaagtatgaataaaggtgtggcagaatataataatctggactattttctataggataattgctgggttataaaatcttaggtttgcttatgcccagtagctcctgcggaggcttaataataggcaattttgaatttgttcaaacctgtaatggcttgtaaacaaagatgaccatcagctgtttctcacatctatagtgacaataaagcgggaagtataagatttaataggaggggttaaggttcatgagaaccatggaaagatgtggtytgagatggggtgckgcaaagatcattaataaagtncantattatagacagtctaaaaaaaa

SEQ ID NO: 1571 - DNA, 2399 bp, Homo sapiens
ccctgctgagaatggatttgtttgtgttctataccttggtgtcatgaagtccgataattaatgtaaaattctcaatttcccgcctagcccaaaataagtactcagcaatgttggttgactgtgtcctatttaataatatttttatggcaccatgctccattaaactcagaacaatttgtagaagtcttctaatttatcttcgactatagattccagaactctttgacttacatttgactaagtaaaaagatgtctttctgcctctagaagacagtttttcctagaaacattgattctgatgcctaattttctttacccattaattcatggacttatttttattgtttttcacacatcctcacaatctttgccaggaacatggtgagcaggaatacttacctttcagggcagggagaaaggtcagagcctcaggtggcctctgagtgacctcagtgctagagctgtccacctgtttatactcctggctatcacacctttatcccatcacagaagcttacaaaaggagtaattattagagtttgctttgtaaagcctaattttggatttccatttaataattaaagctggttttagggaagcccctaaaccaacctgagttttcttgaaatactaacttgtgtcttgctgttatctgagtcacacttttatcctaatttttagatacggacggcctgaccctctgctccggagagaacacgacattcgcgtgagcctccggatggcctctgtgcagtatgtgcatactcagcgtttccaggcagaggtggtggccttcattcagcatttcactcagctgcaggatgtcttagggcgccagcgagctgctattgaggggcagacggtaggtagcctgggccctccaagctgcttttccagtttgactgatcagtagaacttttaggcctctagagatgaatctggaagagtaaaggtaagttatccttgctaatatgttctccgtgtagattagctacagacatctttgtgtaattgaagagctttgttccttatttattgtatctcacttaaattaccttcaaactttagctttcactttctgtaaaaaaagataagggaggtttacaaagaacacttaagacttctggtcccttttaggacttcagtggggatgtttctcttggaaagtggtaggttttttctaaatgcagtagatcagaagttctaaactgagttcgtggcccccgtggggtcctggtagtttattcatggcacatcctaggccaaaggaaacacctaatggtatttccgtttacaaagtaagtcagtctaaacaacaagtacatatgtcctaacaacttagtaggtgtttgaaaaaataataacacataaatggaaagaataatattttatttaattcttaagtaaccacaatgactggtaggaggtatgtgcctgttaggtattgcataacttctcaaacttggaatcaggttggacattacaaccctcacttcctgtccacatttatcttcttatggtacttgctttttctcacagcaaccgctgaagacccagcttcgcaaagataataccttactgaaaggagtatagaatgatctattattgaatgccaactaccacaagctactagttagtgcagtgtctggcagatgttgtttttccttcaaaaatttaaaatgtcctggcagccgggtgtggtggctcacgcctgtaaatcctagcactttgggaggccgaggcgggcagatcacgaggtccagagatcgagaccatcctggccaacatgacgaaaccccgtctttactaaaatacaaaaattagctgggcatggtggcacgtgcctgtagtcccagctattcgggaggctaaggcaggagaatcgcttgaacctgggaggcggaggttggagtgagccgaggtggcgccactgcactccagtctggcgacagagcgagactccgtctcaaaaaaaaaagtcctgacagctgcaagcctttgccaccctgtggtgtctcagtgcagtttgggaaccatagaaaataacaatgtacttttgtaacaacgtgttatttttcctttttttaaaaaaactttatggccaggcgtggtggctcacacctgtaatcccagcactttggggggcgaggcgggcaaatcacttgagctcaggaattcgtgaccagcctgggcaacatggtggaattctgtctctacaagaaatacagaaattagccgggtgtggtgaggcatgtgtctgtagtcccaggtacttgggaggctgaggtgggaggatggcttgagcccaggaggtggaggttgcagtgagctgagatcatgccacctgcacttcagccttggtgacagagccaccatgactcaaaaaaaaaaaaaaaaaa

SEQ ID NO: 1572 - DNA, 1709 bp, Homo sapiens
agcttataccagctgaatggcagccttgcctaatccacctacaacaagaatttcttaagctttcttttatttgcatgagagagccactaccaaggcatgttttgttatgctgaaactgggctgctgcatactgctaaatggcacctctgggattggcctacctggggatttcttggtttgtgaaaacaggagaggagaaatatctsatacaagtgaaaggatactggagagagaaattacccatttctaaaaaaaaaccacactctgtcgtatctgtgttaatgttttctagcatgtactctggtttcaacagacacaaatttatatgttaacccagttttcttgccgttctgtaagtgttttattcttagtgtgatttttttccattgggatgtttttgattgaacttgttcattttgttttgcttgggaggaaaataaacaattttacttttttcctttaggagcattatgagcattatgtcagaatagaatagaattggggttcgatcttaacaggccagaaatgcctgggttttwttggtttgtttttgtttttgtttttttatcaaatcctgcctgactgtctgcttgttttgcctaccatcgtgacatctccatggctgtaccaccttgtcgggtagcttatcagactgatgttgactgtyraatctcatggcaacaccagtcgatgggctgtctgacattttggtatctttcatctgaccatccatatccaatgttctcatttaaacattacccagcatcattgtttataatcagaaactctggtccttctgtctggtggcacttagagtcttttgtgccataatgcagcagtatggagggaggattttatggagaaatggggatagtcttcatgaccacaaataaataaaggaaaactaagctgcattgtgggttttgaaaaggttattatacttcttaacaattctttttttcagggacttttctagctgtatgactgttacttgaccttctttgaaaagcattcccaaaatgctctattttagatagattaacattaaccaacataattttttttagatcgagtcagcataaatttctaagtcagcctctagtcgtggttcatctctttcacctgcattttatttggtgtttgtctgaagaaaggaaagaggaaagcaaatacgaattgtactatttgtaccaaatctttgggattcattggcaaataatttcagtgtggtgtattattaaatagaaaaaaaaaattttgtttcctaggttgaaggtctaattgatacgtttgacttatgatgaccatttatgcactttcaaatgaatttgctttcaaaataaatgaagagcagctgtccttctttcctcttttaagtgttcagctgtggcatgctcagaggttcctgctggattccagctggagcggtgtgatacccttctttttcagctgttcgtgccttcctttcttgtatccaccaaagtggagacaaatacatgatctcaaagatacacagtacctacttaattccagctgatgggagaccaaagaatttgcaagtggatggtttggtatcactgtaaataaaaagagggcctgggaattcttgcgattccatctctactttgtataagtctcattttgtgccttacacatctgcagtatttatcatgttccaacttggtgactgtcaggcagtgcaatacatc

SEQ ID NO: 1573 - DNA, 2847 bp, Homo sapiens
  SITE (2734): n equals a,t,g, or c
ggcacgagatgagctgcaaggtgcctttgacgagcacataggaccgctctgcactgactggcagaaggccgagcggggagacattctcctgagcagcctcatcagaaagaagctgcttcccgaggcctctctgctcatcaccacgagacctgtggccctggagaaactgcagcacttgctggaccatcctcggcatgtggagatcctgggtttctccgaggccaaaaggaaagagtacttcttcaagtacttctctgatgaggcccaagccagggcagccttcagtctgattcaggagaacgaggtcctcttcaccatgtgcttcatccccctggtctgctggatcgtgtgcactggactgaaacagcagatggagagtggcaagagccttgcccagacatccaagaccaccaccgcggtgtacgtcttcttcctttccagtttgctgcagccccggggagggagccaggagcacggcctctgcgcccacctctgggggctctgctctttggctgcagatggaatctggaaccagaaaatcctgtttgaggagtccgacctcaggaatcatggactgcagaaggcggatgtgtctgctttcctgaggatgaacctgttccaaaaggaagtggactgcgagaagttctacagcttcatccacatgactttccaggagttctttgccgccatgtactacctgctggaagaggaaaaggaaggaaggacgaacgttccagggagtcgtttgaagcttcccagccgagacgtgacagtccttctggaaaactatggcaaattcgaaaaggggtatttgatttttgttgtacgtttcctctttggcctggtaaaccaggagaggacctcctacttggagaagaaattaagttgcaagatctctcagcaaatcaggctggagctgctgaaatggattgaagtgaaagccaaagctaaaaagctgcagatccagcccagccagctggaattgttctactgtttgtacgagatgcaggaggaggacttcgtgcaaagggccatggactatttccccaagattgagatcaatctctccaccagaatggaccacatggtttcttccttttgcattgagaactgtcatcgggtggagtcactgtccctggggtttctccataacatgcccaaggaggaagaggaggaggaaaaggaaggccgacaccttgatatggtgcagtgtgtcctcccaagctcctctcatgctgcctgttctcatggattggtgaacagccacctcacttccagtttttgccggggcctcttttcagttctgagcaccagccagagtctaactgaattggacctcagtgacaattctctgggggacccagggatgagagtgttgtgtgaaacgctccagcatcctggctgtaacattcggagattgtggttggggcgctgtggcctctcgcatgagtgctgcttcgacatctccttggtcctcagcagcaaccagaagctggtggagctggacctgagtgacaacgccctcggtgacttcggaatcagacttctgtgtgtgggactgaagcacctgttgtgcaatctgaagaagctctggttggtcagctgctgcctcacatcagcatgttgtcaggatcttgcatcagtattgagcaccagccattccctgaccagactctatgtgggggagaatgccttgggagactcaggagtcgcaattttatgtgaaaaagccaagaatccacagtgtaacctgcagaaactggggttggtgaattctggccttacgtcagtctgttgttcagctttgtcctcggtactcagcactaatcagaatctcacgcacctttacctgcgaggcaacactctcggagacaaggggatcaaactactctgtgagggactcttgcaccccgactgcaagcttcaggtgttggaattagacaactgcaacctcacgtcacactgctgctgggatctttccacacttctgacctccagccagagcctgcgaaagctgagcctgggcaacaatgacctgggcgacctgggggtcatgatgttctgtgaagtgctgaaacagcagagctgcctcctgcagaacctggggttgtctgaaatgtatttcaattatgagacaaaaagtgcgttagaaacacttcaagaagaaaagcctgagctgaccgtcgtctttgagccttcttggtaggagtggaaacggggctgccagacgccagtgttctccggtccctccagctgggggccctcaggtggagagagctgcgatccatccaggccaagaccacagctctgtgatccttccggtggagtgtcggagaagagagcttgccgacgatgccttcctgtgcagagcttgggcatctcctttacgccagggtgaggaagacaccaggacaatgacagcatcgggtgttgttctcatcacagcgcctcagttagaggatgttcctcttggtgacctcatgtaattagctcattcaataaagcactttctttatttttctcttctctgtctaactttctttttcctatcttttttcttctttgttctgtttacttttgctcatatcatcattcccgctatctttctattaactgaccataacacagaactagttgactatatattatgttgaaattttatggcagctatttatttatttaaattttttgtaacagttttgttttctaataagaaaaatccatgctttttgtngctggttgaaaattcaggaatatgtaaaactttttggtatttaattaaattgattccttttcttaattttaaaaaaaaaaaaaaaaaaaaaaaaaaaaaaaaaaaaaaaaaaa

SEQ ID NO: 1574 - DNA, 2661 bp, Homo sapiens
ggcacgagcacaggctcctcgtggctgggggtgctgagagctgaggcttggggagctggaggctctgcgcggatggtgctttttaatggatctgagtgttcctcgtgactgcatggctgtgaaatatttaaatggttctgcagagctcagaaaaaaagggaattcttcctcctgcccagaggccaacacagttagcctgggcttgtgtgtctgtttatgtacgtgtgcatatgtatgtatgtgcatgtgtatttgtgtgtgcgtattgtgtgcacatgtgtgtctcacgtctatgtgtgtctttctgggggatgtgtgtttctgtgcttttgtgactaggaacacgcacatatatgtgtagatgcccccagaaggtggaaatcctcacggggtctgcacttggccttctcccagcaccaagtcctgggatggagacccgaatgagcataagggtggccttgaaggaaggcactttggcacttgaggtttgtgaaacttaggagcacatgcccactgtggccagcagcccctgggacactgcaccttgcggagcacacgtgtgatggggtgtggcccactgggcagcttcgcaagagcagaactggagacgacctcagtgccaggcacaggcccttgtgtccgggctgtcctcacccagaccctgggcagcctgggaggaagcccctaagtggacagtggtgggacagggacacacagtccgggaggtggctctgggcaaacctcctccaagctgcaatctgctggtctgtagaatgggagaggaacacagcctctcacttggtgagtgccctggctgtgctggggcctgggggaatcccagggagtgcagcgtcaggcccagggtgggagaggcaaagtagacaccccatagaggcttcggggtatgcatggagtgacccgagagcacaccagggccccagggacagcgctgctgggtggcccaggtaaaggcggctgtccctgtgcgcacatgtgtccacgtgaacttgctacttagagagcagctgatgctgaaggcaggttgttggaattcccaggcccaggtgtaagcagcagagcccaccagtgtcccctgacgcccactctcttcctcctgggcacataattttagatgaaactgaaaaacacgcagcatgaaagcaaggcccctgccctctgctggttctgtattggctgcctcgtgtatttttccagcctgcagaaagtcgaggcctggatggataccatgtccacccctccctgtggccctgcggcaccccggcctcccggcctgcatctttcatgagtctggaaacaggatctcccagagagggccccaggaggttggctgccagcagtgggttctcacagctgcctccaagcaggtgaccagtcctgggaggctgtggtctagggcctggcaactcaggggcgcctgtggacaaagggccgggccaaggggctggcaggtttgtcctgagtgactgaagagggccccaccagggcagcttgagaggggcagactcttgctccagagaaagaggaagtttggtacttagcttggaatgaagggccagccctagagaggaccttcctgtggcaggagagagggccatgtcctgccaggggaagtcctgggaggcttcctggaagcagtggcctctgtgtggggccttggagcttgagagtgtctggcaccagggaaaggcattgggggcttcgagagaactgcagggggccctgaccagataggcccctaaggcaaagaggattccatcagaactcgcattcccattttattactctgggaagtaatgtggaagctaagctccactgtatgtcgtatgctgaggcatctgttgagcctctgctgtgtcggggccgggctctgggtggcccacctcagtgaagtcttgctgctaatggccgaatagttctgcaaggcctgtgctgaggcctggagccggcccgctggggctggaggcacgggcccatcaacgtgaaccattacgccagcaagaagagcgcagccgagagcatgctggacatcgcgctgctgatggccaacgcgtcccagctgaaggccgtcgtggaacagggccccagttcgccttctatgtgcccctggtggtcctcatctccatctcccttgtgctgcagatcggcgtgggggtgctgtcatcttccttggtaggtccccaggtgggggcagccaggccacctgctcaccttgctggcatctgctcgcatcgcctgggacaggtgcccaccaccttgcacacttggctctcaggagctgccgattcctggccctcatcacccagacatgcagtccaggaagtggcaccccccctccccccaccctgcactttggtttttgttttgttttgttttgttttttgaaacaaggtccccctctgtcacccaggctggaatgcagtggcgcagtctcggctcactgcaagctgcatctcctgggctcaagcgatcctcccacctcagctcccagctctcaggaggctgaggtaggagaattgcttgaacctggcagggcagaggttgcagcaagccgagatcacgccactgctctccagcctgggtgagactgtctcaaaaaaaaaaaaaaaaaagaaagaaagtaagaaaaaaaaaaaaaaaaaa

SEQ ID NO: 1575 - DNA, 994 bp, Homo sapiens
ggcacgagtttttttctttttatttgagaaaagggggggttgagagtagagtgggaatggcaagaagtagtatgacagagcttcttctctttttttcccctctttaccaggaagttaactagaagtcctcatgcatgtttttaaaacaaagttggtaattagcataacctagttagttacctttacacagagtgacagaattaaaaagttgacaagcccatcagacctcagccaggaggtactgaaaggagggagaccagtgagtctagaccaataggtgggttaggcctcctgaatgccagcctagaagtttagacttgattctataggctctggggtacctacaagtttgtagtcggagccttgggaattgaatgttacataggaactttcactggttccagctagccttggctgttagcaattatttttatctactttaacaggggggacagagtaggggggcaggaaactaagctggcattatggtcacaggaaagaacagactgatttggagcctttcaaactgcagacctttgttactgaccgatgcttaatttggtttctgggttttgttagttttttcccctgcccttacctcatttaccttaacgacagctccccccctctagagctcagctagggcaggctgccactgcggattggggggccaagaggcccagggcaagaagaaagtgggttgaaagcagagttctgtttaaagaattttctgctggaaactagcccagagggagtaaagaggaactttaatgaggagcagctgcagtgccgacgcaacccacatgagacttttttttccccttcgttccacattctgtatagtttttttaaaaatcatgactttgaaatagctgttttgtaaagcatgcctctctttttcttcttgtatgtggtggggttttgctttgttgttgttgtttttttttgaatggccaaatcctcgttttaaaaaaaaaaaaaaaaaaaaaaaaaa

SEQ ID NO: 1576 - DNA, 793 bp, Homo sapiens
gaaccagtttttttctgactgcctccagcatgagctgaatttccgtctgtgcagttatcctcagccaattgaaaatcacctggagttgtattccaagcacaaaagaaggtcagagagtggaggcccgatgatcatgatcgccctgtctccagggcctaggctggaaggagtcctgcagcctttgtggctcaggaccagagagctgaccttgaccctgaccttgtgatcccaggcatcagtggctggaaattcctttcattttattgttgagcccagaagcgcccagctctctttggcaaggttaagctagggtaagaggcactgttactagagtgaccagagttctttaagcgtcgctctgctattactcagttaaccttattaataccctgcctggccaacacagtgaaaccctgtctctactaaaaatacaaaaattagctgggcatggtggcaggcgcctgtaatcccagctactcgggaggctgaggcaggagaatcgcttgaacccaggaggcagaggttgcaatgagccgagattgcactactgcactccagcctgggcaacagagctagactctgtctcaaaaaaaaaaaaaaaaaaaaatttttaaatataattcacataacataaatgtaattatttggcctggtcctggtgactcacaactggattcccatcactttgggagactgaggcaggaggattgcttgaggctgggagtttgagaccagtttgggcaacagagcaagaccctgtttctttaaaaaaaaaaaaaaaaaaaaactcgag

SEQ ID NO: 1577 - DNA, 1482 bp, Homo sapiens
gtttttattttgttgtagagatgggacctcagtatgttgccacggctgaccttgaactcctgcactcaagggattttcctgccctggcctcccaaagtattggtattacaggcatgagccattgtgcccaccgtctctggttcttaaccttctgcctccctcttccagttttaaagaatgcttgtaattacatgggctctcctagatactccaggataatcttgttttaaggtcagctgatgagcaacattaattttatctgcactcttaattcccccttcctatgtaattgtgctgtgtaacataggacatgagcaattggtggcggtgggggttattactttggccaccacagtaactattttatgccaggtactcagctaagcactggtgaattaagcatgaataacacacactccctaatctccatccattcatgggaggagcacytcacctgccatgctcctgagaatctcgggagtcagagaagtcttctatgaggaggtgatgccaaagcggacaagtgacagaggagtcgaagctagctaggmagagagtagaggtttaaggggaagcataktataagcagaggatattacccacttcagagactcccagaggagaaagagtgtgcgttsaaggggcagatgaggctcagttggactccatagcagatgwaatggagaggggcaagcagtgaggctgccttgcaaggcagggcagagcaggggctgttaaggagtttggacttaatccctgaggcaaggagaagtgatgtaaatgggggagtaacatgatgagattcatggattagagacatggctcaggctgctgtagagaaggtgccagggagagcagatggctcaatgggtgtgcaggagacctctcactgagtttagggagaggtttgtaaaacagaagaagtttgagtaatttaaatgatgatgggaaggagctaaaagtgggggataggttaaagatacaggaaaaaagaaagaaaagaaaaattccatatctgagtgtttactcctgagtttttgagattgctattaagatcgtgctctactgtgatgatttgggtttgtttgataatcagaaaaaagcatattcttttgggtgttcagccacactgctttggtgtcacaactgcacattggtttcacagctgcaggagcaagttcgagcatcttaaaatgattcaacaggaggagataaggaagctcgaggaagagaaaaaaacamctggaaggagaaatcatagatttttataaaatgaaaagctkcctctgaagcactgcagactcagctgagcacygatacaaagaaagacaamcatcgtaagaagcaatagtttctcttactattctgagagccttatcattctacatcccatcttcctgtgagwttgtctttgtagcatttaactctaattgcagttctcwttttaaaaaytggcttgcttattgtatattttccccaact

SEQ ID NO: 1578 - DNA, 1336 bp, Homo sapiens
  SITE (221): n equals a,t,g, or c
gggcacacgttgtacgtgctgacgtagccgggctttccagcgggtatattaggatccgtggccgcgcggtgcgctccagagccgcagttctcccgtgagagggccttcgcggtggaacaaacactcgcttagcagcggaagactccgagttctcggtactcttcagggatgagtcatgtggcagtggaaaatgcgctcgggctggaccagcagtttgctgncctagacctgaactcttcagataatcagagtggaggaagtacagccagcaaagggcgctatattcctcctcatttaaggaaccgagaagctactaaaggtttctacgataaagacagttcagggtggagttctagcaaagataaggatgcgtatagcagttttggatctcgtagtgattcaagagggaagtctagcttcttcagtgatcgtggaagtggatcaaggggaaggtttgatgatcgtggacggagtgattacgatggcattggcagccgtggtgacagaagtggctttggcaaatttgaacgtggtggaaacagtcgctggtgtgacaaatcagatgaagatgattggtcaaaaccactcccaccaagtgaacgcttggaacagtaagtttttgaagtgtatgttacttgtgatgaagccttactagctagtataacaaatgaacttatccattttttgatttgagggaactcttttctggaggcaacactgggattaattttgagaaatacgatgacattccagttgaggcaacaggcaacaactgtcctccacatattgaaagtttcagtgatgttgagatgggagaaattatcatgggaaacattgagcttactcgttatactcgcccaactccagtgcaaaagcatgctattcctattatcaaagagaaaagagacttgatggcttgtgcccaaacagggtctggaaaaactgcagcatttctgttgcccatcttgagtcagatttattcagatggtccaggcgaggctttgagggccatgaaggaaaatgaaagataaaagaaaaaataatccaaatgtctgtcactagcggactagttaaaaaagcattgcaagctgggcacagtagcattcacctgtgaatacactctactccactctgggtaacatgaggaggcctccctaccttcctaagaaaacccaaacaagcactgcatatctacacggctgagtctacaaacatttaacacaaaagaagaaagacataggaaactcttgatattccctcatgggatggtctccatgatacattgttaagaagaaataaagcaaggtgtagaaaaaaaaaaaaaaaaaaactcgag

SEQ ID NO: 1579 - DNA, 2253 bp, Homo sapiens
gacacgagcctacactgacagcccctactcttgccctgcttctgctgccgaaaatttcctgcctcctgacttctacccaccctcggacccagggcagccgtgcccatttccccagggcatggaggaccccccagacacccagttctatgtaggatcttctctgccacaggctggaccctggagagtttctgcacccccttcaggacccccacagttccccgctgtggtccctggaccatcgctggaggtggcccgagctcacatgctggctttggggccacagcagctgctggcccaggatgaggagggggacacgctccttcacctgtttgcggctcgggggctgcgctgggcggcatatgctgcggctgaggtgctccaggtgtaccggcgtcttgacattcgtgagcataagggcaagacccctctcctggtggcggctgctgccaaccagcccctgattgtggaggatctgttgaacctgggagcagagcccaatgccgctgaccatcagggacgttcggtcttgcacgtggccgctacctacgggctcccaggagttctcttggtatggccagctggcaggcaggggtttgtctggggggtagactggttgcccagattttggcttccagggccaggaggccaggggatacccttacccagcagtctgccttctcttcctcccaggctggcttaactctggggtccaggttgacctggaagccagagacttcgaagggtaaagttgggtgtggcaaggggctgggtgtgggttggggtggcttggccaaggtgggtgcagatgcgggtccctcactgtctccattctgcaggcctcaccccgctccacacggccattctggcccttaacgttgctatgcgcccttccgacctctgtccccgggtgctgagcacacaggcccgagacaggctggattgtgtccacatgttgctgcaaatgggtgctaatcacaccagccaggagatcaagagcaccaagacagttctgcacttggccgtgcaggctgccaaccccactctggttcagctgctgctggagctgccccggggagacctgcggacctttgtcaacatgaaggcccacgggaacacagccctccacatggcggctgccctgccccctgggccggcccaggaggccatcgtgcggcacctgttggcagctggggcggaccccacactgcgcaacctggagaatgagcagcccgttcacctgctgcggcccgggccgggccctgaggggctccggcagctgttgaagaggagccgtgtggcgccgccaggcctgtcctcttaggactcaaacccagaccctggactgattttccagtccccaccgtcctgcgggacagccagcgtatgctaatgttgcaaacccatgataatgtatgtggaatatcctgccattggggttttacgttaaaaccccagaatggctgcagaggggtgaacaggccccaatatttggggtgctgtgatacccctcttctacccacaaggagccctcttgatgatttctgtgaaatcgaggccccttgattgtttctgtgaaacaccctgcacccctagtcctttccccactgagatctttcgggttctctcccctaactcagctcttcgttcccagaaacccagatgtaatccccctacgtggtgcttggggcatcccgataccatctcagtaaatctcctacaatggcctcctcaccctccccgggacccacacccttcaggtcctcaccctgagacaggagggaccctctgagatcagggacccttaggtctcactgctctctgattcagagctcagctgggcccccagttccagaccccagcattcccggtcactccctccctaatctgagcatcactcaagctctttattaaactcaatttgggccagatttggtggctcatgcctgtaatcctaacactctgggaggccgaggcgggcggatcacttgaggtgaggagtttgagaccagcctggccaacatggtgaaaccctgtctccactaaaaatacaaaaacaattggctggacatggtggcatgcgcctgtagtcccagctacttgggaggctgaggcagaagaattgattgaacccaggaggcggaggttgtcagtgagccgagattgtgccactgcactccagcctaggtgacaaagagagactctgtctcaaaaaaaaaaaaaaaaaaaaaaaaaaaaaaaaaaaaaaaaaaaaaa

SEQ ID NO: 1580 - DNA, 1481 bp, Homo sapiens
ggcatcaaccccgtggtcccaggggagacctccgctgaggctcgccccgagactcgagcccagcccagcagccccctggaagggcaggccgaaggtagagaccactggttcgcaggaggccccaggaggtggacacagcccctcccctcctgaccagcagcccatctacttcagagagttccgcttcacgtctgaggtccccatctggctggattaccatggcaagcacgtcacgatggaccaggtgggcacttttgctggcctcctcatcggcctggcccaactcaactgctccgagctgaagctaaagcggctctgttgcaggcacgggctcctgggtgtggacaaggtgctgggctatgccctcaacgagtggctgcaggacatccgcaagaaccagctgcccggcctgctgggaggcgtgggccccatgcactcggttgtccagctcttccaagggttccgggacctgctgtggctgcccattgagcagtacaggaaggatggccgcctcatgcgggggctgcagcgaggggctgcctcctttggctcatccacagcctctgccgccctggaactcagcaaccggttggtacaggctatccaggccacagctgagaccgtgtatgacatcctgtccccggcagcccccgtctcccgctccctgcaggataagcgctctgcgcggaggctgcgcaggggccagcagcctgccgacctgcgggagggtgtggccaaggcctacgacacagtgcgagagggcatcttggatacagctcagaccatctgtgacgtggcatcgcggggccatgagcagaaggggctgacgggcgccgtggggggcgtgatccgcagctgccccgactgtggtgaagcgtcatcctggcacggaggccacgtcagctgctcgggggcatgcgcaaccagattgtcccgacgccacaaggaccacgcctcaagtggcgctcggacagtgcccaagactgagcctggggtgcccggcacccagagggtgctgcccaccatgctcctgagcctcccaagagctgcagcccacgggcccggcccggcctggcccttcaggggatggccactgtgaaggacgccttcccagcctgcccgttgccaatctgctgtgagaggggggcctccctgccttggggccttagccctggctctgcacttttcctccggggagaaaggacactgcccctcccccgacctgggcccacactgctgccttctcccaggacggaggcttttggaccctcggaccccatcccactcagccaagtgtctttctgtgtctggggggaggaggggatgatatccgtgtggttcgatgtattatttttaagctccgtgagtgcgtgggtcagtgtctgcatgaagtggaataaactgcccaccgccaaaaaaaaaaaaaaaaaaaaaaaaaaaaaaaaaaaaaaaaaaaaaaaaaaaaaaaaaaaaaaaaaaaa

SEQ ID NO: 1581 - DNA, 1268 bp, Homo sapiens
tacacaaactcttaagaaaacaaatattgatatccaaaacattttaataattacattgaaattttctattgcagaaactgtgtttccaatctaaattattaattaatcctaaccctttcctgctctgggtttgtgtttttgaattcagtacatcatcttacagtttttgcttttgttaaaatactggaaataattttgaggaagaaaagaaaataagaagtgatatgtcaccttctaaattgtctttcctaacttagaagcaaattcgaatgtctctagtatggcttttctctccttatttcccctatcatcccttttctcacacttctctttatttaaaacttgtcttcaaagcacacaaaatagagtcgataagagtctatccagccctgatttctcttggccaaggaatgaaaggctgttctctaaaccttgataggtaaggaatagccccctgtccacctccatcttagtctgtattgctgtaaaggaatacctgaggctggggatttataaagaaaaaaggtttatttggctcatgattttgatatctgtaaaagttcaagattggacattgacatctggcaagggccacaggctgcttccactcatggccgaaggcaaagaggagccagcattgcaaagatcccatgatgagagaggaagcaagagagagaggggaggtggcagactctttttaacaaccagttttctcaggggctaaaagagtaagaactcactcacctgccatccttacccccacagcccccaggatttctctattcatgagggatctgcccccatgacccagacccctcccattaggccccacctccaacattggggatcaaattttaaaatcagagttggaggcgacaagtatccaaactatagcacccacaaaccatctagtttatcttattattataacctgtcatcctaaaagttctcaaaatctggctgggcgcagtggctcacgcctgtaatctcaacattttgggaggccaaggtgggtggatcacttgaggtcaggagtttgagaccaacctggccaacgtgatgaaaccctgtctctactaagaatacaaaaattagccaggcatgatggtgggtgcttgtaatcccagctactctggaggctgaggcaggagaatcgcttgaacctaggagatggaggttgcatgagccaagatcacaccactgcactccagcctgggcaagcgtgagactttgtctcaaaaaaaaaaaaaaaaaaaaaaaaactcgag

SEQ ID NO: 1582 - DNA, 1637 bp, Homo sapiens
tctgcctcccaaagtgctgggattataggcgtgagcaccatatctgttctactgtgaacattttaatgtgtttttttggactttttctaaatacatgcaaatattatgtatgtaggtatgtctgagttttttgggttttgttttgtttttacaaaaatgagatttcaatgttctctttacttgtcaaaatgtgtgtgcagatgacagttggaagagatgccagatgtaaatttacctccctcccctccctctgaggcttgcttgccccatgctgtggttctgtgtgacctcatggacaggagagatttctgtggcattcaggcaatgcagcagggtctggccactgacacaacaaacttgtggttttcaaatacaagtcatacagccaagacacagtgcttgggtttcagggcctggcatagtccagtgtctgattgatttttaaccagctagtgaataaatttgtaataaatgatccagctgaagatctcaatgatttaactgcaatgaaattgcaawgaaacttcccagkggctaaaattttgtgkttcacatttgcaytgctgttagcacaaaagktaattatgatgtgtgtgaaaaatgktagtctgattagttgttcacacacacaaaggagtgcttttcacacatcttaattgcttttctgctaaagaaagtgtaactgcaagtcataaaattataacagcctctaacacgttaattccatttcatcagcggatgatgtatcttgaattttggtgaaaagtgactttagaactcatattgatgaggaaagttgaggttaagatactgctctcatagaagacaattataaaaaattatagttcatactcataaatacacacgtctctgtacagaagtatcgtgaattactattttgggatagtgtcttaggttttactttcttgcatttcgttacccacatggaccagtagattaacagaaaatatggccccagaaagaaagaggatacaggctaaagaagtaaatcaaagaactcgatagcttttctgaaggctaaggtagagaaaatcatcttgaaattcaacacttagaagagaagaaagggttttaaagctgcataaaactaagaagaacctgaaacaggcagaacaccagagtttctatcagagagtaggtaaaatggctagttttttcaccactaagaaaggagataaaagtttctccagcttaaaggagggagggattaaaagagacctgattagtgtctacatgctgcttgcatcccagagatgggcagcaggaaccccaaaaagctttaagaagatggagaatatggggagttttgtttctattctcattgtatagccaggggaaactgcaagtctttcagagaaatgccttgtccagcacagtggatgaggaaagatctgagtgggtggaactgagaggagcctcacccctatgtcagaggcagaggcgtttaaaccatagcaactccatcttgaataggggctgggtaaaataaggctgaggcaggagaattgcttgaacctgggaggccgaagttgcagtgagccaagattttgccactgcattccagcccgggcaacagagtgagactccttctcaaaaaaaaaaaaaaaaaactcgta

SEQ ID NO: 1583 - DNA, 2127 bp, Homo sapiens
ggcacgaggaggaaggcagggtgggctcccgcacgggaggagggccccgctcaggccattggctgtctcctcgctgaaggtggacggcagatgccccaggcctagcctttaaccctaaccgagatgctcagagcagctttaaaggtcagcctctccctggcccaggatggtactcggtacgtcctgacttccctggaattgccacttgcctttgtcatgggtactaggttgggtgatttctgctgatcctgagctttgcttgctctgccccaccaccaacctggtagatgccaggggaccggccattgcggggtccaggacaaggcagagcgaggaaagcagagcacgtacctcctgactccagggcgtaatctgccagcccgatgcggtcctcactgtatcgctgcagggcctgcttcacgatgtggtgcacctgctgcaatgcaggcaccaggagacggttgcagcagggagcagacgtgtccccctgtcacctcgtggccgtgggccaaggacccatgggctgaccccttctaggcttgcactgtgctggtgcccaggcagatgtgggcacactgccacccacccatgccagccccacagcatgcaaagcctcctgcttggcacttccatcctggaacctgccagggtagctggcagtgtgggactgtccagggctcccagggaggagagctgtgggtgggtgtgtggagggggcatgtgggcctcacctcctctgtcactccaatcacaccttctttctgcagcgtcaggctcagggaggccgcggcttccctggccgacttgccctgcatctctgccacatgggtgaggatcttgctctccagctctcgcagctgagcttgcatctcctctctctgaaggagccccacgcggccccctccacctcgggcaaggaactgactgatccaggccgggaactgagattccacctataggaacccaaaggggtgtcaccctggggggcttgcagggacagcaggagctgctatgacagggctagtgcttagctggatagcagggatagggtaggagggaggccactggaggaaagagttatgaacactccatgggcactaacaaaaacaggaagaacgcctgtcagtgagagcccacatgtgtcaaggccaacgccacagtctcttgggcataacagaggctgcaggggcaaggggtgctgctttgcaggccccaggacacgtcgtctcaaaggaggaggagagggaccagcagggccctggtggttcccactcacgtcgtcccgcacggcctggatctgctggggcagcaggcccacttcttccgccaccgagctctgcttcagtgccagagccgccagctcctgctgcaggccggccagctggtcctccagccgcctcagctccttcacagagctctcctggaaggactcctgggtcatgctggtcccagagagagaagagtaagcctcggatctctttggtgggaggtaaggccacaccaaagatgaaagaggaccccctagtgggctcccgtcaggagagcgggtgcccagcactcattgtgaacctgagaaggggcaaggcctctcctgggggttctggctgcagaacccctgcctgtcccaaggagctaattctgagcctgctccctttctaagcccagagtccagaatgtactctgcctcagcctctcacatccctccacaagcatggacatctggggcatgagaaggcagttatgtgaggctgtaagaaaggatgctgtgtctataaatgaatcccggtcctctcacacagcctgccccccgccctcaggacccccctgctaacctccatggcacctcaaagacaggccctgggcaggggtcctgagctgggtttcaacccctccccctaccatctgcttggcaagatgatcagaactctctgctctgcggctctgctccccagtcctgcctggagagtgggtggggctggggaggagcaggccgaggccagctggtggcgtcccagtacctttgccactctgacttcagctgctggatgcgagcctcggactcctgtgtaggaagaagggacaaatacaagaaatactcatctcagaaaaaaaaaaaaaaaaaaaaaa

SEQ ID NO: 1584 - DNA, 1551 bp, Homo sapiens
ggcacgagcctgcctcagcttcccaaggctcactgtgctgtgcaaatattaactcattatcctcataacaaccccatgaatttagtactttgtgatctacattttacagacaggaaactgtcagagtcagaatttgaaatcaggtgttctggctcccaagtccatgctgtgaacctctgtatctgccgcttctgatgtgtgggtatcctagctcctcagaaaattgttctacagtagaagtcccaggaaagccctcagggtgtcccaaaactcctgaaattctatggcaaaatgttgtgtgtacatttttcagcaagagagtcagtggctttcctctgtttgtccaaagggtctacagtgcagaacagtttagcaccacttacctagaggacctttttgtgtcctttccattgttaaaaggctcctgttggcataaggattcttttggaagaacaagatgtttacaaacccattcagacttcttagataacaatgttctaaattaattgcttatccggttgatcttcctgggaactttttcccaaatatttatgccaggtcccagattcagagattgtaattatttcatgyagggtagggcctggcatctgttttgaaaagcctttccagatgattctgatacaggtcttcagttaagaaccactaatattatcctctagagaatggggatactactttatagtcaaagataatcacttgcatttcacatgagacctttacatgacccaccattagcctacccccatcaccccagttttcacttttttttttttgaggcagttcactcttgtcacccagsccagagtgcaatggcacaatctcggctcactgcaacctctgcctcccgggttcaagtgattctcctggcctctaaattctagatctccaaatctggcttctagggtttgggatcagggaatgaggatttgtccaaaggcatggggtgggaaaaaagactgtttgtttacaagaggtaagatgtcaggaagcagcaatgtgcttacaccactgaggtaggtgtgccctttcagggggggagtttccattctggggatccccattctgaggtttcccagaaggggacagttttcaagcccactttcctgacggttgcatcttgtcgcaggtttcatctcacctttgtcttgctgcccgcaatctctggcttggtcagctcaggaaacccctggtgccagagatccggatgaagatgagggactagttcggcctgttgcggtatctcagcggggtgagacgcctcggtggggaaggcagagtggaaaacccgacgccttccaccagcaactcttgtgaatatgtgtgtgttggggttatgtggctagccaggagtggagatggatagtgtggtctgcagaggatgcattttggagctgacagagctgagtttgagccctggttctgccagtgctggctaggctgtgcacccctgggcaagggtcttcacctctctgggctcatgtcttcagttataaaactggaaaataaaaaaaaaaaaaaaaaaaactcgag

SEQ ID NO: 1585 - DNA, 874 bp, Homo sapiens
ctgcaggctcatacacagtggagctgacctggctgtgctaggttcttggaagtcctggctgaactcagagaactggttcttgggccatgccgggggtgcaggcaagtaagcctgcatgtgggtgaaaggtagccccagcagcaaggctgtaaggaaaagagggaatgagcacttagtgtacacctaccgtgtgccacaccccctccatatgttgcctcattctggccactccgcagcctctggtggtgcctcatgcccactttgcagaggatgagccacaggttctgatcaggtgctggaacaaaccacccttsttaagtgagtcccccacgaacttagaatttgagactcactcattggccaggctcaatggcctctgttctgctatcaagaggctgctgggatgttacccatggcagggatagatggggaagtcaccatattcaaaacaatcatgtgttgaaacacctccccagcttctgatctaccggyagtggyagcggaagcaaayacagcaaatctgaaacccgatgcctacagaacaggggtgtgaaatgtgacgccagaggcccccacacagaagtgggtgtggacagccacctgcctgtgagcaaccaggggaagctagcttggtgccgagtttacacagtgaatgttaaaaagacttcgaagctggccccagtgtattcgcacacagttgagaaaggccagggaggataacaagggctagaatatagggtcagctccctacagttgctgtaaccccctgggcagctccctttacttctctgagcttcagtgacctcctctgtaagtgaggataacatttcccagagtgaggattaaataaaaaaaaaaaaaaaaaaaactcgag

SEQ ID NO: 1586 - DNA, 942 bp, Homo sapiens
ggcacgagaccatgtctgccctcccctctcccctctgccccttctgctctgtgctccttctcccgagtcccccagcccgtgtccctggcctctgtcttctctttctctccctcccacccctaacacctccctccactgtgggaacctgtaaaccccagggttgtgccccttcatggtcccccatccacccccgcaatgtctcatgctcgatatacaaaggccatggtgactttgggtgacatttgggtgctgtggagctcagggtggaaatttccttccggccttgtgatttcaaccctcctcccccacacatgcttggggctgttttgagcacagcaggttgccagctccatccacctcccggtaacctatccgagtagttggagttagggagaaccaggctggggtgagggcatcagcaggccccctgcagcaacagcagcagcaactctcattttctgagggggctacttactgtatgccagtcccttcatattcatctcagcaaacccaccgtaccgtgcctccccaaccagttagaaactcagttgcccacaggggctgggcaggaaggtgaggcaaacttgggctgtccttggccggatctcctgcatctggctcccaagggaagccataaatccagatttttaaatgtaaacgcctgaattttaaatgttggtaatcaattcacttaaaaacatcaccaccaccaccaccaccaccaccaacaaaaaaacccgtagacttgtccctgttacaggcactaggaacacagcagggaacaatcaaaaagtccctggtctggccaggcaaggtggctcatgcctgtaatctcagtacttcaggaggccaaggcaggaggatcacttgagcccaggagttcgagactagcctgggcaacatagcaagacccccgtctctactaaaaaaaaaaaaaaaaaa

SEQ ID NO: 1587 - DNA, 1124 bp, Homo sapiens
aaaattataattgaaaacaaaatctgacattctctgctaagtcttatctgaatgcttcagataatggtagtgtagtcagtgactaaaatatttttatcaaatttcctctctgtagacgcctgcaggtattgacgtctgtcagatctcgtcacattggctggtgccgcagctgttggagagtatttttctttatgattattttagaaaaaaaattttcttttccacaatgtggttctcttagaagaatgacgtatcttcttttcctcagcgagttggacacattgtgcccagggcagccctgtccttgggcagcgaccgcacaccaaagctgggaggaggctggtccggggggcctgggcagaagacagtgatttgcaggggtggctcccagacaccctgcccagggatgggctgggcaccacctgggggcggagcgtgagctccagacgagctcctgcgtgcgcgtgtgagtktgtctgcgcccagccatgtgacccygctcgtcccgtctgaaggactctcctaggaggccaggttgcccctccagaccsctcccaacgtcagggggaaggaaacgttgactttcactgcactttgattcgtctctaaaccatttgctggggattcctgagagcagagctcccagcgggccctgcctcccaagtcccgccgcaaggctacctcgggtgtgtggatgtgcgagggcctcccccgcttgcgaaggggacatgcgtgctggaacctgtcggaactccatgccttcctcgcctgctcacctgctcgacgctggaatcgggacaggtgcaaagggacgcagacgtctgggacagctaaggcccgtgtcaccggarggctccgcacagtcgttctggtttcaacgaataagcaaaactcgggcaagtactgcagctatttggaaatgttttccaaaccacagtctctttagaactaagcctatttgaaacggtcggtgtaggcttactgagatcaggagacagggaggccccgcacatcacacagataaagtcagacaattgtaattaatacttttgctgcctcaagttgttttttaaataaagtactttgaaatgcatgagaaaaaaaaaaaaaaaaaaaaaactcga

SEQ ID NO: 1588 - DNA, 1170 bp, Homo sapiens
gctcctgggcctcacaaagtgttgggattacaggtatgagccacggcacctggcctggtctcttaactggttccctaagacagctggaaatagagaatgtcatggagcattcctaaccatgggctccagcctggctttcattctgtttctcccctgaaacaacattcctttagtaatattccgaataacagcttcatcagtctgtctaccgaccactcttcaggcttcatcttatatgacctcccaaactgcactaagggttgtattagagaaaagtggataaagttcggagtcaggctgcttgagcttaaatgccagcttcacttaccagccacctgaccatgagtcagctgcttaaccattctttgccacagtttccttgtctatgaaaagggaaatggctcccacctcaaaaagttgttaacattaaattcaatcatgtattcaaagtcctgagcagaatgtctggccatgactgggacttaacagatgttagcatttattattagtatctgtcagtcttgaaatgttctcttcccttggctttcatgacattccacactctcctggttttctcttacctctctggtaatacctgtttgcttatccttctttgtccagctctgggatgttaccattccttcaggcgtgctgttttctccttaggcagtcttacacacactcatgacttccttccattgtcctccacacactgatgaccctaaaatcagtatctccagcctaaacctttccactgagttctagacccatatgttgtactatcaacctggcttgtccatttgaatgtcttccaggcacttcagactctcttctctagactttgctggactttcactcttccccctaaaactggctcctcttccactgaaacatgtatgtcattgagaggcaccaccatccacccagtgcctaagccagaaacctaggaatccttgatacctgttctctctcatcctgcatatccaagcctatcagttttatctctaaattatattttggtaggtttacttctttccttttctcccaccaccaccctgctccaagctaccatcatctcacccagaggttgcagtgagcccagatcacgccactgcactccagcctggtgacagagtaagactccatctcaaaaaaaaaaaaaaaaaaaaa

SEQ ID NO: 1589 - DNA, 1150 bp, Homo sapiens
gaattcggcacgagaagcagctcaacgtaatctacctgccactgggcaactagctaatgaccctccacagtgatgctgtattgaggacttggtgttgatctctaccgctggtcagttgggcactcagcggtggctctagccaggtcagctttggtgagtggaagtccatgttgctgagccatgcataacctccatccctgtcaccatggctactttgttcatgagcccactgtggaatgacagcagtggckggagaaagagctgactagtatcacagaatgggctctcctatttccttgatcattaaaatacctctctgctaagatcacctgttggtgagcattcacatgggacacaaatatcttcactataaaggcccagatagtaaatatttcaggctttgtggactacatattgtctctgttacatattctccttttcttctctcccctctcccttctattttccttcttctttatagccctttaaaaacataaaaaccattcttacattgtgtgctatagtttgctgacccccagcttacatgttaaaaaatgcaagattcatttaagtgaaaattgtattgggaaggaatccacatttccagataatgagggttgaggaaggcactgcatttattttaattataaattgggatttaaatctaagaaaacmtgaataaagcacccaaaggtattataaaaacacacacttatgtatatgtgtctatgtgtgtgtgtgtgtgtgtaaagatacacacacatacaattactcaataaataattacaaatcacctaatattttataagtttattaaccaaagttactggcacaaactcagatgcctactaggacctggcagataaaagggcatttttgaagtggttaagtacacagtagtaactgaactgcttatatgtcagtaaattcaaacgttagcagaatgactttgccagactttgtgaggactgagtaaaacatggttccaaacatatatgtggcccctgggtaatcagtttttatgatcacctgtaaaagcagaggcttgtttctaacatctatacttttaagaaattctttttttctcttaccctggtcataagaaaaaagaaaaaaaaaaaaaaaaaaaactcgagggggggcccggtac

SEQ ID NO: 1590 - DNA, 2612 bp, Homo sapiens
gggcgatggtttctggtgggaaggcccaggccgagggcgatggtttctgccgggacggccgaggccgagggcggtggtttctgccgggacggcccagacggaagggatgcggcttgggaggtggggcctgaggatgtggccatggcgcgtgctcttcctggctggtgcctctcctagtcagcttcaggagatgggctgtagatgtacctccactgcccagagctctgcaggggaaggcagtaaaacctccctgcatcctgacccacgtgtttgtagatcctttcagctattggcgccctggaggatgggacgggaaggagaacgtggccggtgggtggaggatagcactggtgcctggccccatgatggctgcaatgcggccacattctcagtgggtcatgtctgaatgcgagagcagctgtgttctgcgagtggtgaaacaattgcctgttgcattctatttataggcagaggtaactaaaaacctcagtgctgagaggggcatcatatagatcctgcagttatgagctggttcacttggagttgttttggttgcaggtgacagaaagcacgactcaaggtagcatcaaccaaacaggggaggtgggagcactcaccaggcagagaagtccctgcccccactgcttgcagcccaacagtgtggccccatatgggtctcccctggactaatggctgcggccttggaagtggtgtgctctgggccaggcctggatcacttgtccatcctgagttgggaatgggggcagcccccagagacagactcaggaaagggggagtgcaaggatgtcccccagatgccctgtgctgcccaggggacagctcactggcagtgggacgaaaccgctgtctgtccagggctctcttcctagaaggtcttaggaactcccaaatgggtgctggctggggttgcccggcccggtgctctcaaggagagctgaagctagttattgggtgcagatgctggctctgacccctgccccttcctcccgggctcagcttccccatctgtcatggagtaataacaacccagccttctggtccactgaggaatgtgtgtgcctgtgtgtttgacgctctcagaacaggcctgcagcgctgtgagccttggaagggggcctcacagctgctgccgccaccttggaggcccaggatgggactgagaaggggaagggagaggtcagagccacagctgttgggcagggacctgctgtaggaagagaaggccagggaggcgctggtggtggcctcaggctatgcaggtgatgcccattgtttccagggccatcccagttggaggttcctgtttctagaggaggttcccttgtgaccccctcatttccacacccgagcaatgctgagggctgtggggccccccaggggcttgagtgtggtttatggcacagcagggactgatcacagtggcaccgggtgtcagtggccagtggtcagtggccaggaaccctcaggaccctcctccttgtgtgggtggcatttacccacccacaggtcacgctcaggacccgcatctcattccgatcctccttgtgtgggtggtacttacccacccacaggtcacgctcaggaccccacatctcattctgaaggccgggcacaggcggttgttttctctccaacttcggtttccccatccccactcttagggcacaaatgcaggtgtagcttccccatgcccactctttaggcacaaatgcaggtgtagcttccccatccccactcttagggcacaaatgcaggtgcagcttccccatccccactcttagggcacaaatgcaggtgcagcttccccatccccactctttaggcacaaatgcaggtgcagcttccccatccccactctttaggcacaaatgcaggtgcagcttccccatccccactcttaaggcacaaatgcaggtgcagcttccccatccccactcttaaggcacaaatgcaggtgcagcttccccatccccactctttaggcacaaatgcagtggcagcttccccatcccccactcttagggcacaaatgcaggtgcagcttccccattccccactcttaggcacaaatgccaggtgcagcttccccatccccactcttagggcacaaatgcaggtgcagcttccccatccccactctttaggcacaaatgcaggtgctgtgagcgctttagaatcctctgctgcaggtgactttgcttcagcgaaccacagaatgttcacatggttttatgcatttgttatttcagggaaaatcaaggttaaagatgtcttcagaatttgtatttttgggctgggcacggtggctcacacctgtagtcccagcacttttggaggctgaggcgggcggatcgcgaggtcgggggatcgagaccatcctggctgacacggtgaaactccgtctgtaccaaaaatacaaaaaaattggccggatgtggtggcgggcgcctgtagtcccagctactcgggaggctgaggcaggagaatggcgtgcacccgtgaggcggagcttgcagtgagccgagatggtgctgctgcactccagcctgggctacagagcaagactctgtctcaaaaaaaaaaaaaaaaaa

SEQ ID NO: 1591 - DNA, 1485 bp, Homo sapiens
  SITE (1365): n equals a,t,g, or c
  SITE (1402): n equals a,t,g, or c
  SITE (1423): n equals a,t,g, or c
aggttttgaacaagtaatatgttcatgtggtttaaaatgctaaagttacaacattatacatagttaaaaaaaatctgtcttctaagtagatactccattgtcctctgtagggagaattggagttactagtttcttggctgtcattctatgcatttataaacagttgcatttttttccccttatttttactagcatattatgtatactagtttatacttcgactttcccatgtaatatagaatcttgagagattattctatactgtaacataaaagagcttccttgaaaaaatattcttaaaatagaatattccataaaatattctataaaatactgctttgaatatttgcaccactatctttttttctttttttttttgagatggattctcgctctactgcccaggctggagtacagtggcaccatctcggctcactgcaacccccacctcccaaatctatgatctctttcatatttgcttacttttctattagattgttgatccttcctcttactgatttatagaagccctttgttaggtgcattagctcattgaggtatgagttgaatgtatccagatttataaattttaaaagagggatttacaaaagtcctctaagtcttgctttaagttaatggttagagctgtgaaaacctaattaagtcatttcacacaatgttctcccatgagaaaatccaaagtttgtttaaaattcaaaatttaccattttaatcattttaagtgtatagctaagtggcattaaatacattcacaatattgtataaccaccaccactttctatttccagaagtttttcatcacccaaactacaactctattaaagtaataactactcatttccttcccgtcctcccagcccctggtaacctgtactctgctttctgtctctatgaatttccctactctagatacttcatataagtgggattacacaatgtttttccttttttgtctggcttatttcacttagcataatgttttcaaggctcatccatattgtaagcatacggaggaataatctattggaatatttttatatagcatattatttacatataaattccatatggaggaataatattcaattttttgtgtacaccacatcttggttatccattcatctggtgaaaaataatttgggcctaggcacagtagctcacgtctctaatcccagcacattgggaagctgaggtgggtggattgcctgagcccagaagatcaggaccagcctgggcaacatggcgagaccccatgtctataaaaaatttaaaaattagttgggcgtggtggtgtgcgcctgtagttctagctactcaggaggctgagatgagaggatcacctgngcttaggagatggaggttgcagtgagctgagattgcnccatgcactccaacccgggcnacagagaccctgtctcaaaaaaagttgatgaacgcatacatattaaaaaaaaaaaaaaaaaa

SEQ ID NO: 1592 - DNA, 1566 bp, Homo sapiens
  SITE (1013): n equals a,t,g, or c
  SITE (1020): n equals a,t,g, or c
gaattcggcacgaggatttccctgggccattaagaaaagtaccttttaatgtgctcaagaattcagggtttagaaagatttccatccagattggctccttaaagaaaaaagatgcggtgcataatttattttactttcagttatctgctaacgcagctatgcaaaatgactcatttattggggagtgggtggtggcattaggtaaagtcttaccatattgtctattttgactgtttcattcttaatagaagtctacacattgcctgcaattgaggtataattttctttaaagggagtgttgtttcagataaggtagctgcgacctaagaaaggaataattctatatgattttaagtctttagggratggaagcactgtcttawtaattggaaagtcccaactgatagcactgacatawtcatgtgctttctttgcctgcctgctcatctgcagccctgatcacagaaggaagggagaagtagataagaaatagtagttatgaggatgaaacgtgcacatataggagccctctcacgttaggcttggtttggtgtctggaggcacgtgatgagaacagcagtggatctgtgggctcatgtttccttactcctgctctattaggactccagtctgaagggatgatctagtaccaaccaggagatgtttagaagamcgasatgtttcctgaagtattctgagctgtctcargttgattacgtgctttcttatcttagatggctcctggagagctgtctgggtaatatgctctcccactttggtaattttggattttttgcaratgctttttgtaaaagaacacctatgagtgaggcctatggttttggggtttgcagtgcccaaccagtcaagctggtctttgccttttttgtggttggatatggaaagagtggtcagtagatttcccagtgctgtactcatgccattcagctcatagtcacataggtttccatatttgctaataaaaataagaaaattccggaaaaggggagtangttgganttgtcaagttgaactgtgaatggtgtggatgagatattctggggagagaatggacagaccaggtttggcttagctactagttgagtgtcccttctagctctctgggatttctttctaatctgtaaaatcacctattttgttgaagtargcttgcctgtcctttcaattcttggacatttcagaacataagctatgtgtttttctggaaaaaaaaaaaggatatttgttagaattagaatttacttgttatgaatctaaccttcacacaccaaacccccagctaagacagtaagttgcatatataattgtaataaatactatgtaagtctgaaaggggaaagagaacttgagtttgcgacttttcttataatcttgaagaagtaattcccagacttcagagtgtgtaagaaatcactagaatgctagtttaaaaaggcatggattcctataccccagttacacagttcttatggcctgggatagagcctggaagtctgcatgtcacaggtgaaaaaaaaaaaaaaaaaaaaaaaaaaaaaaactcga

SEQ ID NO: 1593 - DNA, 1638 bp, Homo sapiens
  SITE (1578): n equals a,t,g, or c
tttttttttctctcctctctaaacatttatgatgtatgatacagtgtgtcctggctggatttttcctgttagcaggcagaaagaatccctcctggattccagaataataaatacagtcatgtgctgcttaatgacgttttcgtcaacaatgggccacatatatgatggtccaaagcactatactgtacatcatctcattggaaaaccttatgaaataggagggcaactatcatcataatcatcttccttccccccaccaccaacttcagggagtgaggtcctgggaaatgaagggacactatccatgtgcttggatgtctctatcctggttccgtactctttccgctatgatatactgccttctatatatagataaaagttcaattytctttttcacaaatgagaggagaatatgattgagttttagtaaaattgatatccagtaatactataatgtatttagatcaagttagcacctaaatagcaaacctgcttgctctattaagctagtgatttttcactataggtgctaacaaccattacgtagcatctattctctaaaattgttgctatcggtctagcagaggagcagtgcactaatgtgggtgcagatattatagaaaccagaatacatgggtgatgactgttccactcaccatcttctcatatctctggggatctcattgtggagtaaggggcataatgttagtataccttttagagatcaaaggggcaagtcagcatcagctgaaagttgaatcacctcattaaagaattttatatccctttcagggggttgatttggaaaggaaaacagacataagatttgaatgtatcagtgtggctacttgtgaacatactgcattcaactaatggatagaaatttgaataaaatatttcagaagaggtttttcttgtgtgtgtgtgtttttaaaaagaattttgtaatgcacttcttccatgcatatcttatctactcttcagggaatacagaagcagatttacaaatgaagagacagtgtcattctgcttgagggtaatggtgggtgtcataatactctatgaccacgtacatccagtgggagcatttgctaaaacttccaaaattgatgtaagttattgttttatataaataatttcaaacgagtttctccatggaaaccataggattttattttatgataagagccagcaaaccggactctcacaaaactcagatttatagtttgtgaaatggtggactttcatctcctctgtccctgtgctgtttttcttgtggcctgtattcaggtggaatagaatgatcaaaggatgactatattgtctagtgagtacctcctggaaggcttctactacgtatttggcaatataaatagataattagatataaggaattttgagtcatatcctttaattcctttggccaaaggccatttcaaataaaatgtttatttcagaatgcatataaaaagtcagtagtgctgctgggcgtgctggctcatgcctgtagcccaagcactttggcaggctgaagcaggaggatcacttgagcccaggagtagaagaccagcctgggcngcatagtgagacccccatttctacaaaaaaaaaaaaaaaaaactcgagggggggcccgaa

SEQ ID NO: 1594 - DNA, 935 bp, Homo sapiens
gtggtggtggctgtaggacctggtgaataataaactgaaaaccactgaatcgtaccccttaaaaacacacaaagcaaattgacaaattattgggaggcaacataagagaatggggtgtgaactttggatcagtgcggcctggatatcagctgtgtggtgttcaaatagattgcataacctcgttgagtctcagtcttcccatctgtgaagtagggatcattcctacttcgtagggttggcatgagactcagtgagatgaagttggtgggtcacttggctggggcaggtgtcacggagcgggacctgtgattgttcagccacctactctgtgcccagtgctgtgttggtgaccaggtatgtatgaagtcagtaagccacagtcctgagttatggtgcagaccccacatgcacccagagtcagcttggcaagaccccttgacaccacgtgcgtggagggtgcaggtcggagagctcacctccatggattccgtagagctttgaggcgtatccacaaagtgtccaggagaggtggcgtcgcctccacttgatagaggagaaagcagagatggaggcagccagaagcatggtgcagtggtggggtttggtcattaatttgataatcacatggaatacaagctaatgtttattgagtacttactgcctgcccgctactgtaactaagtgctttactcctgttatctcatttaattctcaaagcagccctgtggcactgaggtggctggagatggagggatgtgtggctgccatgtgtttgccaggaagcagcaggatgggagtgagggcacagacagacacacatgccaggacttgtttgcacgaagctgaggaatgggtgcccatcattcattatactcatctctctgttttatgtatattcaaaaaaaaaaaaaaaaaaaaaaaaaaaaaaaaaaaaa

SEQ ID NO: 1595 - DNA, 628 bp, Homo sapiens
ggcacgagcgggaggctgaggcaggagaatcgcttaaacctgggaggcggaggttgcagtgagctgatgagatcgtgtgccattgcactccagcctgggtgacagagcaagactccatctcaaaaaaagaaaagaaaaattttatatatgtaatttaacttgcaaatgacaagtttttaatattttcttatttttgcttgtgtttgtttatgcctttaattccttgaccagaatgactatagctaaattaactttggtagtgtattttcattcatttactatctcgtcatttccatgggtcaggagtctgggcacaccttagctgggtcctctgttgagagtctcaaaaaggctaaccagaaggtatcagccaaattgtatttatttctagaggttggagtgctcttccaagttcatggagttgttggcagaattcagttccttgcaactgtgggactgaggtagccattttcttgagggctaatggccagaaattgctctcagctccttagaggctattcacagttccttgccacgtggccttctcacagaccctctcagagcacagcagcttttacatcttcaagatcatcagcaggagatctgtctcctgctgcttctctcttac

SEQ ID NO: 1596 - DNA, 410 bp, Homo sapiens
gaattcggcacgagatgccttggtatttctccccttccctgttgtggtctctgtttcagtggtcggactcagaagcaggttctcgactatgttaaagaaggaggacataagaaggtgcagtttgaaaggtaagagaagcttcaatgctacttccagtctgagaaggctcagactcgccaggtaacagtttgttgctgctaaatatttctttacccagacttcagacttgatgtcccttgagttgtaaatgatagtctcagtcatcctcagcaagtccagtgttagagaggaaggttttagagcccaggggcacaccctcgagggggggcccggtacccaattcgccctatagtgagtcgtattacaattcactggccgtcgttttacaacgtcgtgactgggaaaaccct

SEQ ID NO: 1597 - DNA, 1409 bp, Homo sapiens
  SITE (478): n equals a,t,g, or c
gtcaggatatgagtcttcctatgtcattctttattctttcacatttatcatcttttatgatatgtacatatggcaaagattattcccactttacagatgaaggagcatttacttgaaaggatgcagaataaaaacagatataattcatatactaaaagacatttcatagacaatggcacaatgatttctccaaaccgccctacattatatgatttcttatcttcattgtgttgctgattaaacagtttaagtgatttatccagttcctcttaggaagtggcagaatagaaagctatgatggttaattttatgcgtcacttgactgagccatggggtgcccaacatttagtcaaacattattctgtgtgtatctgtgargatccttctggatgaaatcaacgtttgaattgttagactgaataaagcagatttctctccccaatgtatataggctcatcctatttgttaaaggtctganatgttgactctctmtcttagtccgttctatgttgctgtagagagatatgtgagactgggtaatttataaggaaaggtggtttatttggctcacagttctgcaggctgtgcaagaggcatggcacaagcatctgcttctggaaagggacgtcaggaggcttccaatcatggcagcaggggaaagggagaagggcaaggtatgtcacatggcaagagmggaagaaagagggagagaagaagaaggtgccaggctctttttamccatcagttatcatgggaactwatagagtgaggactcagcacaaagtcatgcataaaggatctgacccgtgatccaaacagtttccaccaggccccacctccagtgctggggatcaaaattcaacatgagatttgaagaggacaaatatccaaactatatcaccctcccataagtaagaaggcccctgtgagtgcagtgtgttttagtttaagctactaggaagggtgaggcaggaggattacttgttgagcctagaggttcaagtcctgcctaggcagcacagcaagaccccacctctaaaaaaatggagcccctcctgtcatagtacaccagatatttcctgtcttctaacttgaactgaaacatccatattttaaaagtctcaagtttacaaatcttgggactttttagcctccatatcacacaagccaatttcttataataataataatgatgatacaatatataggatatatattgtttctgtttcactaaagaaccctcatacagaagccaagcagcatcctctctaatgtcaaaatcagtgctttttctgtgacattcatgctcctctacgaatgaaaacctggctcacattttatgctaatactaaggagtaaaaaaacatccattacttattgtatacaataaaagcttcacaacaattgag

SEQ ID NO: 1598 - DNA, 1300 bp, Homo sapiens
gcacagaagtttgaaaagtaaccctgggaagaaatgaatgaggaggaaagaaaatgtacaaatgagaaggacccagtggatttgccatacaaagtacctctgagtaaaaccactaaattactcttggggttgtggggaattkagatgccactggccatttttgccttagttgaccttttttgggtcagtagtttctcaaacatcaatgtgcctaaggatcaccttgtgaagtgtttaagattcagagtcctgagccaccctgagagatctggattaaacagatcaaggaatctgcatttttaactagcactgccagtgagtttgtggactacactgagaaaatggctctacaatgttaaaagcacacatattttttaaaaatgacaaatgccatttcaaacagacttacaacccatttatataggctttccctgcaaagtacacagttttgacttataatcaagcctacaggaatgtaactagcaagggagcaaaggagagcaggagattagaagaagaatcaataaatggctcaaatatgtgaaataaccttgttcatccaaaatacaggatggtggtgttctaactgtcatggtagggttcaattgcctcagttcaattttaggaaaactggcaatcatttcttttgcaggggacacaatttctgaagaacccagtcctttaaaaaaaaaaaagtgagctatcaccccactattgagagagcagctactagctcagtattggtgtacccagatgggcagcctagcagccaaggaaacagaggtgggtctatgtactgtcccatcctgtcaccctttatcagtgagaccttgggcagagcctggctcatttcctggcatacgataggctttcctcatctgcacaatgaatatgcatccacatgttaaaccaccacttcgcaaattataaggttgaaatgagataataaagttgtgtccttagcatacagactggaccgttgagaagtgcagggggaaaaaatcagaaagatctgattttagatttttagtcaaactaagcaagaggacttaacatttcagcaactcagtttgcaccatgaatttctccactcaatttatgagaattactattcccttgaagtgatttaaggaatcattaagatttggcagtggaaggtgggactcatttcatataccattacccttaagccgagactactataagaagttggtacatggccaggcacggtgctcacgcctgtaatcccagcactttgggaggccaaggtgggtggatcacttgagttcaggagctcgag

SEQ ID NO: 1599 - DNA, 397 bp, Homo sapiens
ctcgtgccgattcggcagaggagatatcatctcacaccagttagaatggcgatcattaaaaagtcaggaaacaacaggtgctggagaggatgtggagaaataggaactgcaggttcactttcatwttaggattattgaggtataatgtacatgcaacacgtattactatgtctaatgtacatttcaatgagttttaacaaatttatattgtcatgtaataatcaccatgatcaatttacagaacgtttccacttgctgtagtttggatgtttgtcccccaaagtgcacgttgaaatttgatccccaatgttggaggtggggcttaatgggaggtgttggggttattggagtggatccctcaagaatgccttggtgccatcctcgaggggggggcccg

SEQ ID NO: 1600 - DNA, 964 bp, Homo sapiens
  SITE (883): n equals a,t,g, or c
ggctgaatgagttggctcaggattatcttgtccatgttgaaaactgcatttgaacccaggtctgtctgactccaaaaaccaaatggtttcctcctcatcatttcagaaactagcaaaatgcttttatgtacaccatttgattttagaatcctgtacattttctaaatgagggcagtgagactcagaaaaatagtatgtccaaagtgactaaggtagtagagagaagattcaaaaccctatcccaggccttctgactcccattccaatgctcttccagctacatcacagatcttttgagcaccccctgaaatcgcacccaaactgatgttcacgtggcagatacctcaccaccctctcctcacctcacgccttaaattctcatcttcaggcccctctgtctcaggtgacactcatgctggtaaaatgtcctgtgttttctgccggaagtagccagcccagacaggtgcaggagaggtctgctctagagggatatattgcacagccttgtccctgcctcccctatttcaccgctgatttctgatgggacccccagatgagtatcatccccctcctggccatttacaacctgcaaagcaacttgagttcctccagagggactggcagctctgtcaagaccatatacgattttcccatgaaaagtacctttggaagaagatttcttcatcagtttccaccatgaacacagatggacacgtttctccagaatcttctctgctgtcatttgctgtcctgcaaagaacctgggattgtccttcgctgggacagagagggtcaggcccaggctggaagttctcggttccactggtgctctcggggggaaaaatgtggtatttttccttttgtcttttctgcttttgttttncgctttgctccaagctgatgattctctcagcttctgtcttcatgatgccaacactaccaaatgaaaaaaaaaaaactcgag

SEQ ID NO: 1601 - DNA, 1004 bp, Homo sapiens
ggaattcggcacgaggcaaaataggcaatgtctcttttatcatagaaactatgtcctgattagaaaagatggaaagttcaaaataataattatgaagtgcataaaatagggtgtgttagtcaactatgccacagcagtgctgggtagcatacagccagtaactccacaacagcaagcatgtgtacctcatttatgcaactatggtttgtcctgggtttggctgatctaggctgggcttggctccaggccatatgtttagttcatgtctgttccttgcatctctcactcttctgggaccaacaggttacccagggcatgttaccctcatggccatggaagaactaaagtaggtgagcccaaccactctatcacatttcaaatctctgttcacttctacccactaatatcctgttggccaaaacgaatcatatggccaagcccaaaatcatgtggtagggaagtaaataccatccacaattggagcggggaggccatcaacacttgctgggcaataatccaaactgttatgcagaatgatgtgataaaagggatcagagagaagtgctgtgaggaatggggatgagttcactgggatgatgtcagagaggcaggcgagggccagatcttgctgagctacggaaagaaatggcacatttgatttgtgatttcaaataatccctttcactgctatgggaaaactggattgtaagttggcacgaagagcagatgcagggaagtcccagcaggtcggacactggttccagtgttcctaggtgggtggtgatagaaaggtgttgcactttgaatagtggcagtggagatgaaggcaagcgctagactgagaaacagaagcaaatggacagggtaccaaagtggataacatgtggtccctgaccttaaagagctaataacctacttgatgagaaaaagatgtacagacacagccatggtttggagagatatgtttttaaaataaggccatacacaaaaaaaaaaaaaaaaaa

SEQ ID NO: 1602 - DNA, 1110 bp, Homo sapiens
ggcacgagtgggtccaaaagcatgttgctcattctgttttttatacaggttactggctgtattagagagatggtctgggcttttaaaggcataactgaaaagggaatttcatactagttatggttaatgccagagtgctagaactagtgaagcctactgggagaaggtatgtttttctaaagaaagaattttggcctttaatgttacaacattcaaatttgcatctaaaactttcactctgggcaggttagaaagttaaagatattggtcaaatgattgggcaattcacctgttttcattaatctgtgttttgatccctatgatgtaaacaatattagtggatggattccaggattcttctgagagagggatatctttttgtttacagaaattatttgatgagagattaacataaaaaatgatgatttgaatgcctggatggctgtcccgaaagcaaccagagaaaatggttgataagaaaatcaagagatgcacttaagtttgacttgtttttgttttctcctgggaagatgaatagtgttgaaggattaaaaagatgatagaaaaaaagaaatgagagaggcattatgaaagaacccaagattggctgctgtaggatgagaacaatcactgggtacatgtaaataagaaatattatagagcgtagatatttctaataaagagtttaatctctctttctgttttgtgcaatatatgtcataaatctcatgcaaccctcatgtgattgatttattttcagaggccaatgctggtgaagaaactgaacattttataactggttagacatggtatggaacagagaaatccacactgaaaaagctgctcagaggagaagaaagagtaagtttaatgatcatatgcagaatttgagggctgtcaggctaccctttgatgtgacattcagctgggatacgtgggttattaaagttaacttgattgtaacaataactgataaaagctgctgtatcctcattcataggtagattatgtttataaagaacagtacctgatactactagatcagtttaaacatagttttgctattgttaagagaccaaagaattgctacattttgattggttgaatgca

SEQ ID NO: 1603 - DNA, 639 bp, Homo sapiens
attcggcacgggrttttwatatttcctgatctttgaaccaataaacacagaatacctactgtgtgtcaagtactatgctaggtgttgaaacaaagataaagtactatggaaactattaacacacacacacacgcacatgcacacatgcacaaacctatattcttttttcttaccaaaaccccaaatcatgctcctaattttgaatgtgcaggtgcggtttttgggtgattgggttctttctttgctatgtgggaggactccggtagagtagggtggttgtcagacagaagcagatgctcttatcagccgggcattctcaccccaggtagaagtgctgtctgtggtcgctcagcagatcctcagcatccaacaagccatcattcggaagctaaagacattcatctttgaagggactgagctctctctgaacccaacgcgcgctgtgttcatcaccatgaaccccgggtatgctggcagggctgaactgcccgacaatctcaaggtaaatgccagcagatatacatgtggggtgtgctttttagaatagaaacctctgggccgggtgtggcggctcacacctataatcccagcactttgggaggccaaggtgggcaaatcacctgaggtcaggagctcgag

SEQ ID NO: 1604 - DNA, 1197 bp, Homo sapiens
gagaaactttcccttcctgattctgtgcaagcacggctgtgagcgaacagcctccgtatttcaacaaacatcctacttgtatggtcttaggatctgtttccagacagtcacctcggggctcactctagtcctgaaagcatcttcccatccctttgtgatgttcagtctgttgcgggcattcccctctgacaggtgtccttgccctgctgcttctacagggtggcaaagagcaagggcttcagctcccaagctcagctgcagggcacttaggccccgagtgtgtccccagtgaccctgacttgagggacacactgggcgctgcagccacaaggcactgctcctgtagtcatggtgggcagccagcattgccccaggccacagtgctggtgtcccaggctcctcagggacctgaggacagggccaagtgtgccagtccacaccaggctggccctgccagtccacaccaggctggccctgccagtcaacaggtgcacatacaggtcctgaaaccacctcaggtcaaataagggatttgggggcacacaggttgcattctgcctcttgggaagatgatgcaagggaatgacaggcaggctggttccaacgcattgccaagcgccagctgagcgggctgggagcaggcacattccggtaaccaggacagaagtgggctagtgatacctggtcatgtcttttcccaagacaaaaccaggaagactggcccagcccgtttggtgtgttacaggctgaactgtgcccctccccaaatgtgtatggtgaaggcctaacctccagtacctccaaatgtgacctcacttggagagggggtgtttagagaggtaatcaggttaaaatgaagtcattagggtgggtcataaccccatacaactgctgccctgatatgaaggggaaatctggagacagctgtgtagaaaacaccatctgaacaggaagacagccatctacaggtcaaggggagaggtccgggaccgatcctccctcccagcccaaagcaggaactgaacctgacacctggattgtagacttctggcctccaggacagagacaatatgtgctgctgttgaagctgcccaggcagggttcctctgtgaggcagccccaggggactcagagtgtgccccaggagtcctgtgggaattgccccacccttcctggcacactcctgaatgttctcga

SEQ ID NO: 1605 - DNA, 421 bp, Homo sapiens
ggcacgtaggaactcctgacctcaggtaatccgcccgcctcagcctcccaaagtgctgggattacaggtgtgagccaccatgcccagcctaatctttattatttccttctttctgctagctgtggatttagtttgtccttctttttcttgttccttaaggtgtgcaggtaacttgtttctttgagatctttcttattttaatgtaagcatttccagctgtaagttccttcttagcactgcttttatagcagcccatattgtgtttttgtttttattggccatgttgtgtttttgttttgttttgttttgttttttaagacggagtctcgctctttcacccaggccggactgcagtggcgctatctcggctcactgcaagctccgccacccgggttcacaccattctcttgcctcagcctct

SEQ ID NO: 1606 - DNA, 1112 bp, Homo sapiens
ggcacgaggctccacccgggctgtttttatgacagctggcaaaacacgctaaggcacattgaggactcagtgaggcaggttcctgggcctctgttaggctaagtttgaagttgttccatcactgcctccctctgccttctttgccatttccatccatgatagcactaccctaactagtgatgagaagcagtctttggagttcctcttctctcctgtccctcatggctaatttccctgctcagacttctgcctctggtctctttccttctgtgcacactgacttttttccctctcctgtgccgagctggagggtaggaccctctgctgcagcactgggtcattctcaggataaagtcttggtctatctgggcgaacagatcacttccagctcgattcatacatagtgactcttgcttgaatagcaagatttgcccaaatcagagctttaatcctatatatatggaacaaataatcacttccagatctccagggaatctgctcacccttcataagtttactagacagtttcagaattttggaattgaatgtaagaattatgaagggagctgcccttcaacacgtggggatgatagattaaaggattatgaacttagccagtggaaggtgaagaagggtgtagtatagcggttggggtcacagggctgcttctagatgccaggtggcagcccgtttcttgccccaggtggtagggtagttgtgcatctctgttttgtgtacttttcaatgtttgttacctcacaatagaagaggtttaaaagactattttgtgagagatcaagttttaagtgctttttgcccccatcattggcttggctaggttagaacaaagtgtgataattgtatttcctttttttcttttctttccttcccttctttctctccctctctctcgttctccctacctcgctctttctttttataggaatggaaaacaaactctattcctataagcttctctatttctcctttttttccaaaatggaaaaaaaatagcaccagccacaagaggcctttgtggtgatgacatgctgtaatgaatgttaagttaaccacattacctgacacacaggctcagtacaggccgtcccatt

SEQ ID NO: 1607 - DNA, 418 bp, Homo sapiens
  SITE (80): n equals a,t,g, or c
tcggcacgaggttttatttcatgtattctttgtctatgtgtatatgtgtgttttatatgatttatatttatttatatttnatgtttacttacaaagttggaagccagacctggaaggacttcccctaccatactaaggaaatttaatttaattttgagtataaaggagaggtgctaaaggattttgatcaatgaagtgatagttctagtacccttacggaaagtggattagaggaggctaagaatgaaagcagggaagctggatgtggtggctcatgcccgtaatctcagcagctcgggaggcggaggtgggaggactgcttgagttcaggagtttgaggccagtctgggcaacatagcgagacctcatctctaaaaaaaagaaagaaagaaagaaaaaaaaaaaaaaaaaamtcgag

SEQ ID NO: 1608 - DNA, 759 bp, Homo sapiens
  SITE (740): n equals a,t,g, or c
ggaattcggcacgagtgtgtgccctrcattccaaggaatgggccaagggtttagatgaccctcatagataaggaatgaggctccaggctggccactcctggatttcttagcttggaactccaaaaccagcactcttcttagaccacagggccagtctcagggtatgtttaagttattgctgtcaggtgcatctgccatacactgtgtgtttgtgtgtgtgtggtgcagtgtggtgcatgtgcgtgtgtgtgtgtgtgatgtgctggagttgctgtgtgtgctgagtgggagagctcaacttcattccttgggtgacaagggagaagatactgatgggaggaggcgaatcacaggtttgcatttctgaaaatttagtctggagaaagacggacaggctatggggacatggagcaaagctacttcagtggtccaacaaagagatgatgagggtcagagtcagggacgcagctgggggaaaaacgtgaaaaatactttgtagataaaatggtcaggaccagatccttgcctttaactattcagtgcctgaatatatccttgatgacacagtagactgagaaaggaacaatctgcacaagaatgagaaccttggtsgggggttgtggcttacgcctgtaatccagcamtttggaagccgargcargtggatcacaaggtcagaaaatcaagaccatccttgccaatatsgtgaaaccgtgtctctactaaaaatacaataattngcctggtgtggtggtgggc

(The sequence listing continues in the following parts.)

What is claimed is:

1. An isolated nucleic acid molecule comprising a polynucleotide having a nucleotide sequence at least 95% identical to a sequence selected from the group consisting of:
(a) a polynucleotide fragment of SEQ ID NO:X or a polynucleotide fragment of the cDNA sequence included in ATCC Deposit No:Z, which is hybridizable to SEQ ID NO:X;
(b) a polynucleotide encoding a polypeptide fragment of SEQ ID NO:Y or a polypeptide fragment encoded by the cDNA sequence included in ATCC Deposit No:Z, which is hybridizable to SEQ ID NO:X;
(c) a polynucleotide encoding a polypeptide domain of SEQ ID NO:Y or a polypeptide domain encoded by the cDNA sequence included in ATCC Deposit No:Z, which is hybridizable to SEQ ID NO:X;
(d) a polynucleotide encoding a polypeptide epitope of SEQ ID NO:Y or a polypeptide epitope encoded by the cDNA sequence included in ATCC Deposit No:Z, which is hybridizable to SEQ ID NO:X;
(e) a polynucleotide encoding a polypeptide of SEQ ID NO:Y or the cDNA sequence included in ATCC Deposit No:Z, which is hybridizable to SEQ ID NO:X, having biological activity;
(f) a polynucleotide which is a variant of SEQ ID NO:X;
(g) a polynucleotide which is an allelic variant of SEQ ID NO:X;
(h) a polynucleotide which encodes a species homologue of the SEQ ID NO:Y;
(i) a polynucleotide capable of hybridizing under stringent conditions to any one of the polynucleotides specified in (a)-(h), wherein said polynucleotide does not hybridize under stringent conditions to a nucleic acid molecule having a nucleotide sequence of only A residues or of only T residues.

2. The isolated nucleic acid molecule of claim 1, wherein the polynucleotide fragment comprises a nucleotide sequence encoding a secreted protein.

3. The isolated nucleic acid molecule of claim 1, wherein the polynucleotide fragment comprises a nucleotide sequence encoding the sequence identified as SEQ ID NO:Y or the polypeptide encoded by the cDNA sequence included in ATCC Deposit No:Z, which is hybridizable to SEQ ID NO:X.

4. The isolated nucleic acid molecule of claim 1, wherein the polynucleotide fragment comprises the entire nucleotide sequence of SEQ ID NO:X or the cDNA sequence included in ATCC Deposit No:Z, which is hybridizable to SEQ ID NO:X.

5. The isolated nucleic acid molecule of claim 2, wherein the nucleotide sequence comprises sequential nucleotide deletions from either the C-terminus or the N-terminus.

6. The isolated nucleic acid molecule of claim 3, wherein the nucleotide sequence comprises sequential nucleotide deletions from either the C-terminus or the N-terminus.

7. A recombinant vector comprising the isolated nucleic acid molecule of claim 1.

8. A method of making a recombinant host cell comprising the isolated nucleic acid molecule of claim 1.

9. A recombinant host cell produced by the method of claim 8.

10. The recombinant host cell of claim 9 comprising vector sequences.

11. An isolated polypeptide comprising an amino acid sequence at least 95% identical to a sequence selected from the group consisting of:
(a) a polypeptide fragment of SEQ ID NO:Y or the encoded sequence included in ATCC Deposit No:Z;
(b) a polypeptide fragment of SEQ ID NO:Y or the encoded sequence included in ATCC Deposit No:Z, having biological activity;
(c) a polypeptide domain of SEQ ID NO:Y or the encoded sequence included in ATCC Deposit No:Z;
(d) a polypeptide epitope of SEQ ID NO:Y or the encoded sequence included in ATCC Deposit No:Z;
(e) a secreted form of SEQ ID NO:Y or the encoded sequence included in ATCC Deposit No:Z;
(f) a full length protein of SEQ ID NO:Y or the encoded sequence included in ATCC Deposit No:Z;
(g) a variant of SEQ ID NO:Y;
(h) an allelic variant of SEQ ID NO:Y; or
(i) a species homologue of the SEQ ID NO:Y.

12. The isolated polypeptide of claim 11, wherein the secreted form or the full length protein comprises sequential amino acid deletions from either the C-terminus or the N-terminus.

13. An isolated antibody that binds specifically to the isolated polypeptide of claim 11.

14. A recombinant host cell that expresses the isolated polypeptide of claim 11.

15. A method of making an isolated polypeptide comprising:
(a) culturing the recombinant host cell of claim 14 under conditions such that said polypeptide is expressed; and
(b) recovering said polypeptide.

16. The polypeptide produced by claim 15.

17. A method for preventing, treating, or ameliorating a medical condition, comprising administering to a mammalian subject a therapeutically effective amount of the polypeptide of claim 11.

18. A method of diagnosing a pathological condition or a susceptibility to a pathological condition in a subject comprising:
(a) determining the presence or absence of a mutation in the polynucleotide of claim 1; and
(b) diagnosing a pathological condition or a susceptibility to a pathological condition based on the presence or absence of said mutation.

19. A method of diagnosing a pathological condition or a susceptibility to a pathological condition in a subject comprising:
(a) determining the presence or amount of expression of the polypeptide of claim 11 in a biological sample; and
(b) diagnosing a pathological condition or a susceptibility to a pathological condition based on the presence or amount of expression of the polypeptide.

20. A method for identifying a binding partner to the polypeptide of claim 11 comprising:
(a) contacting the polypeptide of claim 11 with a binding partner; and
(b) determining whether the binding partner effects an activity of the polypeptide.

21. The gene corresponding to the cDNA sequence of SEQ ID NO:X.

22. A method of identifying an activity in a biological assay, wherein the method comprises:
(a) expressing SEQ ID NO:X in a cell;
(b) isolating the supernatant;
(c) detecting an activity in a biological assay; and
(d) identifying the protein in the supernatant having the activity.

23. The product produced by the method of claim 20.
